United States Patent Application Publication US 2013/0096032 A1 - sequence listing, part 21

SEQ ID NO: 667 - DNA, 125502 bp, Arabidopsis thaliana
tctagtgaaaataaagacgcctctcagtcaactgtctcccagtcagctgcagatgcttctcagccagaagcatcaagagatgtggaaatgaaggatactctacagtcagagaaggatcctgaagatgtggtcaaaacagtaggagaaaaggttcaactggctaaggaggagggtgcaaatgatgttcttagtactccagacaagtctgtttcacagcagcccattggatcagcttctgcaccggaaaatggaacagctggttcgctctttctctcactctctgacacattaattactttacctacattgcatgattcttttatatcttatcggtttgttattgaaatgctgtttgcaggtggaaatccaaatatagaaggaaagaaagagaaggatatttgtgaagggacaaaagacaaatataacatcgagaagcttaagcgcgcagccatctctgctatctcagccgcagcagtaaaagcaaagaatcttgcaaagcaagaagaagatcaaatccgacaactttcgggatcattgatagagaagcaggtaagatattgtttttaagtgtaagcagcttagattccgttttgattatgtattgttcagagttgtaacttatgagcggttttttctatgtttaagcagctacataaactagaagcaaagctatctatcttcaatgaagctgaaagcttgacaatgagggtaagagagcaattagaaaggtcaaggcaacggctatatcatgaaagggctcagatcatagcagctcgactaggtgtcccaccttcaatgtcctcaaaagcatcgttaccaacaaacagaatcgctgcaaattttgctaatgtagctcaaaggcctccaatgggcatggcctttccacgcccaccaatgccaaggcccccaggtttccctgttcctggttcttttgtagctgctacaacaatgaccggaagttcagatccatctccaggttcagacaatgtttcttcggtttagtggtcccacattatagtgttaagatttgcagggtagctcttcgtgatgttctctatttataagccaaggtacattatcccaccttttgcggcttcaacctttgagcttggtttcttttctgaagatttatcggaattatgtaggagacggtgatatggggaagttagttaggggttttagacccatcgattaatgtttaatgtaactgtcaaatgaaactttcggagatctgtgaatgtgtttttatggttctttcaactttaatgaattgtaacgttgacgagagatatatgattccgcaaaaggtgggaatgtcttatttttttctttatggattgttgttatacacaaacgcgtacatgtaatgcgtgtccgataataagttttaggttcttgtttcttggacaagatttgcttgtgtcacagttgcaacggtatatcaaactccaaccccaatcacttctggctgtgacttttccttatgtaaccaacgttatgagccaaacattctttctcttatgtcgtttgattactcctgccttttcccgctacttagccacagtatcatggttggattattttctaaaccgatatggtcccaacgtcacaaacttcaaacggcacagatgcaaaagtagtagtaagccaaattagagagactactacggtttcttgagagagcaaatatagatgataaatggtagagaagagacacgctttgtcctaattatagctaaatgaaagtttacatttttgtcagaagaaatctcctcctctttccttaggaagaagctatttctccacgctgtttctacaatttctctctccctttcattttctttctaatcttcttcatcaggtactcatcaatctctccaaattctgggtttccattgcatacgatttgcttcttcacaagtattggttttgcttgggaaacaaggcagttgcgtcgtggatcaccggggagaaggtttctccaccgtttgagaaaccctaataacaacattcaaaatggcggactcaccggtggattcatctcctgcccctgaaacctcaaatgggacaccaccgtcaaacggaacatcgccgtctaatgagtcatcgccgccaacaccaccttcttcaccaccaccatcatcaatatctgctcctccgccagatatctccgcttctttttcaccgccgcctgcaccaccaacgcaagaaacgtcacctcctacatctccgtcctcatcgccgcctgttgtagctaatccgtcaccgcagactccagagaatccttctccacctgcacctgaaggctcaactcctgtaacgccacctgcaccaccacaaacaccgtcgaaccaatcaccggaaagaccaactcctccttctcctggtgccaatgatgaccgaaacagaaccaatggcggaaacaacaacagagacggctccacaccatcaccaccgtcgtcagggaacagaacttccggtgacggtggctcaccttcaccacctcggtcgataagccctcctcagaatagtggagattcagactcatcatcgggtaatcatccacaagccaacattggattgattattggagtccttgtaggagcagggcttttgcttctacttgcagtgtgtatttgcatctgttgcaacaggaagaagaagaagaaatctcctcaggtcaaccacatgcactactacaataacaatccttatggaggagcaccctcaggtaattacagtttagtataactggaatttaatttgtagcctaatggtgtttgattaggtttcagaacgatcatagtctaatggtttctgctagctccatatggcaaaaggattagatttataagctaaaggagatgttgcatagtgtaggtaatggtggttattacaagggaacacctcaagatcatgtggtgaatatggctggtcaaggaggtgggaattggggtccacagcaacctgtgtctggtcctcacagtgatgcttccaacttaaccggtcgaactgctataccgtcacctcaagctgcaactcttggtcacaaccaaagcactttcacatacgatgaactgtccattgcaacagaaggtttcgctcagtcaaatttgctaggacaaggaggatttgggtatgttcataaaggagttctgcctagtggcaaagaagttgcagtgaagagtcttaaacttggaagtggacaaggggaacgcgagtttcaagcagaggttgatatcattagccgtgtccatcatcgtcatctcgtttctcttgttggatattgcatctctggtggtcaaagacttttggtttatgagtttatacctaacaacactcttgaatttcatcttcatggtacattcatctaacagaatgttttcttgtattaacaaaacctttaagtatggtttctctttaatcaggaacatgattgaaatttcaggaaagggtcgtccggttttggattggcctacaagagtgaagattgcattgggatcagctagaggccttgcatatttgcatgaagactgtaagaaaatctttatctcacatatttgcatcagtttctatctcgctctctacaatatttgaaagattgtatatgttacatcaattataggtcaccctcgcattatccacagagatatcaaagctgcaaacattcttcttgatttcagttttgagaccaaggtatgtgtgtatatatcgactcttgtactacttttactttcattgtctctcatttttgtttccaatctgtgtcgatgtgtgtatcagtcttattgtgtaaatatatgcaggtggcagattttggattggctaagctatctcaagacaactatactcatgtctccactcgcgtcatgggaacttttgggtaagcagctttgtaaaatgtctcaactcatccacacttatttagtttctttcacttgtttttaacattttcttggattcagatacttagctccagagtatgcatcaagcggaaagttatccgacaaatctgatgttttctcatttggagtaatgcttcttgagctcataaccggaagacctcctctggatctaactggagaaatggaagatagcttggtagattgggtaagtcggtccccgcctcttcggtttacttgtttaatcccaaaacactttccaaagcaaaaacagaaacaaatcttactattgttgttgcaggcaaggcctttgtgtttgaaagcagctcaagatggagattacaaccaattggctgatccacgtctagagctaaactacagtcatcaagagatggttcaaatggcttcttgtgcagctgcagcaatcagacattcagcaagaagacggcctaagatgagccaggttcaaaaactcataccacttgttggttctattgttatatttttactcacaattaatcttgatgataaatgtgacatactaatgaatcttgaaacatgtgtatggtaaatgaaaagattgtacgagcactagaaggagatatgtcaatggatgatctaagtgagggaacaagaccaggacaaagcacgtacttgagccccgggagcgtgagctcagagtatgacgcaagctcgtacacggcagacatgaaaaagttcaagaaactggcgttagagaataaagaatatcaaagcagtgaatatggtggaacaagtgagtatggcttaaacccttctgcttcaagtagtgaagaaatgaatagaggctcaatgaaacgcaatcctcagctttgaaagaagagacaacacttgtcataatatttcagttttcttctctgtttttctttcattgtttgttcattctgcatcaaagacgtgcagtttttgacagtcacaaaattatgatgtttgtaggagtaatttttgaccaaaagagattagagtgtggttttgttgaaatgtttagtacaaagccttaatccataaatacgtggaatttatcaagattgtttattattggtcttatataattatgagattctaaaagtgtgatacggttagggttaggcgtatccttttgttaccgttgtgataaaatttcctttttgtttctgctactcaaataagaaaaggaaacaatcaaaatttccttttttcattgaacaaacgtgtacttataaatacaccccttctctcttcttccttgagaaaagtctccattctctcttcttcttcctggaaacctaaaccacgtaaggatttgctctgaatctaaatattgacgtggagaagacgcgatcttactaattctccattctctgcttcaacttcaccgtaagattgaacaaacctttacttatatatacctcttctttcttgagaaatccaaattctccattctctcttcttcttccaaaccaaaacctaattctccattctctgcttcaacttcaccgtaagattgatcggttgataaagcggctctttttggtgattgatctctgttgtgactacatcttaggtcaattcagattgctttcatatcaagtctctcctaatttcacaagatcaaagatcccggccatggattcagttgtcgacggcgaaggagaacacaaacgacgactaaggatgcgaaagtgggaaagagggatataacgaagacatggacaatgaaagcaacgagcagtatagaaccaaatcaatggatcatgatctgtgtttggtactaggtgtttccttggcgtcgacgagatcttttgaaaatcttgtgtttcgtcgatatcacaagcaaaggtattttcttttttccttttctatttttaatgattcattttttactaaataaaaatttatttttagatttttttattaagtgttaaaattttcaattttgtgtaaattaatttaaatttttaacacttgtttttgtttttattaaaaactgtttttaaacctatatttttatactactattaaagttttaaggtttttcttattaaatattaaatttttaaattttgtgtaaactaattggatacatcatccaatcccctaagaggtgttctaggttcaatagatggtttacacatcatttaaatttttaacacttgttttttatatttattaaataaatgtttttaaacctaaatttttatactactattaaaatttgaagtttttttttattaagtgttgaatttttaaattttgtgtaaactaattggatacatcatccaaacccctaagaggtgttctaggttcaatatggtttacacattatttaaatttttaacacttgtttttcttatatcaaaaatatgttttaaacctttatttttatactactattaaagttttaagtttttttattaagtgttaaatatttaaatttgtgtaagctaattggatacatcatccaaacccctaaatagtgttctagtttcaatatggtttacacattatttaaagttttaacacttgttttccttatattaaaaaatgttttaaacctatatttttctattactattaagatcttaagttttttttttaattttgtgtaaactaattggataaatcttaactcctaagaggttaggttcaatatggtttacatataatttaatttttcttatattaaaaaatgtttctatttttattttactattaagattttaaatttttttttgttaagtgtaaaaaattaaaattttgtgtaaactaattgaatataacattcaaacctgtaagaggtgtttataggttcaatatgatttatatataatttaaatagtttgctattttgtttagaatcaaaatatttttaaatgacatgttgtaataattgaccaaaagaaattagtgtgtgattttgttgaaatgcagagtacaaagccttaatttataccaagttatggtatctataacgtatatgaataccaaaattttattatttttaattggtgttgtattttataattcgaaataattaggggaacgggcaaaacctctctgttctctcgcttatattttttttagagagaaagcaaatcagtttcaacgatcggatattttctggtgttagccgtcctgactttttgggctttctgtccgatatcaccggctctggtagcggtgttggttggctctagtccggcagcgtcttgttcacataaccggtggttgctggctcttggtttctctcgtcgatgtagatcgatttttaatctgtgtttttttattttcatgttttgtttttaataattctcatctgagacatgttggtgatagagtgaatgcaatctcgctttctaatgcttcttatccgatctgttcttttttaagttttgatttacagaaatttttggagaaatttgagaatgatgttgaagaaaagaagtggattctgttgttaattatcatagccttaagctgttgtatatttaacatgagcctcgattgctttttatcggtgaaaaaacaaaaagatccatgttctatgagactatcgacggtgattctttcaccgaaatcggtgctcagacggcgaaaatgaagtcggttcgctttagagtactcatctgacacgtatattaatatatcgacatgtggtttgggatagagtcaaactatagtttcttcttctatgaaagactctctgttggcctatttggtcctaaatcgtttctgtaatcgcggacttttctttaagctttgactatcttgattaatacaatatttctcttgggacaaaaaaaaaataatcttagtatttctttaatattttttgtttgggtatgggctattgggccgcttcgaaaagttcactttctctatcgatctctcacagtttctgagttctctgactcaaaaacatatagtagaagaaaacgattagagatcttcttctttctcctgttgcatctgaagataaaggaaacagaaagcgcgagatctgagtgacggagtaatttcaaagggaggttttcgagatcagaaatggcgcaacccctcgtgaagaaagacgatgatcacgacgatgagtgtatgtgttctctcttaatctccttataattttcgaatcagctggttttctgcaaaatgtagatccagatgttaagcttctagatctgttatcattcaacagtcgtgattgtgatttggttgtgtagatctacaatctcaagtccgatttagttttgtttaccgcattcgatcccggtgtgaattgctttgcttatttcgatttctgattttttgttggatcagtggagtattctccattcatgggaattgagaaaggagcggttcttcaagaggctagagtctttaatgaccctcaggttgatcctagacgatgctcccaggtcattacgaagcttctttatttgcttaaccaaggggagtcattcaccaaggtcagttaatttttttgcttatactgattcgatgtcatgcttatggagaattgaattattgtgttcttatcctctcgcgatggttgtttgtttcatatgcaggttgaagcaacggaagttttcttttcagttacaaagctttttcaatcaaaagacacgggtttgaggagaatggtctacttgatcattaaggagttatctccatcatctgatgaggtctgtaaattttactcaatttcaatacgaacatcgtcgcacttattgtaggtatattttctgataagttgttggttttttcgcccataggttatcatcgtaacaagctctctgatgaaggatatgaatagtaaaattgatatgtatcgagcaaatgctatccgtgtcctctgccggataatagacggaacccttctcactcagattgagcgatacttgaaacaagccattgtggataagaatcccgttgtttcaagtgcagctttagtcagtgggcttcacttgctcaaggtaccttttacacaccaaaactattaggtagcttcttaattgtaatgttatgcttatattcgtatattgctgttttcagacaaacccagaaattgttaaaagatggagcaatgaagttcaagaaggtattcaatccagatcagcccttgttcagttccatgccctagctttgctccatcaggttagtttgttgcattattatcaccgaagtcgattggtctatgtttctactctttgtttaattaaacagccactgagaagaagtatctcggaaaatgagaggtgttactatgtgtattggactagattcataaataataagttttctgtagcagcatcgtagctctttactacggccttttccagcaattttagtttcttgtgaggtttaatctgtgtctggagtctgtctcagatactgctgattctagcatatgtaactaattaggttggttaggacaacctatttatgtgtctaagatgtacgagttaccaaatgatatgtattgctgctgttacgttgatttaaaatgactcccaacatgatacactctcaatctttgatctaataactgtcaatctttgatcaacttgataatctttcatcatattcagatacgccaaaatgatcgcttggctgttagcaaattggttggtagcttgaccaggggatctgtccgctctcccttggctcagtgtcttttgatacgttacaccagccaggttattcctctcttctgtttgatcatttgataagtggctgattgtatatgtgttatttagctctggtttctaatattcaggttatccgtgacatggccaaccacggtcaatctggagaacgtccgttctatgaatttttggagagttgcctgcgccataaggcagaaatggtgatccttgaggctgccagggcaattactgagcttgatggtgtgacaagccgagaactgactccagcaatcactgttcttcagctctttttgagttcccccagaccagtgttgagatttgccgctgtccggactctgaacaaggtttgcaatgctttcaactgttctctttgtacattgacaccgaaatgatgttttactattctgggtagattcatcattacctttatcatgaggatgaggagatatttcactgtatactaaacacaagtttgaaccacaggttgcaatgactcatcctatggctgtcaccaactgcaacattgatatggagagtttaatctctgatcaaaatagaagcattgctacactcgcaataaccacactattgaaaacagggaacgaatcaagtgtagaacgtttgatgaagcagataactaattttatgtcagatattgctgatgagttcaaaattgtggtcgtggacgcaataagatcgttgtgtgtgaaattcccactgaaatacagatccttgtaagtaaagttttagggtttgttatttgtagttttggtctcgagcatttctatttttttgaatgattaaatatgttatggtatctttttagcatttggcttatgattgatctatcaccttttcatttgtaggatgaccttcttaagcaacattcttagggaagaaggtggatttgagtataaaagagcaatagtagattctattgtgaccattatcagagatattccggatgcaaaggaaagtggactgcttcatctatgtgaattcattgaagattgtgaattcacatatctttcaacacaggtaattattccatcatccatctggggttgctattaaaaacttatgtgttattgaaatgtttattctcgcacagatccttcattttctgggaattgaggggcctaacacctcagatccaagcaagtatatacgatatatatataatcgtgtgcatctagaaaacgccactgtccgggctgctgctgtttccacacttgcaaagtttgggtttatggttgaatccttgaaggtatagtcatcataacaaccattatttttattttccgtttatcttctttgactgatgataatgctcgacagccccggattactgttctattgaagcgttgcatctatgacagtgatgatgaggtgcgttcctagtcttagtctagaaaagcattgctgtttctgtatgtctgtttgttttgagtcgttgcatcatcaaacatgcatgcatgtgtttgcctctgtaaacattttcggatgcatgcaatgcaagttgtttgatgattccttccttgctcatgagtcagacatctttttatcttaaggtccgtgatagggcaacactatatttgagtgttcttggtggtgatggtactgttgacactgataaagagagcaaggatttcctatttggttccctggaggttcctctagtcaacatggaaactagtctgaagaattatgtgagttaatctatttctcggttttctccttttcaatattcttaggacatcagttatcttatatctgggattcctgcaggagccctctgaagaagcttttgatatcaactccgtacctaaggaagttaaatctcagccccttgcagagaagaaagcccagggtaaaaagcccactggtcttggtgcaccaccagctgcacctgcttctggttttgatggctatgaaagacttctctcatccattccagagtttgccgcctttggaaaacttttcaaggttaggggctgatttgtcttctgtgttattctaatgttaatggcttatcttgtttgctttaacttgtactttctttttcagtcttctttacctgtggagctaactgaagcagaaacagaatacgctgtcaatgttgttaagcatatctttgacagtcatgtggtgtttcagtacaactgcactaacacaataccagagcagttgttggagagggtactgaacattggtgtagaatattagtgtcaagcatatcttatctttctttcctcatttaattaatttggcatggggttgtaggtcaatgtcattgtagatgcttcagaagctgaggaattcagtgaagtaacttcaaaggccctaaactcacttccttacgattcacccggtcaagcctttgtggtttttgagaagccagctggggtccctgctgttggaaagttctccaacacattgactttcgttgttaaggaggtacatgttaaataggctattcacttccatctttttatttacttacactgaaaatgaccccataatactttgtggagaactcttataaacaacgactcatttggagaggagtaccagaacgactcaaattaatcacagaaaacaaagaaaactctctaactacattgtttgtgcttttatgaatgtgttaaaacaggttgacccaagcacaggtgaagcagaagatgatggagtagaagatgagtaccagctagaggatcttgaggttgtagctggagattacatggtgaaagtgggtgtctccaatttcaggaatgcgtgggaaagcatggatgaagaagatgagcgtgtagacgaatatggccttggccaaagagagagtttgggagaagctgtaaaggctgtcatggatcttcttggcatgcagacttgtgaggttagtctcttccacttttttctcatactctactgagacttgagggctaaaattattgttgataaagtcttttttgagtatatgaccatttgttgtgttcctgaaattgaaactgacactggataaataacaggggacggagacaattccgctcaatgcaaggtcacacacgtgtctattgtcaggtgtgtacataggcaacgtgaaagtgttagtgagggcacagtttggaatggacagctcaaaggacattgcaatgaagctgacagttagagctgaagacgtttctgtcgccgaggccattcacgagattgttgccagcggctaaaacctcttgcgtttcttcagtatcagagaatgtcatctattcctgctgctaaacctcaaaaatacatcaactattataaatagcatagtattactttctttcttttttccttgcattattactgtcaaatacactatggaggttttctttttattttatgacggtgctttttgatttctcatttctgaattttattattacccgttttctcgccaagttgggaatctacagatcatcttgctcggatttgaaaaccactaccgtaccgtacaacaggctaggctttctccataagttagaaactcaaaaatagtagcgttttatcgtctgcgttcaatatgaagagatgatagtaaagtaaagactggtgggtacacaattgattacagaattcacattgagtagcgtgttgaaggagtttagttcccaatgaagaaataaataaatcaaagcacactacaaaaagggaagtttaattcttctaaccactccactatttcaaaccaaacaccttccacaaaccgaaccttacttcccgactacagaatatattaaccaacaactggagacgtgactcctactttcgttaaatcttcttcaaatcactctcctgtgtcctccaaacgcccatatctgtgtgaattcaacgaaatttcatctatcctctaatttccttacaaacataacatggtaaatgataagcagagacactactaagtactaacctttagatttgaatcccaacttcctgtacacaaggcacttccatctgctgacaaccccaaacagcttattctattcctgtgtgaatcctgctgtaatcccaaatccaatacaacctgcaagaaaactcctcacgtttcaatcataaaccttacatgagcgaaaacaactctcaccactcattactcaaatactaattgcttacctctcccaagagggtatcccaaacgtagcaagtgttgttgctcgcatagccagcgaaaagaagtctccctgacacagagaatgcaatggaggtgacaggtccgttctcaccatcaccatgtggctgatagacctggagttggtgaccagtccttatgtcatacagcctgcatgttccatcgtctgatccagtcccaaatctatacccatccggaaagaacttgaccgtattaacatctccctcgtgaccatgaaaggtacgcactgctcggcttgcagcacgagtgtcccacaaccgtgctgtggaatcgcatgaaccagatataaaccagtttgggtttgatccactgattgagacgctgcaagaatggggaataatcaccaagtaagagggcgagtttaactgacttgcaatatatcatccatgctagcttttatacacaagtcaaataaacgtatctattcaataagaccaaacctatatgttgattccaacactcgatccaaatggtatggttctggaagattaagtagtttttcaaatatattctactttatcaaacaaactgatgccaatgagccaaggagatgaaagcaatatccataccttagtacatcagcagtatgtccagactgaaattcaccgccaaaaacagaagttttgagaccagtagttacatcccataagatacaagtttgatcacctgaactggtgataaggtgggcatcctcatttgggacatactgacagcacgaaacatatcccctgtgaccagtgagcattcttgaaaccggtacagttccatccttgtccgccgttgagctaaggctaaagatagaacatacactgtctaatccaccacacgcaaccgactgaccatttggagagaaagcacatgtcataacccatgcacaagggagtttaatagcatgagttttctgactcgttagagcattccacacgattaatctcccatcttgagatgcactgacaatccggttcctctccggtgtccaatctaatgaataaacctgcaaatcccacatgttaaatcaacaacaagctaacattcacaatcaactctcctgtctctacatttccgtaggatcttaagcaaatcctcatacatgataactggtaacatcttataaacaccaccaactaaataacaaactagatacaaccccaaaatggaagctttttatcacaggctagaaaacactccacaaagaagcatgcttgaaggataaagatgcaaactttgagtcacctttccggtgtgtccctgaagagtacgacaacaaaccagatccgttgctccgaagctcacccgagtacgtccttgcgccgctgaatacctcgccactggcaaaattcaatccaaattaaagaagaagaagatgagagaagaagagagacgaaaaggaatccacaaaccatcggtatcgaggagctggaggcgtctctgtctaagctggtcacggaggttattaacggtctccgtagcgacggcgtggcgttctttgagctcggagacagacattccgggatcagacttaggcttctccgtcgccgatcaaataaaagggggaaactttgtggggtctagaagagaagaaggttcatgattgagagagggagatcgaaccctagaaagaatggatttgggggaattacgtgggaaaagagagagagattaaaaaagcttgagagaagaatcagtcaagacacaaacacggctctcttgttgaatgttgatgatggcttctctgacctgagactagctagagagagagaagagggtcaatagacattgactgttcccattaaagtggaccctctcacaatgattaaacgatatcgtttaagagctatgattgtttttggttttggacgagattttcgattcaatataatgaatttgaaggatttttaactacatatttctttttaagaaacgtaatttacagtacaagaaaagagaaaacatgttagttattttgctacgtgaatttaatttgtctaatagattctgtttttctgaattggctacaagaacatcaataatccaataaaattaagattgtctcaagagaaaataaaataaaaacacattggttaagcatatcaatatccaacaaaagattatctcaagagaatacaaatcaaaaaaaaaaattttaaaaagtagacgaagtgatcatcatctacattattgatcaagaagttgcaaaaaaaaaaaagaacactaaaaggaaaaaagaaaaagaaagctagttaggtttttgattcatgggctcattcaaaagcccattgattctccttacgaacagcttcttcttcctcaggtgtaaaatcattctcaatgttgaaagttgaacgaatctcctctggagtcttgcctttgatcatgtccgcaacagtttggcatgtgagatcaaacaagctttttatgttgaggtaattcgcagcaaggatgagttcaaagatggtggattgttcgagatccatgaacttctcgtcccacttgttgagatcctcttcagagataggattagcctcgtcgacgtggtatttcttgcagtactcgatcactttcacaagaatcttgctttccacgtttgcaagagggattccatcagcaacgcaatcgtcttcaaccatatgcgctatggtctgcgattggattgctaccgcttcttccacctcaaacgactgaccatcggagctcatcaacacgatcatcttcgaagacattgtgtgttccttgtggaggaggtttttcactgtgaagcaaatttgatgaaagatttaagaatttagagagcgaacaaattgtgttaaggtgatgaagttgtgaaaccctatgcgtctttgtatttataagccctagctagagtcggtgagatcaaccattccttttttaagaaggaaatagttattttccttaaccgaagaaaataagtaaattatttgtcgactccttttcataaaaggtaatttcagatgagtaaaccaaaataaaccgggtcaaattttcatttttttgttgtaggttcggctcaaatccttattttcagaaaatgtaaattcagtaaagtgaaccagctaaaccggtttaaatttacaataggcccaattataaaggtacggcgtaaaatgtaacaatttaagagggatatagatatacattggaatataggaaactttatccaaagataatattcagattcatttataagaaaccaaaagaagtctagtagatatagccgttacagactatataatacaattgagatagaatgtgtgtaaccattataaactaataacaaactcgattacacttaatacagaggaaggagaggagattaacaagtaggcgtaattaattaattacttacctccaagagctaattgagccatttacatatatacatggaagataagggacaaaaagatgagtagaaaagatagagaagaagagacttttggttcagttgctccattcttcttctctactttgtctgagctcacatacttgttcattactgctttacttcctcctcctcctcctcctcctcctcctcctcctcccggatatacgcaattgttgtaacctatcaaattcagattcaagataattaagaaacccaattagtataataaagcatgtagaaaaccgattatttggtcaattaaagcatttacaaggcctagctacaataaaacatagtagaagagaattgatcattaccttcaacaaacaaaagcaattactaagtctttgttacaactttttatactaagttactaagttgaaactactattggtagggtgtgaaagtaacggggagagaaatcttactagggttttgggaagtgactgttgcggttttagagaaatcgcagtctgtaggctgcttaggagatttctgaaaatacatattcatggcatatgctgcgtgagagaccacattgttcggctcgaaacaagcccctcctggttgtatcgcaccacagtctattccatgtccgcacgcccaatccaagctcgcttgtaactcctcattcgttgcacccttctttggtacacaccaccccgacgatgtcacttttcctgatggtgtctaattttatgatcaaaacataacctcacaaattaaaacattgttatttatctgcatttgcgtttacatgttataataaattactttccctaaataaaaaccacaacttctagtatctaacctgactactgctgctactcttggcaaggccaacatcatagaccatggaaagatcagttttgaaaagcccgaaagcccgttctgaagatggtccaggctttagattctcatcatacagtgcgaaaatgtaagtgtcaacaggttttccaggcatgagaggtgtgccaaccatagaccttagatgagctattaggtttccgttgtacgctttggcgttatccacgcttgctccaacctcgttagcgtcccctcttgacgcccaacctgtttccgccaccacaatctccaccttctcgaatcccatcgatttcaaagccgagtgaaccgcatcaacctagtagataatgaaaactcagacactgtaacttgtgctgcaagcaacgacaatgaacaaagacttccactactgctttgttacgaaaacttataaatacgacctgaaactgaaacgtcaccattttttttcgtttgttttattgatttaagtcgacgctgcttacgtggaattaatgatgactaatgcaaacaaacaaaacaaatgtttcaagaaacgtctaaaaataactagtgcgaatccagtctgtcagacaatgagtaaacgagtgacatgtcatctcacgcatacttattccctgagaagataattattaacattaacatcgaatgaatttaaaaataagtattacaagtaccaaatagtattaagcagaatttatactttatagattgtgtatgtgaaagaaagtgtaattcagacacatacgtgaccaactgtcttttgtactatatataataagaatatagattccttctaaatgaaaaagtagagacagaacaagttccttgctacaatctagtgcaaagaaattttgaaaataacatataataacctaaagttcaaactatagattcgtccacgtgaatacagccaactattattattctcatatttttgtgtcaacaacaataaattactagaaactaaccgacctagatcaactatgcttttaacgtctactttgaaatcatttagatataaaatagtccaccaaattcataaccagagactagcaacttttgttagagaaatttagttagttaccgaacacaaattaattgattaatgtacctgagcatcgaacatgttcgtgtatttgattccggttttggagtcgactcgtccggcgttaggctcaaagagacaaaacgccagcgtttcgggtctcgggtcactttggtacgcgaagaacgggtacgggttaatagcaaaaggcgaaccagtgtcgcttagaaattgcaaaattccctttaaaccggtttgataaccggccgcaaatgaaccgctcgatggcgggtctgaactaccgagcaccgtcatcgagttcaccgtcgagaccttgattttcccgccgagagacaccgcctcaagggctttttggacattttgcatcgccggaagtagctggttcaccagatttggatcgttcgacatcagaatctgcaatgatcggagaagaattagagaattttccctaaaggtttaaactttaacaattgaattttgacggacctcgttgccgacggtgatgagcatgattttggaggcgggataaaaaggaaggacattggagttgatccattgagtagcggcgttaggatcggaggcaagagaaggaacgtcgccgttagcagcgccgatgacgataccgacccctgttccggccaaagctttgatgatggcgggatcggcgccgtaaagtcgaactttctgaattgaagtggattggaggagcttgacggtttctgaaggcggagggagattgtcggcgacttggccgtagttaactccgatgaaaggctctgcatctgtcggtaacaaaaaacagaggaagagaggaaaaaggttagatgaagaaaagaagaacgacgtcgtagtgaggaactagaagatacttacgtgaggatgggaagtgagagaggaagatgaggaggaaatagatggagatggagagagccattgatggtgagagagagagagatttaggaattgtgttgttgttgctgttgttacttaaagaagaggttttttactgtaacggttatatacaaactccaaagacacgtcttgtgcttgtttttccacactacacgtgttgacttctgttcacaagtcttgagcttaagtcttcgtttcggtctttattttgtaattttatacttttgatttttctcgtcatctaatttggaaactgaaaagtgctatttctggagaggaaatctttaggagaatcgaaaagagagcatttgttttttgagtttgcttttgaagcatgaggtattccataggatgattagtatcgcaaaacacatatttcagtgtgtaaatacaccatttgttcgtttccatgctatttctcagtagtccaagttaaacattcttcaaagtttcacccacaaccaccaataattttagctttcgtgattccacaatgtacaactcacaattattatgttgactgtggtcacatcatatacaaaacaaaaccaaagaaaaaggttaaataaataactgcatattccaaaaacaggattgcaactttttctatccatgataagtatgatttgtgcacaacgtcatcagcaaggactcgggacaagcccacaagtaaaaacaaaagaaacgagaaacccaaatccaaatccaaaaccccaaggacgaacaagacacaagatgatcagatcacacaaaaaaaatcaaaaacccacaacctccaaacccaaaattgggggatagagacaaaagaaaaaaccaacaaacaaacaaacagattctttcctctattataatctgaagaaacaaagtatatgagtataaaaaggcctgatattcaagcacaatccagagtgataatagtttctcctttgcttaggcacctgaatgcgagaccggtgttgtctcaaacttcccttcagtaaacacatgattgtactgttgaggcagcgcatgttccacctacaatgttgcaacaaaacaatgttgagaatgattccttccatgaacagtgtcacacacatgactatcttcgttacagtggtgaatgaatctgaagaatataagaaaaccaaaacgttttgatgattacaaagagaggaaagccatacccaatctccatcaggggtagcaccgggcaccattacattgatctcacttgatttggctgttgttatagctgtctctaatgagtctttgtttagatataactgacagccagttgtgttgtccacagaaactgtgggagctgaaccctagatcagccatagatgagtagcaagagcaatcagtgtctcggaaaaatgttgcatatggttagagctatatcatgagcttgagaagcaaaagagatggtccttaagaatatacatctgcaaccattagaaaagcttatagaatctagaaaacaaacctgacattgcacttctacgttgttgcaattcacaatctcaaatgcagcaacaacatcctatacagacatgttatattttactttattagaaatcacataactgtatactgtaagaatgtaagaggaaacagtattattccactcaccgtgaaaacaacacccactttcgtgcatttgtcaatggtgatgttattcacttttcctacagattaggcaacaacagtaagggcttcatagacttttgagtagatatccaactttcacagtgagattggaatggcgcaaaattaccttgtatttgcaagacagaatctttgcaaccatatatgtacacagactgtttggaatcacactcgctgataaccaagtccttcttcccaatttggttctcaacagcccacctaataatacagtagaagccaacaatcagtattatagcattttgatcatagttttgaaaaactaaaatatatagtcattgttagtaaaacccacttgcgacccatttgaagttccattttcggtggtccagttttcgaaaaggccggtttactggtacgagtttccttctcaaccgcactaacagctccagatctatcagcacggttctttgtcttcatatcatccgtcacttttctaagacctggaaagcaaagcacaatgattgtaagctactaatgattcacattctaaataaacaccatgccagaaatatgaagaggtacagcttcaaacctacctgaggtcacagcacccgagctgagttgctggaaaacagcagacatcccttgtttctggtttgacgatgatgatggctttgaagattcagcactgaagaggggtgctggtggaggagcaggagcaccaggtggaccctttgcaggagcactagcaggtttccctgatgcattccatacaggtcccaaggggtaatgacttttgacatattcccttaaaccaggtaaataaagttcttttaaggctttagcccactccacatgatctgcgtctttgttacgatactccaccagaacctgaagaagaacatggagatcacagaattaccactgtacaaagagcatcaaacagcaatataagcttctgcaacctgaacaagtaactataaagtcctcgttcgctattgttttccataagctcctaacatcataacatattgaagcatagagatatcgaagattagcaccttattgttgtaaaactcagccatttgccaactttcttccacatgagctattggcatgctcataccttgcagacaaaataaccaagaaagaaaatttacatcataaaagtttcataaagtcagaatctttttcaacatgatcgctttttgcttaccacaatctttcccagtgaaagcaatccaagccaatgcagataaactatcgcatgcagccttcaagtgattgaaaaaatccgacctttttccttcagtcattgcattagctttcattgtaacatcattcaacggtttgagaaatccagccaatccagcgaggtcaggcttctgttcaaatccgaataaaatagaaatcaacatccaaaagcacaatgacgaaccaaaacgaattggtcgattacaccatgattcaaaaactaacctgagtttgcttgatgcgaacaagcagctccttttgggaagcaaaagcttcggcgactatcttagtcacatctagaacaggtccaccgattttctcagcggcggtcagagccctaccaacacattgagaaatcagatcttcataagccagaatcgatggatcggacgacgcgatatcgattccggcggcggaggagaaatctcctccgcgggaaagagaaactactcctcctccgttgcttgagatcccctcaagcctcgtaaccgcagcttcaaggcgcttaatcaaatcctcttccattttttcgatcaacaaaagctcgagtttagatctggatgaaatcgatttaaggaatggattctgttttccctttttgcgtggggctaatgatgatggcgaagtcaggagaatgtgtgatgacacgtggcctttcttagataattttaccaatcgcaggttagtggtctggtcgtggattgtcggatccaaattccgacacatgtgtttgagctcgacccaaaccggatccaaaataggtttaagaccggattaagtttttaaacccgaactaaaccgtataccaatcaaatttcaaagcagagccgaacagttcttctctataaaccaaattaccaaattccggttaggtccgggtcgatattatttctcaggcctaaattgaatgggaaaattcacaagggaagaaatgttcttagagttcactgttttattatacaatatatgatatatttacaaattacaagcgataaatctgaatttcatcctcatatatctaatttcacttttccaattttctcttttgcatatcaatcctctcaatataagaacaaacatggaaacatctatcaatatatggctgtgtaatgaatagcatcaacgctcaagtgtggtcttccccaagacattattgtttgcccaataatctttcttacttcgatctttcctggtttgatctgtgttcctgtgtgacaacatgaaacttaaaatcagtaaattgcataaaggatcaaatctctttttagcttttgacacacttacaggacggaatggaaaatcttcagcctcaagcatgtgaatgatttgtcccatctttggtcgtttactagagtcaaggtctatgcaacgcaaacaaacaagcaaagctcttttcaaagctcttggaggaggtgatgtcttgattttagggtctataacttcttctccacgtctacttgcaaccattcctttgaaccaatccactaagttcatctgcaaatgtttcaacaaacaattatttgcgtatggtcttggcaggtaaaggttttgttacttacaaacgttttcaattacctcgccaggcggtcttgaataatcaactgggctccttcctgtaatgatctccatgagcagaacaccgaaactgtagacatcactacactcattgagcataccagtacttgcatattccggtgaaacatatctgcagaaagttaaaaaggtgtaagaagataaaatgtaaagaaacaatatgagcctgataactgaaagaagagagggtatctatatatatacccaaaagttcccatcacacgagttgtcacgtagcttgtttcagatcctaataacttggccaaaccaaaatcagacactttcgcgttccatttcttatcgagcaagatgttactagatttcacatcacggtgcacaaccttaggttcaagcccttcatgtaaataggctaatctgttcatcaaaaggcagagtttcaaaggccaatcttagctaaaatgcgaactgaaaagaagaagtagaaaacaaaagaagttgcacccttttgctgttccaatggctatcttcatgcggatatcccacgtaagaggactcaccggacctacatcaccgtgtaaccactgctccaagtttccattatcaatatattcatacacaagcatcctaatcaaggaacaaagaaagaactaactgttagattaattccaaattagagtttactaattcatttgagtttgtttggattagcacctttgactttgagcactgtcagcacaatatcccatcagaccaaccaagttcttatgtcttactttcccaattgcttctacttcaactttgaactccttctccgcctgacccctgaatagaattatattttaccatcatttagcagattcatttcttatatcaaaatctacaaaactgtttataaaacaataatataagagtaaacaagaagagaaaaagtttcatccatgcctcaggaccaaaaaattattatatatatttttttttaaatggcatcaaacttccagtggttgtcctgtaaccaacaacctgactctgctcaacctaacaatgaatataatagatttctgtacctagataaaagatttattcattttcttaaccataaaatcaatccatggagctttggctaatcaatcccaaagtcagaacaaagaagtgacaatcccacaaagcaaacagagaagattctttgcaagctatttggttcaatgatatctcatgttccagcaagttttatactagtgaagaccatctcatcatctaaaaaaggtgacaaactaaaacaaaagagatgatagaggtcaaaagaaaaggaaaagattaaagaaagcattaatagagaataaagaacaaagcacaactaattaatactatttccttttgttttactcttttagcttcactacacctacctaaaaaaacagcaattatatagttcaatggtcggaaaaacatttactatatactctgaaatgtctttaagttactaattcaggagataaaatggttacagttggacccttattcaatacagaactcaagaatttcattgatatattaaagtcaatgcagagaaagtggtactatctaattaaacacttgtcggagaaatataaaaaatctaagtttcgccattttcttgggtttgaaagcaacgaagaagacaacattaaaagcatttttaaaaccaagtagtaagtaccaatgaaaccttgacccaagaattacggagtccgtgaaacgaagtaaatgaacatttgtcagaatgaggcaatgatatatttaatatactacccgataagatccaaatttcaaaaaacttgaattttgctcaaaatgatcttaatcaaaattagtaataatcattaaagacattacttgttgttaaggagattcttgacggcggcgacagaaccgtcagagaaatcagctctgtaaacgacaccgtaccctccttcaccgatcatgttatcatcagagaagccacgtgtcgcaatctccagatctttcaagctgtaccattttccccatcccattgcctcagaagtaccaacgtcaccgctcgaagccaccgacaaagtatcaaaaccacttgtcgcttctttgcttgtggcggagacaacaacaacaacttcgtttccgattttacccttggaatcgtcggagtttatgaatttgccgaccgtcttgatctccgagatttctttagagacgagcgggatcgagccggagctgtgtttaacgcgcattctacgagcgcgtgagacgcgattcaagcagacgaagaggaagatcaagagtgagatcaagagtatgaaaacagaacaaatcgcgatgactaagtaaaggtttagtccgaaaacggaaggttttgttgtggaggacttgtgagaaccaccaccagagtccgacatcgcgatcacggagtagagaaagtcaaaactacttctctcagacggattagtttggtttgctggagattgttccaagaaagagaaacgttaggagcaaacaaacaaaagagaaaagacgatgatgactgatgagagctttaacaaaaaaataaaatgagagagctcaacgggtagaattgtgagacttgagagagtgtttcctatttaaggcatgcgattagtgtttattacgagaatgccaccgaacgagtacatattaatgtatagtatgttaatgatagtctaactaaaatttggtttttattgaaatagaattttgtaagaataatgaggatctgtaatatagctggatttgcattaaatcgtacgccgttggtaatcgaaattagttaaataaatgttttagcatataatgttggtgcttccgacatgtttattggacaataataccatattttttctttgggatcttaaaaaaattgaggaagaaaatagtaaaatagtcaaacttaggttacatcataatgggccaattctttgagttgtgattgatctccaaagatatacatagatttacacaagatcaaaagaaaaacaattgggcctaaaccccaagcccatatcaacgtccattatcattaagattcctttttttcttgaaatttgaaaatttgaaattcgattcaaatctactctctctgtttttttcccataaaaatctgaaaaaccagaagcttcttcatcacttttcctcttgatatcttccattagttggccgatacacatgacgccaaatacatcaatggcgactcttctctgttttttagttatatcaaactcccacccaacctgcagaagaaaaaatggtgtctataaacacatccccttacgatttcttctctatctctctcacagtatctatatatacgcacacaaacccagattcagtttctcatcagtatcatcaacaaaaatatcaaagattctgctttagaaactgtccatggatgctaatggaggacctgtacagatccggacccaaaactacgtcaagcttggttatcactatctgatcactcacttttttaaactcatgttcctccctctaatggctgttttgttcatgaatgtctcattgttaagcctaaaccatcttcagctctattacaattccaccggattcatcttcgtcattactctcgccattgtcggatccattgtcttcttcatgtctcgacctagatccatctaccttctagattactcttgctacctcccgccttcgagtcaaaaagttagctaccagaaattcatgaacaactctagtttgattcaagatttcagcgaaacttctcttgagttccagaggaagatcttgattcgctctggtctcggtgaagagacttatttaccggattctattcactctatccctccgcgtcctactatggctgcagcgcgtgaagaagcggagcaggtaatcttcggtgcactcgacaatcttttcgagaatacaaaaatcaatcctagggagattggtgttcttgttgtgaattgtagtttgtttaaccctacgccttctttatccgccatgattgttaacaagtataagcttagaggaaacattaagagctttaaccttggaggaatgggatgtagtgctggtgttatcgcggtagatctagctagtgatatgttacaaatccataggaacacttttgctcttgtggttagtactgagaacatcactcagaattggtattttggtaacaagaaagcaatgttgatccctaattgcttgtttagagttggtggttccgcggttctgctttcgaacaagcctttggatcgaaaacgatccaagtataagcttgttcatacggtcaggactcataaaggatctgatgagaacgcattcaattgtgtgtatcaagaacaagatgagtgtttgaaaaccggagtttctttgtctaaagatcttatggctatagctggagaagctttaaagacgaatatcacttctttgggtcctctggttcttcctataagcgagcagattctgttctttgcgacttttgttgctaagagattgttcaatgacaagaagaagaagccttacataccggatttcaagcttgctttagatcatttctgtattcacgcgggaggtagagccgtgattgatgagctagagaagagtttaaagctttctccaaaacatgttgaggcgtctagaatgactttgcatagatttggaaacacttcctctagctctatatggtatgaattggcttacacggaagctaaaggaagaatgaggaaaggaaacagagtttggcagattgcttttggtagcgggtttaagtgtaacagcgcggtttgggtggctcttcgcaatgtcgagccctcggttaacaatccttgggaacattgcatccatagatatccggttaagatcgatctttgaactcataaaaactagtagattggttggttggtttccatgtaccagaaggcttaccctattagttgaaagttgaaactttgttccctactcaattcctagttgtgtaaatgtatgtatatgtaatgtgtataaaacgtagtacttaaatgactaggagtggttcttgagaccgatgagagatgggagcagaactaaagatgatgacataattaagaacgaatttgaaaggctcttaggtttgaatcctattcgagaatgtttttgtcaaagatagtggcgattttgaaccaaagaaaacatttaaaaaatcagtatccggttacgttcatgcaaatagaaagtggtctaggatctgattgtaattttagacttaaagagtctcttaagattcaatcctggctgtgtacaaaactacaaataatatattttagactatttggccttaactaaacttccactcattatttactgaggttagagaatagacttgcgaataaacacattcccgagaaatactcatgatcccataattagtcagagggtatgccaatcagatctaagaacacacattccctcaaattttaatgcacatgtaatcatagtttagcacaattcaaaaataatgtagtattaaagacagaaatttgtagacttttttttggcgttaaaagaagactaagtttatacgtacattttattttaagtggaaaaccgaaattttccatcgaaatatatgaatttagtatatatatttctgcaatgtactattttgctattttggcaactttcagtggactactactttattacaatgtgtatggatgcatgagtttgagtatacacatgtctaaatgcatgctttgtaaaacgtaacggaccacaaaagaggatccatacaaatacatctcatagcttcctccattattttccgacacaaacagagcaatgacgtccgttaacgttaagctcctttaccgttacgtcttaaccaactttttcaacctctgtttgttcccgttaacggcgttcctcgccggaaaagcctctcggcttaccataaacgatctccacaacttcctttcctatctccaacacaaccttataacagtaactttactctttgctttcactgttttcggtttggttctctacatcgtaacccgacccaatccggtttatctcgttgactactcgtgttaccttccaccaccgcatctcaaagttagtgtctctaaagtcatggatattttctaccaaataagaaaagctgatacttcttcacggaacgtggcatgtgatgatccgtcctcgctcgatttcctgaggaagattcaagagcgttcaggtctaggtgatgagacgtacagtcctgagggactcattcacgtaccaccgcggaagacttttgcagcgtcacgtgaagagacagagaaggttatcatcggtgcgctcgaaaatctattcgagaacaccaaagttaaccctagagagattggtatacttgtggtgaactcaagcatgtttaatccaactccttcgctatccgctatggtcgttaatactttcaagctccgaagcaacatcaaaagctttaatctaggaggaatgggttgtagtgctggtgttattgccattgatttggctaaagacttgttgcatgttcataaaaacacttatgctcttgtggtgagcactgagaacatcacacaaggcatttatgctggagaaaatagatcaatgatggttagcaattgcttgtttcgtgttggtggggccgcgattttgctctctaacaagtcgggagaccggagacggtccaagtacaagctagttcacacggtccgaacgcatactggagctgatgacaagtcttttcgatgtgtgcaacaagaagacgatgagagcggcaaaatcggagtttgtctgtcaaaggacataaccaatgttgcggggacaacacttacgaaaaatatagcaacattgggtccgttgattcttcctttaagcgaaaagtttctttttttcgctaccttcgtcgccaagaaacttctaaaggataaaatcaagcattactatgttccggatttcaagcttgctgttgaccatttctgtattcatgccggaggcagagccgtgatcgatgagctagagaagaacttaggactatcgccgatcgatgtggaggcatctagatcaacgttacatagatttgggaatacttcatctagctcaatttggtatgaattagcatacatagaggcaaagggaagaatgaagaaagggaataaagcttggcagattgctttaggatcagggtttaagtgtaatagtgcggtttgggtggctctacgcaatgtcaaggcatcggcaaatagtccttggcaacattgcatcgatagatatccggttaaaattgattctgatttgtcaaagtcaaagactcatgtccaaaacggtcggtcctaatttgatgtatctgagtgccaacgtttactttgtctttcctttcttttattggttatgattagatgtttactatgttctctctttttcgttataaataaagaagttcaattcttctatagtttcaaacgcgattttaagcgtttctatttaggtttacatgatttcttttacaaaatcatctttaaaatacagtatatttttagttttcataaaatatttaaagaaatgaaagtttataaacattcactcctattctctaattaaggatttgtaaaacaaaaattttgtaagcatatcgatttatgcgttttgtcttaattagctcactaaataataaataatagcttatgttgtgggactgtttaattacctaacttagaactaaaatcaactctttgtgattgtttgttcatccagctgaccagctctgtctgccgtctaggttatgtgaagaaagttatattcctggttgtttagatttaaatataaaaatggatactttagtttatgtatgattttgaattgtttagatttgaaagtagggaagcccataaaattcaattgatagttgaataattaaaaatgataagtgtcagagagttggagcagtccccgatgagcctacatcagccaaaaaaagacactcatattttcattcttttttttggctaaaactcaccttatatatctgtttatttcaaaagatgcgtttttcttactttttacaacatgaaatcttttattttaaggaaattatagtaactaaccgtagaatacaaaagaatgaaaaaactaactatggagcaacgggtcagagacaatttttatacatttttcatttatataacaataactcatttatcattaaatcatttttataacaataactagtaaccataaaaaatataaatacttcttggatgttaagaaaaaaaaacaattcttcttttgacgaaaaagacttcttaggaaagttgtatacctttaaaatacatgcaagttatatgaaagtttataaaattcacaactcttctttattttaaaacccaaaaaaaaaaaaaaaaaaaaagtcctcttatttatacgtctaattcccatgcatatatcgagaataacccatcatataggaattaggctcccatcatgtgatcatgattcatgagtcatgaccattggatctcccctcattattgttccatcagaaatttctacgtcgatgatatgtttctaattctaattttttttacagcaatttctaattctaattaagaactctcccatatacaaattgatatagatatcttttagtaagttagtaacaacacttaattaaacatagataaatatacgtgcacagatcaattctccagtttaaggaaagaaattggatagatgtatttaaatacttttgtataaataatataactatctccaatacaacacaccgaatcaaatgtcaacatctacatacatgtcgacatgaatttatgaacatatatgtacaaggtgatggggaacccacaaattaggtgtgtggctttactttttttagtgtatgcatgtatagtatgatagggagggaaatagctgatcatcatcttctatggacttagtccaaattcatcacatcaaaaggcaacgaccatgtctttgtttctaacaactttacaccctcccctttccttatctactaactccatgtatctgctttaaaggttaatatataactggactaagcaaaataaaagagagttgggttttcattatagaatcgagaagatttcatgtccctatatcaatcacataaagcgttttccaataacataaaaagtcggataaatgaaaatatttgagaatctaaaacaatgtcatatatactttaatggaaggtccttttcttcgaaatatttgctcaccgaaatcggtgaaagtgatctaagactaaaactaacttgtgagtaattcatgtgatgggccttctgcatcgaaaaagagcatggcgatcacgtggcagcctctcttgcgccgtctcagtattagcctatcacgatagagtaagccaatgtatacagcatggcgatcagacacatgatgatgatcgatctgaataacaagattccgaaggatgtaataaattcatgtgaacagtgcttcgtagctaaactaagaccagagctattgaaatgaggtaaagtgttttctttgtaaccccattttaattaggtgaaatatctagcgcacacaccaatctgattcatataatcataactagcttgtaaactacaaaattatttttcattgtgttacaactagaccattcccacgtgaccattcacgtgctcctataatgaaagaaacctaaagaagagacgctccaattcgcatagacatcccaagcttatcctttcttagtgaatcaagatccaatttacactataatacatgcatatattacgtaataaatgttttataagttttctgtgtcactcactatttttagttattttctcaattttcaatcatcgcaaatatcaattatcacaaaacatataaagtttccagatttgtatatgggcctaccttattagatgcgatgaatatggactaagtacagagctgatggtttttgttataaatatcgtttcctcttctaccctcacctttactctgtttctttctccactctctctctctctcgttgcaagcaacttgttttctgaatccaaagaagacgataacgatgaatggagctataggaggtgaccttttgctcaattttcctgacatgtcggtcctagagcgccaaagggctcacctcaagtacctcaatcccacctttgattctcctctcgccggcttctttgccgattcttcaatgattaccggcggcgagatggacagctatctttcgactgccggtttgaatcttccgatgatgtacggtgagacgacggtggaaggtgattcaagactctcaatttcgccggaaacgacgcttgggactggaaatttcaagaaacggaagtttgatacagagactaaggttcgtgtgtaaagaaaacttaagtttaagttctataaatgaaaaagaaaacagatcttactttgagatttggcttatctgtttcttctgtgtgtgcttttaggattgtaatgagaagaagaagaagatgacgatgaacagagatgacctagtagaagaaggagaagaagagaagtcgaaaataacagagcaaaacaatgggagcacaaaaagcatcaagaagatgaaacacaaagccaagaaagaagagaacaatttctctaatgattcatctaaagtgacgaaggaattggagaaaacggattatattcatgttcgtgcacgacgaggccaagccactgatagtcacagcatagcagaacgagtaagagagcctcattaactaaaattcattaactttgttttttgtgtaatcattgagactaattattaaagtattaaatttgtgaaggttagaagagaaaagatcagtgagagaatgaagtttctacaagatttggttcctggatgcgacaagatcacaggcaaagcagggatgcttgatgaaatcattaactatgttcagtctcttcagagacaaatcgaggtctgaaaattatttccatttatagaaaatatgttttaaagactaattttgcattaccttcctaatttgttatcaaaatattgtttaaaacagttcttatcgatgaaactagcaattgtgaatccaaggccggattttgatatggatgacatttttgccaaagaggttagtcattgatttgtttatgcttatatgaaaaacaaaactttaaaggctatttatagatgagctaaaatacgccatgtggattcaaaaccaggttgcctcaactccaatgactgtggtgccatctcctgaaatggttctttccggttattctcatgagatggttcactctggttattctagtgagatggttaactccggttaccttcatgtcaatccaatgcagcaagtgaataccagttctgatccattgtcatgcttcaacgtaagtcatatttttaatactctttcattatgatctatcctttagtttaactttggatatgataattttttactaaatatgttttgattgttacagaatggcgaagctccttcgatgtgggactctcatgtgcagaatctctatggcaatttaggagtttgattaagaaaccaatccacaacataacaatgttccctaattcaaattattcatcggaagagagagcaaaccagtagctgttatttactaattccactagattattgacttgagatcccccgcccattagttgatgtatcaaagagtgtagacattattgtgtataatttgcaaaccagtccagtaatatatttcttatcggtggacttgtgtctttaattcaaggtgtgttctcatcttcttgtggtgaatgatcatccattagtatttttttttttagtatacaatgccacaagtcatgcgaccatgaaatcaagaaacaagacaccagtcgtttaacgttatgttttacatcttatcactaacaatcttctaatctatgttttggttactttgaaaaagcgggactaatcccaaatttaaagcaattgaataaacaacacctgttaagcgtggcggacaaaacgacgacaatgtaagagaactgagtcagagattaaaacctatgaccaacccattggaactaaactatcctaattctctatacggagagtatatataaatggaggaggagaagaagaagagcagagttttgatcatcggagcaacaggaagattagggaactatttgacccgtttcagcatcgaatcgggtcacccgactttcgctctcatcagaaacaccactctctccgataagctgaaatctctctccgacgccggcgttaccctcctcaaagtctctctctttgcaatatctctgtaatttcctcattagggttcttctgtagattcttattgggggacttctctttgaaaaagtcttggctttttttgcttgttttcatttggatttggtttttgatgggttctagggttcattggaggatgaaggaagcttagcagaagcagtgagtaaagtagatgtggtgatctctgcaattccatcaaaacatgttcttgatcagaaactcctcgtcagagttatcaaacaagctggttccatcaaggtctcttcttatatcttaatcatggatttttttttgttacaccaattcgatcatgtcttaagtatagatcacattgtagtattgtttaatattgttcttgaatttacttttggctgatgatgagattgagaggatagatatctaactagagcagaacatggattaattactgttgcagaggtttattcctgctgaatatggagcaaatcctgataaaactcaagtctcggatcttgatcatgacttctattcgaagaaatcagagattaggcatatgatagaatcagaggggattccatatacatacatttgctgcggactgttcatgagagttctacttccatcgcttgtgcaaccggggcttcaatctcctccaacagataaagtcacagtttttggagatggaaacgttaaaggtttgtccttattgctcaattctatagctacaagtttttgcaaatatacaatcttgtggtctgaaatttgagtgtttcttttttctgtgttgttttgtgtatagctgttttcgtgaatgatgtcgatgttgcagcatttactatcaagacgatagatgatcctcgaacactgaataagaccttgtaccttagcccgcccggaaacatatgttccatgaatgatcttgtcgagctctgggagggcaagattgagaagaagcttgagaaaacgtttgctacagagaatcaacttctcaagaagatcaaaggttcatcatcataacatcatcagcacatctactaacatatttgcaaaactgtttttttaaacttgagctttgtgtttctatgatgcagaaactccatatccggataacatggagatggtattcatatactctgtctttatcaaaggagatcacacatacttcgacatcgagtcttgtggtggagtgaatggtactgagctttaccctgatgtcaaatacatgaccgtgagcgagtttcttgatactcttctctagaattataaaccaaacagcaaagggatcactctcatttttcagagtttaccttttacacttccaaaatttctctgtttttgagggctgaatcaatctatctcatgtagcactatctttaccctattgatctgagtttcgaccttaatcgtgtaacacattacttctgcagttctgatgatggtaaacctcaactgtttacatggtaacaagatcataggtattaggttcatgccttgatgtcttgaaatatagtaattcaccacaagaaaatcacacactaaagatcacaacaagaataaaattgtttttaaggatttaagaatttgatttacgagaggttattgagaataaacttccaatagagttggagtcaaatccaactagttggaacttaattagaagcaagcttaatcatttacttgaacaacagaagaacaaaagtagatgaaagatatttccgatattttacttaaggtagcaaatagacacagcgcgaaaggaagcaactatggcacacaacggaacacgtcaaatgcgtatttaaaagaaatagttatataaaaagaatgtgattctgagagcgtaaccaaaatacgaggttaagacttcagagaatcgagtgatcctggttctgtatattccgacaagactaacctttattcctctgcctcttctttattctttttttttatttttcaaaaacaaatcaccagtttaagtctctgttttcgttttcttcaaccttcaaacgcaagatatttttgcttgcagaaaaaaaccgaacctcgtcttcgaatttcgttttgttcctccacttaatcggccactgacactgtaatatttctctctaatctcccttcagtttcaagcattttcttaatctttctatgcactgagtttttgtgattactctttgttgtttgcctggattcttatccgtacaaaaatgctctgtaaccaaaacaaaaaaaatgcaagtgaaattgacaggggttatgtgtaattctatgaaccaagattcgaacttgtgtagaatttgatgcagatatgtatacactaaacggtatttcacaagttgcatgatgagattgggacctaaccatgaaaatttggctgaaaacttgagaagtttgatacacatggtcattgagaataaatgtcccaagaacatttgttttgttttcctgatgagtgattggagatatttgatttttgtctctaatgaaaccaatgcctttacttatatatgatatatcttttaggtacaaatgtctgaacattttatgggcttaagcaagattaagacagaaagttgtgttcatggttatgaatctgcctggttgagtcgttggactcctagtaacaaaaatgccaaggagattcacctaccagaagatggtcacctattgaaagagtcaacaggtcccatgaaactaaaaggaaaaatgttgactctatttcctaatcttgattcacctgttcaaagtgtcgatgtaatacctgacatgaacaaagaaccacctattgttgcggacagagaaaactcgatagatggggaagaagaagaagcaagcagtcaagctactcaaagtaagaatgtggaacactttctcaacaacaacaccaacttgctcagagagtgcaagcgtatatggtcggactctgaaaccaacagtagatcacaagtcaaacgtctgaagacaaacgcagcagataacaggggaaatgaaaccaagaacatgatggttttcgaagaaggaccatcagggaagaaggtgaaccacttcttccacagtatattcggaatgaccaatctcggatcaagaagatatcaaaaattctccacatcacaaaacaagaatctgaatatgggagaagcagaagacgttaacccatggattcagagatggtgtaagagaaaagctgcagacgttcatgaaccaagaggagggcaagaagttaactcaaatggcactgtgctagagaagcagcagtttccaagtattgcagcaatggcaatgatgaggaaggctctgagcggtataaaccctaccggttgtagaaagaccaactccctcttcgtttggaatgctgaggatttaagttgaacaaattctgtcatgccaatcttgctggtgtcagaacacaactcaaaactagaatctacctacttcaaataaacttagaattgtacctgcaaaagctatgagtatcaactctcattactgctggaattatttttactgtgtgacatataagtaaacttcagagagctttgtttccaaacaatgttttgaatgcgcaaaatccatctttttcatctccaaattctcattgggttaagtagtatagaccaatgtttgcaagtaaaggtgcattctagaaagataatggttcataaagacattgagtaaaatacaaggaaacaactaaaacattcgaaggaagttagccgtgggttgccctagtgtagatctgctggcttgagtgagcagagaccatcctgattgttcccttagccatcaattctctgatcgcccttctagcaagcgatccattgatctataccaacacacaagcgcatgtcaaaactagtagaaatctggaagtcatgtgtggtcagagttttgcactaaagagatatttcttacagaaacaagatatcagtaagaaaagtctgtccacacgaaatgcagtaatcaatcaggggaatttactaactagtcaagcatcactaaaaacactcttttcactacaaacgagtcgaatcatacgcgatacaatcactaatcgcaaagaagcaaatatctaagatcttaatccaaagctatcaagtaaagaccattcgatgttatctatcaagaagtactaacacacattctaaactaatgtgtcagcaatgcatattctatcagacaaaagtttgcaactttcagaaatcaaagaaagtgttgtaccctcaaacggtcagagaggatagaaggagtgataagtttgaacttgggagcctcagagagaagcttgtcgtaagttgcttggtcaaacaaaaccatgttgttcactttctccttttgctttcctttgctccacttctgttacattccaaacaaataacaatcaaatttagtgtagaaaaacaggggaaaatggatcatagcaatcaattaatctgatttcatggatcaaaataggacattgcaagacaaaagatgagatttttagaagaaaaaagtgacctttttcttttgcttgccgccaccggatttggcgggtttagaggacggaggaggaactttgtctttcttgggtgcctagaatcagacatagaagacattgtaagtaagattatcaggcaaagaaggagagagaattggatagtggagagagtgagagagcgcagataccattgaatcttctggagtctggacaagagaggagcggcgctacgatgaagtactggaacaatgaattgaaaccctagacgatggtgattgttctttctctcacggcgaaatactttactttattactttttttgatgacgggaatttattttaattattaataaatagtttaataacgtctcaaattatatacttttgttctgttcagattaggcctagtttggatcgaacaataataatgttgaactgggcttgttacttgggttagttacacaagaagagatagaactcaagcagatagtcacagtcccaagtccccaaccaatcaaatcccttagaagaagacatatcaaacttagaaatccttcatgacaatggatcgagtaagtcaacaatgaattaagcgactaatatgtaaatatgatgtgtatcactagactagagcggtagagccatatattccagaatcaaatcaaagctacttgctcaaggaccatatgtatatgacctttttctttccgaggggtccatacgtatattaatttcacctttttacatttaaaattgtgttcaagaaaagtttcataagcgccagaattctgaataaaggagagaaaattttggatgatacaaagtctacgaaacaaatggataatctaaagaaatgggagagttttatcaacttagccagccaccacataatttgaaaatttcttttatagatcaatcatgtccataacggaaagtttaataggtgactcaaaaactatcaaaaagagaagttaattgcattctatttacaagatggggtctttcatatttcggaaaagcaaagttaaagtccataaattattaaagagagacaccaaaaaaaaggacagaaaagtgtataatgttgagcttgtcttagtgaagaaggaaatcagtctcattaagtgttccacatttacaaatgggctttctgctagaagataatcttataaatctattggcaatatatatctgtataatttgtggaatgtacattctaatgttttttcatagttttaaaacatgtatctcagattctcataaacaagttataggcttcaaatagacaggatttttactttagttttgggtttgagagtttaggagttagaaatttattagatcatcaaattaacttaaaattttcaaactaaagactgaaaaaaagagcttcttacatccaaatcccatccataatggcctttcagattttttggggggttaatttaattgtggcctttcagtttgcgctttctttttttttaatttccctttccaaaagagtatcaaaatgggataaaaagaaaataaggttatgactgttaatttccttttcttatcgaccaaaactttctgtcgacaacgcctgttcatatctatgtcgtttttacagttgcatgtgtacgttgttagacatagagatcttgttagatcatgtgtacgtaatttgacgacgtatgtattcatcgtaagtgatcatgggatatatagtaggactcttgtcactcttgaattaagaaacatattttttttgtgccaaagaactctttacatgcatatacctttaattagttatttagtttgttaaagatcctacacttgccagtttccatttgtattctccactttcatagaaggcttttttaagtaactgcttcttcttgtattgttttgcacgcatctataaagtgtaaacgccaacgttttgattacatatatgttattttatttcatctttggattaaacaaaacacactttcttgaaacaaaaatattagtctaaattgagcacgtaaaaattgtacaatgataattaacctaaacacgacaaagactattacaaatcttccgataaatttatgcaattaatctttcacattaatttagtttcataacagcgtctttagatttatctagaagatgcacgtatatgtagaagtgaagatcgaataaatgatgaaaacaaatcagggaatatgaagaagatgtgattggtcatgagttacctcatgggcgatgaaggaatagctaggacagcttttgggagcattgagaataattttgtggataaagtaaaaacaaaagaaagcaaatgctgttcacaattatttagatgtttttttccaaaataaaaagtcttgggagaattgaattttctacattttattgcaataaaattgatttaatttaaaataaactttttattattatcatgaatatttttcatagtctatatataataagcgtaagcaactcaatccaacacctacaagacaaacccaagaaaaaacacacaaaaagatataacaaaacggagcaaatacatattccccaatcctctgtttttcttaatgaaacatacaaactggtccttgttcaccatgactattgttcttcttcctttgtttaatctcctgatgacaaaactctctgctactcactttgtttccgtaaatatcacttctttcgagtgacctaaatcacttccacgatctcttaaaaaagctccttttcttgcttttttctgtgtttttctttttgcaagaattcatcttgatggatccaattaagtttcaacacttgaagatggagaaatccagaggaatcttgaatttccaagcaataagatcgttcacgagcttgttcagactgttcgagcttcttcttcttgtaatcttgatctccaaactctctttcccttctgtaaaaatctctggggacattttcaaggaagcagcagtgtttctcgttagcccgagattcgttttcttcatcggaaacgcaattgtaattactcttcttgcgaaatccggacgatacagctcgagtcacgagccttcaaagacagcaacagaagctgcaagcaacgatctttaccaagaatttcttcacaagagtgagaagaagaaacccgtagtttacgctacgaaaacagaacaactaaagaagccgagtggagggaagagggttagtttcgggagaagccaatcgcacaaagcgtttgaggcggttaagccgctggagagtaccaatggtgagaaaaacatgaagaggtatgtgtcggagaagcatatgagggtttgtgactccgacaagaaagtagtggtgagagttaagaaaccagaagatggaatgagcaacgagcaatttaggacaaagattgaagctttcatcgctagacaaaagagaattcaaaaggatgaagaacacttgataatctagctagatcctctttgctagtgaatgtttttttttttttttttttccttctggttataaacttgaatcctctgttacgtaatcttgtaactttgccttagaaattctctttatcttttactcttgtaaaccttcaaggttgcttaagtaaatacaacaaatggtaattaaaaacaagatttgtaaaatagctacagaaccataaatgatttaatctcttattataaatacaaatgaagaagttaatgagactagttattcaaatgttacgaactctccaaattaacaattcggccattgacatagtaagaatccagagacgtggacgtcaaagcattccaactaaagtttctaattctatcatgctgaatgttgtttgtatcgtttggattcatggatgaacctagatatttattatctagttggggtaaaactgagtccatctgattgatgtaacattctaatttgtgtaatgtggtggtacatacgagaataaagataatttatccactatctattaaagatgtgtgaactactgaataagcgattttcaatatcatgggattgatgataaaacatagataaagttctcgtggtaatttagaaaacaattaattaaacttctgatttttccaaagtagaactcaacattttgacgatagttaaatcttcataccaaaataggtttgaggacatacaaatgcatggtgacggtcggatcacacacctcgaatttaggtttgatattaaatcagacgtggttagttacactaaagcatcgaatatttgatatacccacactagctaatgcctaatctggagagaactaatagaaagttaataggtaagaatataaatggtgtttccaaatgctggatagcattagggttatggataaaagggaatagaattaataacagaggagagaattgttggtactgtatatgtcgtcacgttatcgatcttggtctcacttttattgggaatatatttcaatcccattgcaagtagtgtagaaatacccataacgtatttatttactttcaaaaatgtgctattgataagccaacacaagagtattgattctttgatattttaactaactagaaataattaggtagcggacatatgctcgaaatttatgctaaaacctgaattacgtaacactatatttcaagcatgtccgataagaacactggtaaaagaaaatgtcaaaaacattatgaaatcttgattcatatatatgtttatgtttaataatacataattaacggattaattttacctaatatatttggagaacggagtgtggtgaaattatcttacgtgtaggaaccaaatatctggaaaggtgaagaggcaagatacgcttgcatgagaaaagattgatgccaatctacgaaggatacacgtgagatagccattataaacctgtaaggaacatatcgtttattataaaatacttacacttcattgtttactgtattttttatacgttctccttacatgtgagtagttatttattaattgggaggaaaaaagaagttatattgtttaccagacaaatttgttatgaatattttaattgttatactcccttttttgtggataacatgtattatacaaaggttaaactctagcgatgacacaacgatgatactaacacaaagtatatgtcatacatatttcctagttaaacatgctgatttaaatacataccatttgagtttagagtatttaatataaatgtttatatggaccaaaacatttcagatggaacttgcattatatagtgatcgccaatataaattggaaaacaaaaatgacgaaaagtatctaatcaatatacaacatgaagagattgaggaggcaggttgaatgaatttatgccataacgtgtagtccattttagggtcatcagcatcccattcatttgctcatgttacttagacaaaacatcacttagaatctctcctttagcataatatatctattgttaaccgaatcaagtagaattgtctagatattttggtaaaggaaataaatacccttaggattcttggatgtagactatctaaactaaacaaaagtatcgtcacgtcggccgtgtcgtacatttagcttatgaatagcttttgttaagctatatgagttcaattttattatcaggttaaataacatattttcataatcataataagatcaacaatataagtttgtctactctgaattattgtccaacaatgtctcactccattttcagacctcttaaaccgtatctatcatagtctacttcatacaagaaaagatacataaatcaaatttcttttcaaataaattaaaattttatcctatgaaaaaatattcagttgttcatgagatattttttttcttcacttgaattccaaacttaactttgttcatgataaaattttcttattccaaacgatttgattctccacttggtaaaaggaaaactagaatcatccacattcaattaactatgaagttctgactgaataacaaaagaaattgattaggggctaaacagccattttcatatctattttcttgtgaggatcatagccaatgagctcaaagtcatccgcaacaaaagaatctatatctttcttctctggatttatcttcaaaacctgtaaatatcccaaagataaataagcatatagttgcaaagaattattggtagattatgcattcatcaaactcaaacaagattgaagaatcagcaaatcatgtgtttgtttatactcacaggaaaaggttttggtgggttctcaagttgctcttgcagaggcctgacatggtttttgtaaacatgagcatctccaatcacatggataaaatcaccaggaacaagatctgcataatgtcaacaaactatcagacgatgactgatatttgaaatcacaaatttgctccttttatagtgggaattagaactttaccgcagacgtgagcaagaatgcatgtaagaagggagtatgaggcaatgttaaacggtacgccgagacccatatcggctgaacgctgatacatttgacatgaaagttctccatttgcaacataaaactgtgcaaacatgtggcatggaggaagtgccatcagcttaagatcagaaggattccaagctgacattataatccgtcgatcatcaggattgttcttgatcttgttaattacatctaagagctgatcaaatccttggccagtataatcagcatgcatatctgtgtacctgtagagagagatgaacaaaatgtctcgacacagaaatctgttttgccaaaactcagaaagtgtcaagagataagagagaagctactgacttagcaccaaagtgtctccactgaaatccataaacgggtccaaggtcaccttcctctctctcagtcagtccaatactgaaattaaaaactttcaatttatcagtgtaatggccacaaagcttcaagttgtgaaagaaaaatgctgaattaaagtttacccatcaagatatgctctcgacgcattcccatcccatatacggatacccttttcttgaagtacctgccacttacacaaacttctcagaaagaaaaaaaaaatctagttcatctacatatgctccacatcttgatcaatcacggtgcttaaggcatgaaaatgatgataaatgatctgttttcttacctttgcattggttgaaccgcttatgaaccatagaagttcctcaacaacacctctccagaaaactctctttcaagtgaaatgcaaacagatcttgttagtccggatatgcagggaagacgaagcaaactctctttgggcttaaaacatgaaaagtcaatgtaaaagtgaacatacctttgtcgtcagaagtggaaaattcctgcgtaaattgaatttcatctgtggatccaaagatatggaaatttgttaacttttgataagcaaaccagaacaagacattcagatacatattatgaagtagtaactcacctgacaaccaaatttagataatgtaccagtccctgtcctatcgtcttttaagtttccatttgagattatctctttgaccagatttaagtagagatattcctcatgccggtcaaaaatcattttaggaagaacagaagaaaacttcttccaatcaacttgaagaacctttgacccatcactctcatcagaggcttcaccggcagaagaactctttacacgaacatgagtcgtgaaggaaaatcgaagaccattttcacatattggaaacgacgaacaccaaggctgatatgcagaagtgtcaaccgtgggaataaatgtatcacagtcgatacttgtatcaatctcagttatgtggatggcttcacagctcggtttattcaaagcttccctacaatacaacaaacataacacgatcaaagagaattaaaatcacgaaaaaagggagagtcttgactatagaacacacacctcaatatgtcgccacctcctattacaaacactttctcaatggacagactaaacggaggtgcagctaataagtctagagcagaatctatgctactgcaagttacaacattttcagtgttggctatatcgaaaccgctagaacgagacaagacaacattcaggcgaccagagagtggcctatactttttgggaatagactcccacgttttcctacccataacaacagcgttcttcttagcagaatccgaagtggacaaagttaaatccttgaagaacttgagatcggtaggcaaattccatggaagttttccgtctttaccaatacccatttccttggttgcagctaccacaacttggtaagtactctgaggctttgaagtcatgatcacatttccattgagagtgtttgccatggttgaaattgaaaccttgaaaatgtttgtcaatgaggatggcttaggagaaaatttacagaaccacctttgagacaaaggcagcaatgcctgaagattgaacacaaataaaagttgagaagatcactaagcaatgcaattgcaatcacaagattacttatttcaggacacttcattcaacatagaaccaagtacatttttcacttctaataaacacctaacaggactaattgcaaacatacgataaattaataacacactcacaaataagcacttatttaactgtaactccaccagaaaaggtagacatagggcaatagaacaaaaaacacgtaaaatgcaaacatagtcaagttcaccacttaccgatttaaacgctaaaggtagagtctttgcggagttttgcaaacacctaaaaagaaaaaccaaaacttcagacgagaattacagaatttcaaagacaaaacgctcaagaccaaactcatatcaaagtgtgaaataaggggataagtcctcaaaacaatgacagagattcttatgttcttcatgcatttatccatataagatataataagccaagctttctatttctgaatctaaatactttatcaattactaaaacaacaactccataactaacctcattggagttcaccaaattcaatccccattcagagtgaatctacgcattcatgattgcaaacagaggcaaaatcgacagaaacaaattcagcattcatattgtttttttacaaaaaaaaaactgagattccaaaaccctaaccttgagacgaaatcaaacgtagcgtcttggccgctcggggcttcggagagggtataaacggcgggagacgacggcgactgagtcacactgagtcgtttaaatgaagaagaagaagaagaaaaatcagcatcgacccattattatattgggcctcaactggaccgaaaataggcccttttagaaacgattccaaagttaattataaagaatagttaatattgaaatagtttgtcatgtgtatcacttattattagatcgaatttttggcttcttgtacaatgttataattcctgtagtaacctattgtataattgtgaatgatatataatatgtgaacaaaagaaacaacttatgtatcttagcaccgtctatggggaatatcaccatgtggtgatgtatttcaggatatatcatttacaattagtttgaagggaaattaaaccttaagattcttggttattaattgttaatagactgtaatgataatatttatttggtttttccattgtttactataaactaaattcactgtatgtgtaaaaagtttaaattttgtagataatgttacgatacaatcatacaaaaaaaaacaatatcatgagatacttgggttgacatcaaatgtttttttatcatcgacaaaatgttggaagtagtgggatgcacttctcctaatacaaagacatatttctctcatatttaatttatttacttagaaacgattcgttgttcattagtttaaaactaactctatgtatttatttaataggattaattggattttttctaaaaagtatttctatattatggaaaacagtaggaggaccctgtcaatatatagattgttagaatcagaactaaatagttgtctacatgttttcaccttgcttcaaatgagcctctccattatcttcagcctcccttacctctccccaaacaatcttctccaatagaggtaaaaataaaaaaataaactctctcaaattctctctagctttctcatctttggatcctaaaacacattttggtcatttaactcatcttgattctttagattcatctaatcatttctcatgcgatttcgatctaagcttttcttaagtgatctttacaatgttgtcttggtaggtattatcgccgtgtgaaacagagtgcttaaaactcatctaaccatggctgagaccaaacctggttagtattttcatacatttcctgcctttattcacagagatatttcttaagtctaatgcaaattacaaattgttaatcagaaatagagatgtcggaggaagagaggaagatagtgaagataagctcgctgaagaagaaagcgataaatgcatccaacagattcaagaactccttcaagaaaaaaggtcggagaagcagcagcagagtcatgtccgttccgattgaggacgacattgacgcagaagatcttcaagctcttgatgcttttcgtcaagctcttatccttgacgagcttttgccatccaaactcgatgatctccacatgatgcttcggtaaaaaaattattttccctattcaatctctttattttcttaccttattcacaaagttatttcgagaccgtagtattcttataagtcaataagattaaaaattttgaaacctgatttgttagtttggactagactataacccgagagaaaattaggtcaaagattatagatatctgaccatattcaacaaataaactgccatatgtattattttaaagataagaagttttcagcgataaagttaaatatttcatatttttctgattaatctcatatacagatatatgcatacataaactttttcaaatattttaaaaatcaaatcttatttttaaattcagaccaaaaggatttatggaaagaaaataatcgaagcgaagaaagatttgtcaacactttatttcctaacatcatttaatacaatttgaacattttataaaattaactatgaagaaaatgaaaagaaaaaccttagtctgttcaaaaagaaaaaaacttggtatatcaaataatattgaatttcatcaagaagatttatattttcgtattgatgaacataaacagatttttgagagcaagaaagtttgacattgagaaagctaagcaaatgtggagtgacatgatccaatggaggaaagatttcggcgctgacacaatcattgaggtgaatctttttcctaaaatctcggagcatttaattggatccaactttgcatctcttgtgggtttaaaaagttctataatgtatgtttctaaatgtgatgtaggattttgatttcgaagaaattgatgaagtgatgaagcactaccctcaaggctatcatggagttgacaaggaaggcagaccagtttacattgagagactaggtcaaatcgatgctaacaagctactccaagtgacaacaatggaccggtacgtgaaatatcatgtcaaagagttcgagaagactttcaaggtcaagttcccttcttgttctgtagcagcaaataaacacattgatcagagcacaacaattcttgacgtgcaaggcgtggtacgtatttaataaattcatttctttatgatctctttcagttcaaaagtgggtaaattcaaaactgtgcgtgttttctgagtgattagggtcttaagaacttcagcaaatctgcaagagagcttcttcaaaggctttgcaagattgacaatgaaaattaccctgaggtatatatgtagctaattagaataaatatgttttcttataagcgcgtaagttgttgattaccggtttatcttgtagactttgaaccggatgtttatcatcaatgctggttctggattccggctcttgtggagcacagttaagtcgtttcttgatcccaagaccacagcaaagattcatgttcttgggaacaaatatcatagcaaattgctcgaggtcatcgatgctaggtaacatcatgctactataaaattgttgactatatatgttcttttttgttgtcgaaactcgaacattcattagatgttttgtattgtaaacagtgaattgcctgagttctttggaggtgcttgcacttgtgaagacaaaggaggttgtatgcgctctgacaaaggtccatggaatgatcctgaagttctcaaggtaactaacaatttaccaaattagggactgaaatttataaatttgactagcttttctgaatttcatacatacaaaaacatgtttttaaatggaagcagatcgctataaaccgtgaagctaagtgttcaccgatttcagaagatgaacacaagcatgtagaccaaggaagatcaacttcaggtttcgaagtaagttaaataacaataatatctttcaatcagctaatttatataagcttattgagattctccattaacgctgcagagtcttgagagaatcaagaagaaaaccgatgaagataatgtgtatgagaagcaaattgcaaccattgacaagtcaatggatatggcatggcttgccaaaactcagaaagctgaaaactttccaatctctaaaggtataactaaactcatgtaagaaagaaaaatgtttcttcttctgcacgcactaaatcaaagattctttagggttagagtgctatgttaggaaaggggcacccaagaaaggagatggattacttgtgggaggggtcatggcctttgtgatgggaatagttgcaatggttaggctatcaaaagacgttccacgcaaactcaccgaggctgctttatatggaaactcagtctgttatgaggaatctacaaagtctaagcagaatcaaggtcaattcgcagcaccagtctcgagctctgaatatatgttgatggtgaaacgtatggctgagctggaagataagtgcatgttccttgacttgaaacctgctcatgtcgaatctgagaaagaagagaaacttcaggccgcgcttaatcgcgttcaagtgcttgagcaagagttgactgagaccaagaaggttaggcaaaatttaaactaccagaaatgttccggacaataaccaaatctggttctttaactagaaatcgatgattgagtttggatttatttttggtttaggctttggaagaagcacttgtgagccagaaggagattttggcatacatcgagaaaaagaagaagaagaagaagctggtaagaacaaaacattcacacacatcggttatttaacttccaacacttttgttttcattcatatatactaacagtgttacatatttttcagtttttcggattctaactaagtgaggaaagaatatgagatcataaagcaagaggctgaatcaaccagagagagtttgtttgtgattttgtttttcaaatgaggaatagattcagcttaaaagcaacagacttgtacatttatctgaagtgaaaactatatttatctttttggctgtgacatattgtttgtgtgtgcattttctaatttctctatgaattttctgtgattttatccacgtgattaaactatattctacgattggtattgaagttaagttttattatatcaccgtaccgtaagtaacatattagtcccagaaattatagttttgtaaagtgaaataatatggagcttacccaaacataaataagtagggtttgttgtttggtcatgtgattgagaaagatagaacacaaattgaattttgttttcctttttttgcatttgcgtttattacttcctttagtcctctctctttcgttgtctttcttttggtagtccccacacaaagattgtatgtaccttccatgatatttacggatcatatttttcctgcaacaatatataaaacttttttcttatttatttgtaacaaaagaaagcaccatgtccgtcaatttgtataagaaattagatatctaaaagctagacttgttgccaaacgaatttggtttctagtaataacaacattaaaaggagaaaaaaggaaacacgtacgtgtagatatatcaaccaaatcaatctctcgacaagctttttatatacgtgaattattgaagattttgattgttagatatagcgaaatacacaaagggtttctttaaagaatatatatacacagttaaaacaaaaatattcacagagaatcacatgaagtcttgagaccatttgtttccttcgaaggtcaaaagatgttctactgaggtctgtagccactgtaagaaataataattgtactttgggattaaaatatccaattgaaacatcaagcaaaattgtaatcgaatgaaccgtgaacgtgtaataaatggacacacatgtactttctcagattctttttgaggattgcggagagacgtttgtcgacattggcgttacatcattatcaatgataatgcaatttaattaagaaaaaaatgattatgcaaattaagattaacgacgatgagcggttggtctatgtcggttagttttgtataatgagatttcaagatccgaagaaaattttgaccttttaaaaatttaacccaattttgtgagagtatccccggaattttggaggttggcatgattagatatcaactatcaagtgtgtcgtaccattcatgtaatttcttttttactaattttgttatatttctttttaactgttttgatttatttataaatagactaaaaagtatgttgagtgaatatgtttggtgaaattcatgcatcgtttttgggaagtgggctggatcagtggatctcttccacactttcccaaactaataaagagaaactgaaaataaataaaaaacgaaaaaagttaaattatttaatcgtaatttaaattttgtaaaacaatttttataactaaaacaccatctgtggtaagacggtggaatacattaagaatgtagtattaaattactactctacaagtacttaactaattattataatccttacatattatcagcatctgaataattaacccagattaatacgtataaatctttcacaaattggagaataagattaggaaatgaaaacagctgtattgagtctggagagttcgtatcccaacctcacatgtccctctcaccttttcttcttcttcggcctacttacacatgttcttctcattttactctaagcacagattcttttgtatttcttaatctctttttatttttatttcaggttttttttcatttgattattcacaaattaactattttatttagtgttggtggtaattgatttttaattagtttcatagatttctgcagacaaattctggctttcatgtttttctttttgcttttttttttaataataattcgcattacaaatatatcattaatttttctttctcttttgtcgttacgtgaaaatagatttgctgtgtgttttttttctcccgacaaatatagacttagagcatttccatcgcgagtttctggattctggtctattaaaacagaacaaaaaattcaaaaaatgtggagagaaagtaaaaacgtttctcacttgagaaactcatttttgcttttgttttgttttgattggttcaaataataattaaaaaaataaataataaaataataataaaatttatattattttataaaaatgggtttctcaccgatggagatggtcttactgttttactgaagaagatttaataaagttctcgcttcttttttcctctgagcttaactttttactttttgtgataataaaaagaagaaaacaaagaaaaagttttgttttcctctaaaacaaagaatagttttatctgcaatctttgtaaaagaaactgtactttgttttttttttcaatttctttcctcctaagaaatcacagtactaaacaaaaccaaaagaaaaaaaaaaaaaatttaggcaggtcaatttttaagctggtctgtttttgtgtgagctttaattttctgtctttgaaatatctttatctaccacgacagtttataaaatttgaaagggaaatttatttggtattaggtttctaagaacttcaataaagctatattttcaattacttgttattaaatgcaaaaaaaaatctaaatggatgtttaggtataactgcaacaaaatttatggaaaaaacaagacttgatgaatgtataatctcaagagttattttaagcataaatttaaatctaaattttctatttaaaattatttgatgaatttttctatttttaattatgataaatgcaagattcatagtatctaaatttaatacagtatatgattaggcttttcattaaacaatataaatattttttttatcttgacataatgatgagtaaataatttaccaactaaatacatataatttttgatcaataccattcaaaagaagaaaaaacactttctcttacttatctttgaattaattttgaaatatttcattaagaaaaattaattgtttaaaatattgctttgattaatgtagacactctagaaaactttttaaaggttagggaaaaaatgttaccaaaaaaaagttaggaaaaaaatgtaaaaataaagaaaagaatcttcttcccctaatagaatccaaacaaatgtatcgcttaccatcaagttgcacaaacactcaaaacgctttttgatgatttttcttctataaaatctttctcctcaaccatttcaaagccccctcttctctccttctctcccttttctctctctctcgaagatatcgcctttaattccttcttcttcttctgatttcttcaaagattcatttcttagagatctcagcttctgtaagagtaggctagctaccaaaaaaaaagaaatagaaaaaaacattgatgcttaatcagcagttcttggtgtttgagacacatgtctccaataatactcagtgagatctttctctctgggtttatgttaaattccacaatcaggcgcaggacccatcttgttcaatctttctctgttgtcttcctttactggctttactatgtctcatgatctctgaacttatctccagttttatatctatacgcataattacaacaaaaccctagtttcttttcaaatttctcttcttcgtttttcgtcatctgggtcctgtcctgttctgttgtgtcttgttctgttctgtttttaattcccctaaaaacccattttaaaatattttatctctcttctcttaaaaaaaactcttccctgtttttgtttgtgtgttactaaatggaatcgtcgtcgtcgggaacaacttcgtcgacgattcaaacgtcgtcaggatcggaggagagtctcatggagcagaggaaacgtaaacggatgctctcaaaccgtgaatctgcaaggagatcaagaatgaagaaacaaaagctcctagacgatctaacggctcaggttaatcatctgaaaaaagagaacacggagatcgtgacaagtgtcagcatcacaacgcaacactacctaaccgttgaagcagagaactctgttctcagagctcagcttgatgaacttaaccacaggctccaatctctcaacgacatcatcgagttcctcgacagtagcaacaacaacaacaacaacaacatgggcatgtgttcgaaccctctggttggtttggagtgtgatgatttcttcgtgaatcagatgaacatgtcttatattatgaaccagcctctcatggcgtcttctgatgctttaatgtattaaatgtggacctaaaaaccccctcgaaatcacaaagaaatggggccgtttttatttgtccgatttagagacatgtccaaagagagagatttatatataaaaatgggtctgttgtttgatttgtttccatttcaaatttttgtttgtttgggtccgttttaggcgttaggtatctctaagcatcatcgttatgagtgtgtctgtaataaaggctctgttgccgcatgagtacaaagtgttttcttaatattgtaatatgcttattactttctttttattcttaagtactaatcccatttttatataatttcttgagcattaatagtaaagtaataaaatgtatcgtagtaagagtttcgcatgtaacgtacgctctacagaatcatgtttcacgccaatcaaacattatagtaggcagatgaaatatcaatgataaaatagcttgtaattttgggtaatcttcaactcgccaaagtaaaattttaaaaaggtgttaatgttgattaaggtgtttttagtcatgaacgagtgtggatgatattagattcagtttatagatttggatctattcttaagaagaagacttacgaaattcaaaacttttaagaatctagatgaattgagggttggtaggttaatgttgtaataagaagaaaccttattttctttttgatctggaaaaagataaacaacatataacatcttacataaaatccttttatgtctgaagatctctcagaataagaaatgaaactgtgcagattcttgtaaaatattttaaacttatttcttgtgaattttggagattttttttgtgtgctagacttataggtgaaatcatagcctcttgtattctttgcttttacacatcatcttttaattgattttcttatctcaaatttctttttgggattttaaatttcacagttccatttatcaccaatagatccatatacaagtacatcacaaaataatggttatactacatcgtgagtaataatgggaatcctattctacccttttggcagaactatactttttgttgctggatagtttgttttatatccattgatcacggatggttcatttcataaatattataaatagaaagcctctttttattttatatgaagaagtcttctatttgataattgcggtatatattttttacctttatttcaagtttagtattccttcttgagaatatcgtacatgtgtcgacagactcgagagattataaaaaggcatcttatgtgttttgatctagctaggctcttaggaacattgaaaagatatgtaattcattgcttactgtttgtagtttcgaagataataaagacccaaaacgtaagttaagtgaaggggttaattattaaaaaaaaaactaacagaatgtgaagtactaaaggagatagttgataaaaaccagaatatcattttatactagctagagtatacgcactaaatcaccatatgcatggtaaagatttattacaaaaaaaaaagaaaagaaaaaaaacactatgctagaaaatctgaaattagtgggataataatcgtggataattttaaccaataacatgaattatgtaatacattatttatccgatgatacacttgttatcatgcaaaaaaacaccttattcattttacgattttccgatcataaattttgttttaaatgatatcttcttccataagcttatatagcaaatgcaccttttataatagccgttgttaaaaaattcaaaaacataataatttggaagtgataatcaattatggcaaatttgtcatgtgcagggaacaatatttgccggtacttgacctaaaaacacatgataattcaaagactttaatagtggatcgcctaattaaatgattttataacgtttgttaattatcctagatctacctgaacaaacataattgataatcagtcggttaattatgtatacaatatatatgcatctaaagaatctaatataaggttcttttcgttatataagagaatatatatatatatatatatataagtttattaattataatggactttcacaaacaacttaaagatcttttgcatgacgtaatataacaacctatcagcctgaaaaacagacaatcaagaaggttggaggagtcttggagaaaaatataggagccacaggacggtcgtgagtcaatccatagagacatttggttacatatatagattgtgggttggtttatgcctaattaaactcgatgtactatactctaatcccacgaacaaagacaggcattaacttttgatctacattaaaacatacaccaactgattttacacgaattgtctgcagatattcttgaagattccctcagattgaaagatatatgcttgagaagagctttagtcaaaggaagagctttagtcaaacgattagacaaaactcaaaaggagaaaaaaatcccaaaaaacatatctatatgattaaaaacgtttttagtgatgctcacagggcgaaacgaaggtaatgttttgtctgctagtggatcacatttcttttctattcccacgtaacatgcaatttttttttaatttttttttgtacaaacatgcaaaggtatttaaggttgtcaaaatcatatttttttgttatcaaaataatatgttaaattagagtgaaaatgtcattagagttgcgtaagcgcgcaactttcccaattttgattagttctctctaataagcctcaacgattgaacataatttcaaccatgttacggaggtcaagagatgattaaaagacataataaatcgtcctttacaaatattgaaattcttagccgttgtacagcttatatactacttttttcactgtcatatacttcaatttaattaatatattcgtaactaaaattcatttatcatattactatatacgctatagacgttttatttttcttttaatggaaaagaaactcaaccgtattatagggacggcagccaacagtatattttaaattttaaaagcctccagtgtcaataaaaggcctccagaaataaaagtctacccggctacgagccaataatgggaagaagtcggtgctttttgtatacattactctaaagaaaggttcagagcaacataaaaaaaaaggagtggacaaatctagactttggcaaccaaacaaattatgaatatttcactagtagtatataatctattgaattgtgttagtgatgtcgatgtatattcatgccgattaaatttgtgtatttgacgcaactaaacttatgaaaatgtttcaatgtgcatgattaattgcttcttagctagattttgtatatgttaatgataacaaacaagaaaacagtaagcaaaaaggtgacatggcttacttaatgttgaaatatatggtattggtaggtagaagttggaaaacaaaacaaaacactttttcctctttacgattttcggattctccattttgttacatcatgatatgaataccactacttttaaactgcatatatatcgacgtatgctttattccttcaagtaaattttaataatcgtgaaagagaatgtttatagtcaatttatagtacaaatgtgtctagtattctgtatacatgtatatgccttttatattctcaagtttgtagattttctttttctatagtatggttctcatttcatgtccattgagatatatatgttcaaaatttatgaagataattgtatttttcttaacgcaattgcgctcaagaaattctttagcactagttttttcttctttttttggtcaaaattctaatctttcattattcaattttttctttaattttgtttttgggcactggccaactaagagaaaaaggtcattatgtataatcatctccttgttagtaaagtaaacaaatcaaatcataattaaaagacgagtatgacaaaactttaaactttaaagtaatgttttttgataaacagagaattcagacatatatttcacatttcctttagatccgtgacttaattatatttttattttgacttatgtatgttaggttccaaacctgaatccaagcgtagcttaggcttcgaacctcaaatgtctgcataaaatttagttaccattattgtagctggatagttagattctccacatttatataattgtttttttaaaaactattggtttggaagccaccgattttcaaggcctaatttagaaacaacattttctccatgaactcttttgatgcgtagtcttaatagaaatctttcagtattattgacaagaaaaaataagataaaaataaataaataaaaaataatgactaacatagatgtgaaaagtccttattaatattcaaaacgctccaaaggaattgcacgacgagacaagaaaagcaggggcggctaagagagtcctttagaaaccaatctcattcgaatagtattatggtttattgagaaaatttataatttatgtactaggaagtaaaaagtcatagccgacgatactcaaaacagaattttccttcgagttcaagtattttcttgttaattagttcggaatcgaaatttcaattctaaggtttaaactctttattgtgaaagtcacacactcgtgtatttagactctaacatagagtcgagaaaccatacatgtataatgtattagttgaatggtttcgtctaaactctatgttacaagtaacaagtccatataaatgagtagaaccctacaccaaactctaattcctacttcttcgaaaggatacctaaaagcccgtgaagtctagaaatctttgattttatctacatgtattaactttgtcagcaacacacgttcataccggatttaaagttttggtgcaagtttctatcgagagagctttgcccaacatcttaatataagcccaaccttttataaataagcacaaaacaattataaagcctcacaagtaagttaaaacataggcccgaggcaaatgttaatggtacagtatgttgttgattctaatgtctattacgtgtactaactaactacgaagcccattcaagagtttaaccggcccaacaggtttactatgattgttttgtattaatatacagcttgactctcattttgtaatagaaaaatatatagcggtgtttaacaagataaattatgctatctataacattctaatccagaatttggttccatttaaaaaattaattaggccggttttcttctaaatgagttgtggtttcttgttaggacgtgcactcataccagccttaaaaaaattagtgacaaaacaaaactgaaatttttaacaaaaataaataaataaaacaaacaaaactgaaattaagaatcgtgagggtacggtcatcatccactacatcatctttactcctttttatgtgcaaccataaaataatacgtcgaacattaattatagtgacgaatcagttcattaaagcaaagttcaaacaactttgttctctttccataatctcaattaatcagtaatccatttaatttatcattgtgtgacgaatcagtgcatcgaagcaaagtttaaacaactttgttctcttttttccataatctcaatcagcaattcatttaagtttaacactttttagcaaaaaattatgagaaaaatttatgactctatctttcagtaagtatgttatgatcgattaatttgagttaaacgaagtagtgtatcatatatagtatatcactatcagatttatagaggcctaatcgtacattattcagttggttatagctagcgatatctcttgattggagaataggaatggaactttgaccgatattgaatacctagtcttcaaggattctacaatataattatgatgatttggtaaatttaattgggttatgataatgaaggcactcatattaaataatcaggtcactaacctctttagacttattgtggccaacaataggaaagtagtctcctttcaactttttctccaatcccaccatttccatgaacaatttttttaattaaaagcattaagagatatttgcattaattaaatgatggataaatcaattgttgttatggtattttactatttttatttatttgtaattgatacaatctaattttgaaactcaagctaatctctatttaaaccggtttttattgttgctttttatttaaagcattcacgttggctaaacaaattagttaacttttaatcgtgttatttctttagagattatatatagtgatataccaaacgcattggcttctcttttttttgataaggtacgtgtatctaaatacacaagatacagcttaaggcacatcaaaaattgaaaggagaaagaagatgggtttgttgccattggtgaagaaactaggtttcatcatctttcttctagtttcagcttcagcgtttgctctctgttctgcaggtttgtttcttacttttttttctctctctctatctacatatttatattcctttgtttgcagcttttctctgcaacttcatgtgcctcctactgagatcagtcttttagaaagtaagataataacattaagagcttgtgctctccacatgtgtgttaatgacgactaaaggagaaaattaacgacatagtatgttacgttagtgttatttggattgattaatcttggatataaagaatagacaagcttaagtctcttttttttttcttttttgtaggccgatcatccattttaatctatagccaagaagatgatcatcccgaggtattcgttttaactccaaaaaaagttgccaactaccgtgcgttgtatatctttacttagtaaaaaaccgaacaaattgataatcaagatcgtagttatatgatttcaagaacaattttgtacgttggtgaatacattctatttgtggacaggtagtagaaagaagaatacatgagcatgagagaattctgagaatgaattcaagagactatggccactccagtcctaaaccaaagctcgtgagacctcctttcaagcttattcccaactgatcatgcatatcaccgatcgactatatatagatgccagactttctgagatgtataatatatgtaaacctaaatactaacactgcaataagtttgaatgataatcatatatataagtttcaagatatgttttctagtaaattaatgattagatagtgctctttgctatcatgcagaatgtaaatttggtgaatagtcatcattagatgaatattacaatttatctgatagaatccttatgatcaaaattaatattgaaatattcgattaattctgaaaacggatacagattgtatatgtgccagacaaaaaaaaagagaagagaattgggaacgttgcagtttcgtagatgtgataagataataagtctacagtgtaatgtccatctcttgcagatctcaaattgcatttaccatattctgtttggtcccaatgacctaacctcacttatattcttgtacaaaagaatgtttactttatacaaatatttctaaaactttttcttctgaccaacattcttccactacagaattgagactgatcataagttcatcacacctatgctttattcctctccattgcttacttcttcaagctacaaaatcatgtaccaattgtgaagaatttatccggttctggcgacttccggggtttacatactccatttcatctcccgggatggcattctcgtaaatatccaccccggaaaagttgttgtatgcctcactagacatagccacaacattgtcctgtccttgagagttttgaagccctagagtcaaggacacatcaccacgacccaatcttgacgtatcagccacatgatatgtaggctcaactgccatgaaccggcgaccatccatatgactgccttggaccatgccacgagtttcctcgccatatccatgtccatggtccggtttggtctggtcttgtgaaaactctcgagctcgatcttcatcatcagcagcaacaggtcctatctcagacattttcggtgtattttcggaagacgagttggaatcattctctgtgaattcctccttgtatatctcctccaccattggcttccataaacgcactcgtgcatttatgaaccagtttgaaaccttttacaaacataaaacacacaacaatcaataaataaactatactatgaagagaaagaaacaatcttcaaataaaacattccttacctgaccgcggctcaagcccgtttgtcttgctagcatgatcttatcagaatcctttgggtaactattcatgttttcaaacagtaatcatcactatttatgaagaaaatgtgtggagataagattcaagggagacttacgggtgaagaaaatgctcaaagagccaagcacggagaatcaaaacagagttttcaggtagaccgcgttgaggtctccaagcttgaggttgcataaaacctctttgttgtcttaaatgttgatcaacgtacttaagccggcttataatcccaactcttttcccatctgatccatcttgttgttccccaaggcatttacgtagcacgaggatttgtccggatatcgcatcccttaggctacgaaaatggcgagaaattgtttgaagggcgagtgctgtgtatggcttagctgctccataaccagctatcacatcgaacgaggatacaactatctgcatctgctggtaatattgcttatatcttctatccacctttaccaaaatcaagaaatatctcattttcttaaatattcaacatatcctatatataccaaatgtaacaacattatggctgcaatttatttaaatgtatgcttttttgcatttaaaatattataacaaaaggcctataaaaggtaaccatcacatgatcaaattaagaagattaggtctcaagttattacctcatccaacattgacaagagttttgtcaacttgctctgcatttcttgtctctccgactgagagatgtccgcaggaggattcgtgctcgagtcttgagtgctctgattcggttcttgagggttctcattgtttttatctccctctgcctgaaactgctttagagctttctttacattaacagcctcatctagaagctgttgagccgccttaagatactttgagttgggaattgttctcacaacatccaagttctgattcccgcccggaaaactctgtgttgcatactcattgcctctcggcgccatattttgatggcttatctgatgaattcctggaagaatctgtgaaccaaggctaagggacagtccctgaccggtctgaagaatccccgtggcacctgccatcgcgctcattagctggaaaccgttcctgtcactcgcttgatctctccaagaaccgaaatcttgaccaatgttctgcatttgtggaactcccccaaatctggacaatgcttgcctctcttgtgaggctgagacattgttagcttcagttcttctttctctaccggctgattcctcagagtaagaaactatagcattctggatcattgaatctccgggaataaactgtgtttctggataattctccatcgaaatggagtgttctttttggctcacttgagttccatagtcccttgttttctgatcaggtcgtaagaacttaaccttatggaggaaatgcttgacattaaagacagattcaaaaacaattgaaacagagcaggatccatataatcagtgtattgctaagaaacatgtaagatttcaacatgtcttgaatatatggttatgcatgcaattatggagatgcaagccaaatccatagacaacaaaaaaaaaagaagaattgtatagaaataaaaagattagtaaattacctggaaaccaaactgctacttctgatggattgttgaaggagacaacaaaatcttgaaaagaattaaaaattagaaaatgtgaaagattttattgatatcttaaaagaaagaaatcagaaggttacgcctctttctcttggttgtgttttttttttggtatgagatataatttgaattcatcatctcatcaatgtcacacgtgaaagacccatatcatactctccctcctccggaagaaagaaagaatggaaaaaaaaaactttgaatttcttatttaatagtatataatatggtaataagaaaatcaaataaaaactttattttgttttctgaagatattgcttcagaaagccataatctggttggtgcttgaacctcctgcttcttgcttattgattcctggagtcaagtctttggtaaagagaagaaaattattgtgaaaatgttatataaatgtatggttaaggagtttctatctttaacaaccagttggtcgacctaaacccctctctcttcatctttctcccaatcctaaacctaatcttaatcccaatccttatcactctctgtctcttaattacacattgattaaatcaatatcctccatataatcacatttctattttctttacttaagttgaaaagtacaaagaatcaaagatgctactagcttcttgacataaagtcatcttaaatttaaatttaaattcggaagtgttgagttatatagtttattttgcaagtaaacaataaaaatttagcagattagtagatcgtggtgaattttgattaagtatatatatcacaacttgtttttctgatgaataggtcattaacttatcattataaacacataactaatgtttattatgtgagttttgattaagagtattagctactttactttttaagtaagccaagccatgattgtttcttcttccttttctttatatatttctttcatacttttttggtatctgattatacattcgtggactctggtcgtccagaggctatgcaactattaaagaaataagggtcccaaaaaataacaaacacaactttttcttcttttttattttcattttgtaaacaccataagtgctcgttttccccactgagttttttcttttcctggaaacaacttgtagatatttatggattagtactttttctttcaaatgcttctaaacttagcattcactttcttgtttgacagaagtctatatcctaagtcctaagtcctaacttggtaactactataatctttaagactagggtccaatactgattagaggctgagagaatcgttagttccatgggcgagacttgagagcaacaacacaaagataatgagaatgacttagatagtgataggaagttgatcagggtggatttttgaagaaatataaagtattaggtgtagaatgaaaatagaggtatagctgtctgaatagggacagatgttgcagcgagagggtcagagccagagatgccgtaataatacgaacaatgaacatctctgaaggaagagagagagagagagagaaagagagaatctaatgggatacgaagcgagagattttgttggcccaatagagctgtaatgtcccaaagacacatccttttttccataactataacatttttattagaagaccaatttagtttgaaatagattattgtctagttactagtctcttgcatgtgtttttaacacatatagacgatacaaatacattttggcagatattgaaaccaaaaagacggaacaaaattttgaagagaagcaatataagagtttcagacctatatgagaataagaactaatttcaagatcaacgagattatataactactaccatgtagaagtaaagatatacataaaaggtaagaacgaggttctaatgtccaagatcatattcaggcagataactttttttttttttttttttgagcaaatatgggcctaattcctttttttagcatacaatccagatattgagaatgaatcttatttttgaaaatatgggcctcttaccaaagcctatttagtctaaagtgagaattgttaaatgtaaaaaggcatgctcatattaaagaataaaaattcaccaaactctgttgcagaaaagtcttaaccaacataacattaaactgctttcacatagaaagcaaaagtcttaaacaacattacattaactcctttcacataaacagaaaagtcttaaacaacattacataaactcctttcacacagacacaaaaggctctttcttgctcaacgcatcaacactcttagttcaagatttcacctgtaatgggtgaaacatgttggctcgtagacttctgcccatttttcgaaccgaccactaccataggctttggtggtatcaaaccggccctgaaaagcatgctttccactgtgtctgttggttgagctccaacagataaccagtacctgcattattcgagtaccatagagtgaaaatcaatttctttcaacagttgcacaaaataaaaaagaagtttagttagacaccaagaactgtgtggatttagacttttaaaccagtctaatcaaatcaatcatacaagcaaaaccaagcctcacagaaaacttgcaccagatgaaatgcattaggtgtagaaacaaccaaacatgactgagagaagcaaatgaattaaggattgtagccttatgcaaatagagttttggacacagaatcaacagaaagcatctcaatttgtcacaatctaagcaattaggcagcatcattgtggcaagaacaagtttatgaccttgcagaatactaaagagaatgaattaagatgattaaaagacaaacaagaaaacacattcatgaggaataatcaatcatatggataatgtcgagaaagagactctttagtgtttcagtcttatcaaacaatcatgagtttcacatctaactggtgtcctaaaatacttgacacaattatacaagcaaacaggaatatgaagatgatagaacaagtaaaaaaaacatacttgattctgtcgaatttgaggctcactctatccgcatcttctttgcctgaagacgtacaagtagattcatgatagcagagacattaggaagtgttcaattttactgagaattgagaaatgtatatagaggagaaataacgaaccttggagtggatcataaaagcctaacacctcgatttgtttaccgtccctgcgcgatttttcatcggcgacaactacacgatagaagggtcggtgtttacaaccaagacgcgcgagccttatcttcaccgtcatctctgcttggaaattgaggtctgagaagtgagaagaaagaagataagtaaaggtttttatttaagctggtgggttttggctttttccccttatctgtgttctctttcttctgttacgatcgttattgataagatgggccatgttgggccagtttacattttatctctttattcacattaagcccattagatctgctatacgtttcttttcgtgatttgctatacagaagtcacttatctaaaatctcggattatccagaaattccaaaatattcaatcagcttcctgtctttaaggatcttcctaaaagaaattgcttcaaaatgttcaatttgagaacaccagcatcttgttatcgtataggtgtttgactgttagtagagagatatacgaagtccatagtgcatgcaacaagttagatataataaaataaaataaagttatctccagtctcaaccactcagatgtcgaaattcagagtgatgcgtacatcctacgagtatgacttttcaaacaaccaccaacattcacaaaaattgcaaaagcttctacaaagataaccaaattaaccaccaccaaacacaaaccttcttcctgttaaatcattgctacagtttagctgtcgttttcaattctaaggttcacacaagattaaacgagctcatctatcaagagttattatgatccattcatcatcttctccatttcaacactacaatttgctaacccaagattcacaatcacaatctgatcaaccaaattaaagagccatcaaagaaagcgatcagttaatgaacaatgaatcctaaaatgcgagttatttaatttccatcatgtacaatgagatcttcagaagcatccgaattacttactactaaagaggaattgaaattgaactaacaaatttacacatcaattaaacccagaaactgagaaattctaccgagagttcttgaagaaaccatcccatcgccttgtgaaacttcgaaatcccaacacaatcagcacttgaatttcatgccgagaccatgcttaccacgaacgataccaggcttcaaaaacggagatatcttcgaggcatagaccttggcgattgctcttttccccagtttcctcatcctttgtctccccaccttcttactcacgctacgcggaaccaactcttcgtcaagatcatacgaatcgtcgtactcgcgatcttcttcgccgtcgtcattaacactatctccgtacgtaattccaacagaataaccagaacctccaccgagaaacatcatccgctgctgagaccatccaagatcattctcatcaacttcatcgcgaacgacatcatcgccaacatcatcatcaccatccagatccacggcgagatcaccaccgtcagcaataggaattatctcatgcggcggagaaatgacagagggtgcgacaaaggaagcgtcgtcaagagatatgacgtcatcgtcggaaagactatcgacggagaaagaatcgtcggagaactcgccatcagaaggattaacaacttcccagagatcgagatcaacttcttgatcgagaatgagaggagacatggtgataaccctagatcgctgcgccattttcgaaattgtgtgttgtttagaggttgcttctttgatttttcaagactgtttgtttttgataaccagaggaagttaccctattaatagaggcaaaccaccgagtgttatcttgtgctaattggtagttacactgttgaagatacgtatttacaaccagttatatgttgccacgtaaggattattttgccacctcagcgtcgccagaaagtttgccagtaaataaataagtggacatgtaaatttgatgtcgtacatttatgataataaaaactaaaaagataccttttcttccatttttttagaatatacctttttttcctttcaacatctataatttgatcatttctttctaattttgttaatttctgattatattaaacacattttctctgttttctgtttttttaatctaattaacacataagaaaaagggagttaaaaagaataaatgtactctccatttccatttgatgatattctttaagtttcgtggctctttttcaatttcattggctctgacattttgtttttaattaaaaaggaagaaacaaacaaaatgtgaatccttgtgagttggctcactggcaaaaaagaaagaaaaaaaattcagaagcctttgttttcatcgatgaataaattaacaaacaaaactaaaaaataggatattcgctggccgaatcgcgtcgatccacatcgcaggtgagggttcctgcaatttatccctcgtggtctctgaatctcagatcgtcgtcaacgaatcctccattttctgaatcaaaattttctggaaacaatggggagcttggggacgatgctgagatatccggatgacatatatccgctcctgaagatgaaacgagcgattgagaaagcggagaagcagatccctcctgagccacactggggtttctgctattcgatgctccacaaggtttctcgaagcttttctctcgttattcagcaactcaacaccgagctccgtaacgccgtaagttcttctcgctctcggcctctgtgttggtcaacgtcttcaatttttggaggaatccagatatctgacactcatttattgttgacgtcggcgatgattggtttcttctgtagaatccgatggctttgagagtttgtgttccacttagttcaatatgagttatgcagattcttattaattgattctgcagtttcttctgagctgcagtaaatgcagattgtattttagtgaactatgattcgatatgtttccacatataaaatggtgtgtgtgttcgatcacatgctatcagtgtagctgtgttcagtcttgcagcattttcttattcaatttttttttttttttcattttgtaggtgtgtgtgttctacttggttctccgagctcttgatactgttggttagtgtctcttaactttgctttcaagattaccttgatacgatgaggcttctccaaaatctgctatatttctgttttgaaatgcttttatgttagagccatctttcttcttcgtgcttctgctgctaatattattttttgtacgacagaggatgatactagcataccaactgatgaaaaggttcccatcctgatagcttttcaccggcacatatacgatactgattggcattattcatgcaagtctgaagagtctcttaacatcttcatctttcacattccattaatctttgactgtctaactgacaaattttacttgttcaactttaggtggtacgaaggagtacaagattctaatggaccaatttcaccatgtttctgcagcttttttggaacttgaaaaagggttagttctaatatttgctatacgcacttctgttctactttatagattttttctgctcatgttgtctcacgtttattgagttactcaatttgttgatactcttatctgctttctgacaatactaattacctcatttttaacatatgcttttgtatatgaaggtatcaagaggctatcgaggaaattactagaagaatgggtgcagggatggccaagtttatctgccaagaggtctgtgatacagagcagttttcgtagttggatttgtttttgagttatggtgacaaaatgtcttgagctggactgaggtctctgtttcagttagaattctgtcatgcttaatcttttcataagtcataaatattggaatgcctcatgtgatgcttctatgatatgacaagtagtaattgtattgaaagtaccaaaacttatttataagttttgtaaagaaatgaaatcatttgtttaccgatccagttgatccagttttcactattatacacaggtagaaactgttgatgactacgatgaatactgccactatgttgctgggcttgttggtttaggtttgtcgaaactcttcctcgctgcaggatcagaggttttgacaccagattgggaggcgatttccaattcaatgggtttatttctgcaggtacaacaatgtattttgaggtgtacaatgtttcttcttcctcaaatcttttgcaatttcggacaatttctatcattgaatgatttataacactggtcttatttgcagaaaacaaacattatcagagattatcttgaggacattaatgagataccaaaatcccgcatgttttggcctcgcgagatttggggcaaatatgctgacaagcttgaggtgcatacataccactctcaagctctcatcttaggtctgatgttacccatattgactattttctgacagtgcctttttggtgatttgtaaattgtaatgtaggatttaaaatacgaggagaacacaaacaaatccgtacagtgcttaaatgaaatggttaccaatgcgttgatgcatattgaagattgcctgaaatacatggtttccttgcgtgatccttccatatttcggttctgtgccatccctcaggttagagaacgaaatatcacataattgttaagtctttaaacttcacattgagaactgtttatattgttttcctcttcatatggaattaggtattctcctctttaactacgtctgcactaatatagaatgccttagaagttaatattgctttgcttgggtgtattttcttgattagatcatggcgattggaacacttgcattatgctataacaatgaacaagtattcagaggcgttgtgaaactgaggcgaggtaagatgttaagccttagaaattatgtaggccaatccctaatttctatttatgagaaaggaaaacccgttatcttttattatcaacgagcttgagaacgtgtagtagctagccttattatctgaaggctaatatcgctgaacaactatctattgtttaggtcttactgctaaagtcattgatcgtacaaagacaatggctgatgtctatggtgctttctatgatttttcctgcatgctgaagacaaaggtagtcatcagttccatgtttgtgattagtttttcactcagtttctgtttaaagaaaagaatcatatgtgaattttctatcgacatatatgacataggttgacaagaacgatccaaatgccagtaagacactaaaccgacttgaagccgttcagaaactctgcagagacgctggagttcttcaaaacaggtacagtcttttatttaatcccaaaagctgcattaaatcctctcactaagaaactggtcacaagcacctataactaatcttccaagtattctagaataggatgatattatcataatctttctttctggttgggtttctgctgaatcattgtgtctcttcctttcagaaaatcttatgttaatgacaaaggacaaccaaacagtgtctttgtaagttacatagtttcccttttccatataagtatctcatttttaaaaaaatacataaaacttatattctatatattctacccgaaaatgcagattataatggttgtgattctactggccatagtctttgcatatctcagagcaaactgagtgatccatgtaagcgagtctgattgtatcaccatcattcaagatgttcagagcaaatttgagtgatgaagtaatctaggttgattcttattcacgccactgaatcctaagcaagattgtttccagaacaaacagagtttaagcatggtttagtctaaaaccatggattctattttagttactaccttcgttatctaaacgtgcatttgttcatctatttttattccttgtgtttaaagttctttctttgtttagttgcgtttcttctttcgttctcttttggcatgttttaagattaattttaccaacaacaaccagataaaatccaaatgcaataagaaagaaagaaaaatgacaatcgaagactgaaatctcttctttctttttaggtcggcaaaaaagtctcttcaaagtatataaaacaaaaacatgaatcaagattagatttatctttttaacgttaagtgtgtagcacgcggcaagcaatttaaatgcaaaaatagaacatagttggaccagtaacatgtatcaccgtggcaagcttaagagcaaggctaatagcgattctgtggaagtgcaaggtatgcaaaggccgtggggtctattgatttattaatagggccatatttgttgaattatagcacatggcctaccattttgttccccaacaaatcctccattgtttcaaacgagttctgttttttctcctctgtttctaaaaatgggaagcttgagtacgattttgagacatccggatgagttatatccgctcttgaagttgaaacttgcgattacgaaagctcagaagcagattccacttgagccacacttagctttctgttattcaattcttcacaaagtttctaaaagcttttctcttgttattcaacaacttggcaccgagcttcgtaacgccgtatgtttttttttttttctatatatagctatgttacatttttagttacagcaatatttcaaacattttctttgtttttattaggtgtgtgtgttctacttgattctccgagctcttgatactgttggttagtgcttcataactatagtatccatatattacctttgatttgatgagtcttcttctccaagtcttttggttttttaattcttgatgatagaaaaagttagtatcatcttctcatatttttgctactacagaggatgacacaagcgtaccagtggagatcaaagttccaattctgatagctttccaccgtcatatatacgatggtgactggcatttttcatgtaagtaataagaagagacttttcacatcttaacctttcagatgaaattcttttcttttaacttaattactcttcattcaattttaggtggtacaaaagagtataaacttctaatggaccaatttcaccatgtttctgcagcttttctgaaacttgaaaaagggttaatttgctatatacaaattctgttctgttttttataaatgttcttgctcatttattgattgatctactgaatttggtgatactaattttatgttttgttttactaacttatatatacaaaaaaggtatcaagaggctattgaagatataactaaaagaatgggtgcaggaatggccaagttcatttgcaaggaggtttgtgatacacagaatctttgtgatgtagattttatttttttcagttttgaagttaagcatcaaaacttctgaagagctgaacttatttgtgtattggacaggtagaaacaattgatgactatgatgaatactgccattatgctgcaggacttgttggtttaggtttgtcaaaaatcttcattgcttcggaattagaaatactgactccagattggaagcagatttcaaattctacaggtttatttctgcaggtattcattacaatggtataatattgacatgtacaaggtttcttcctcaaatgttttttgcaatctttgaagtcttttgtatgttatatcttatttgctagaaaacaaacattatcaaagattatcttgaagacattaatgagagaccaaagtcgcgcatgttttggcctcgtgagatttggggaaaatatgttgacaaacttgaggtacataaacttcactctcaagctctcatctgaagatcttatattataaaaaacaaatgtgactctttctaataatgtaggacttcaaaaatgaggagaaagctacaaaagcagtgcagtgtttgaatgaaatggtcactaatgcattgaatcatgttgaagattgtttgaaatccttggcttcactgcgtgatcctgcaatatttcagtcttgcgccatccctcaggttagagaaaaaaaacaaaattcatcccctctaatctaatattttactctgcttcaaatatcaaccagagaaatgtttatgttgatgtgacattttctgtttatttggattagatcgtggcgattggaacacttgcgttatgctataacaatgtacaagtgtttagaggtgtcgtgagattgagacgaggtaaaatgttttatcttgggattggttttcaatctgacacaatttcatcatctgaatcccaaggctattaacttgtgagttatgttctatgtgaaagattatttattgacaaacaattatattgtgtaggtctaatagctaaagtcattgatcgcacaaagacaatggatgatgtctacggtgcgttctatgatttttcttgcatgctacaaacaaaggtatgtatacgttactacatttcctgtgtatagtgttggtaactagaagatgagattgtatgtgttttaatattaggttgacaataacgatccaaatgctatgaaaacattaaaccgactcgaaaccatcaagaaattttgcaaagaaaatggaggacttcacaaaaggtagactgttttttttttggtttcttctagttgttctatcaaataaaagaagatccaaagtcacttgaccaatcttgtcatgttcatttattacgagaatgatcttatatgttttggttgaggttctaatgaatctttttctgttttttcttcttaatgctggtcagaaaatcttatgttaacgatgaaacacaatccaaggctatctttgtaagttcagatttgtatcagacttccatagaaattctttcatatataggattaagttacttatcctcctcctctaatctactcctgaaattgcaggttgtaatgtttgtgcttctactggccatagtcgttgtatatctcaaagcaaaccaatgtaagtgactctgattttgtgaagtcatcatgaacataatttctagcttttttgaaatgtttgatcaaatcttgaattgatagtctattcaagattgtctacgacttcaaccgtcaaaatgttctgttctttctctcttccttttcagttgttctgttttctcatttttatgaagttataaattcaaccatcatgctcataatgttggttttccggaattcttactgaagtttaagtttgataaattgcagagtgatatttaaataatgcactaacacacttaagcgtatgatcatttgcgtaaatttgaaaaataatcacttcttcatcaagtttcaaggttatcaaatgaaagtaatttggacaaaaaatcacaaataagacccgaaaagaagtgtattcacatacgaagataaacagagatgtggcgtttacatcaaatgacaaagaaaatatccaaatccaatatgaagataatacctaaaaactgaactcttgttcaagtggcatcactattagattcagaacatggcagaaacccgcatcaactctgatcctcatgcatatggacttctgttttagcccgtgaatcttttctttctttttcttctacagaacacacaactcttctacagaagcaactcaattccataaccaacaaagaaccataatgttaccttcaaattctcagaaaacttcggacactttgctagcaagaactcgttcccgtctttcaatgtacccataagggaaccaaccagctttgcctttgcattcaccttcggcccatccactgcctgtaacctggcaatgacaaatagagaagtggtatatcaaacaaacactactgaataaccgtattggttaatatgaattaaaggagactttgttggtttttctcatgtgggagttggtttactatcgaacctttctaacaacaacgtattcaccagttgataagctgagctcgacatctgtcacaccgtgatatgggaacaagacctgaaaacgtttttaaaaagggaaataatatgttataatggcacatcaatgaggaccaaaaggaatctagatgtagcctgtctttttggttctctaatcaaaaacagtttatgtacatccagttcatacgtggagaacttataatccaattatctctttgatacttttactaccaatataaaccaaagttttaactctaaaaggaaggtattaaagactgaaaagcatacctctcctaagaagtaacccatgctatctgttgacgtgtcatgcatctgagatgcaaacactccattagcttcctcatatgatggaggtggcggcatactgtctgcgcttgagggagtagagggagcttctatacgttgcctctcagataccatctgtaggttcaagaatgttccattttgtccttagttgactcatataatgatgaactgattgttcgacaagaatactattatcacaggaaactgaaagctgtaaaactaatgcacaccaacctctccttcgagctgatcaagtatttggaggactctttgatggtaggcgcgttcagattcaacctgtgatcaggaatgaaaaatacagttgttacatatgggtaagtaaatcaaagttgacctagaaatggatcttgtaaccaatcgcactaccattgaaagaagtcgttcaagagtcaatttctgttgttgatcttcaacggaagctaaagcagaagcagcttctttccccaatattgtcatatttgattttaggtcgtgaagttttgcttcagcagattccagtttcatcaagatgtcaggattaccttgagactctctcgcctttgcttggcgtctggcaacttctgtagcctgtttggattaaagcaggcgcataagtaaagttctatcatgcgaataataaaatgactagttcttggaagaggaaaaaacccatattctactaacggtaattaaatagcttcatggtattatctttcaccgtacctgagcttcagcttcttggcgcattctgtcatagcgttgagcaagatgtctagcatcctccaatggagctcccaaaaccattgcccgtaatggctcagcaacctaacaaattcaggattgacatatgattgtagtagccaaaccgcaataaagaaagaaccaagtgaacaccatgacattaattgacttttaaagagtatgtaacaaattattccagataaaagaaatagatcttcccacaaatggcagtcattccactaacaatggcaggaaagtaattatttgtgtagttatattgcatgcaacagatatgtgctattgcttaacactttgatggaagatgaaaaagacaaacctgtgtaccaagagccttcaacatatttccacgttccttctccatttgtgctcgagcacgcccatagttcagtgcagcccgtgttaatacgttaccattcgtacatgtattctctgaaccatatttcctgctatcctcagacaatttcgtacctgatgaaaaatgagtgcaaaatgaaagacaggcctgtgagccaattcaagtctataacagacataaaaaaatacaataagttaaaactcaaagggtcaaaaaaatcacctatttcaacttgttttgaccctgtaactatataaccttccacaccacgaacaatatctctttggtaatgctgaaaacgaagaacgaatgagtccaaaatcaatagtaatcaaaacttcaaactagtcaaaagcttaagaaaaacaaccttagcagcacgagtggatatgtaaagcttttctagcttctgatgctgattgagttctgcttcatcagctaaaccagagccatatccccctcctccaaattgcttaaagacagccttaaccattccacaaaaactaagtcagtgtactaattaacctcaaactcaagaacacaaacacccaatctcatggtaacttggaacatgtagcaccaatatgttaatctatcactacaacatctttcaaatcccagctcacaaaactgaaacggattctcacataaaagtatcctaaattaccctttgacaaaaacttctccaattctacagaattttacccaatctcacatcgaatcaacgtattaatcacactcagatccaattactcattaagtcaaaaaccatcgatccgaaaaaaagctagcccctttatcatcatcacattattgattcattcaccagaaaccaacgactcaacggaatcacaagagaagataaaaacaaaatctagaaaaaaagatacagaatcgggatctaagcaaatgggcaaaccaaaagttaagaactttaacctgctgctgtctcgcaacttgttctctcaacctgctagcttgttttctaattgcatccattcttcaccagatcaagagctattcacaaatcttcttccttctctctttctcctattcttccactttacgagttccctccgattacttggaacaactcagagaagacagagattcgaaatcgtcaaaaatggcgttgagctcagaacaaatttctctgctttcgaacacgaagaaatcaaagatagacaaagtctctgtttcaccaagaaggttaatattgggctctctataatagcccattgggcttgaaaataaaatccagtaagctataaatttatatcatctcaaaataactaaaaagacgcaaaaccctagacatatataaatgaaaagccagtgaattagggctttctctcacttgttgaagccgcttcttcttcttcctcactgtagctcgtcgtcgctacaccatctagaagacccttaaccatggctgtcgggtaaatctctcttcgcatctctatattccttgcttgtttctccagtctctgtattggaatctctcatttgatcatagcttcgagtatatcatgttctgatttaaggtttttgtttgatcatataggaagaacaagaggatttcaaagggtaggaaaggaggaaagaagaaggcgtaagtaacctatgtcctgaataaaattctcagatttctaattgtaatctgtatatagtgttcgtgattgaattgttatggatggtgcagtgttgatcccttctccaagaaggattggtatgacgtgaaggctcctggttctttcacgaacaggaatgttgggaagactcttgtttccaggactcagggtaccaaggtaatgtcttatgtctttctattactatactggagaaaggttagagctttctaggttttgagtctatagttatctcatggcataggtcatttgctgaatgtgaggtgtagagatgggcatttgctcttggtggctttcattattgaagtaataggaattgcatttgtgatagaaaagagcgtgttcctcttcgacaaatctgactttgttatctgggctatctcttaatttaaacagattgcctctgagggactgaaacacagggtgtttgaggtttctcttgctgatctacaaaatgatgaggataatgcctacaggaagatccgtcttagagctgaagatgttcagggaaggaatgtgttgacccagttctgggtaagataaagaccactcctttactggcatattgatacagagtgcggtttttaatctgtgatctctgtagggtatggatttcacaaccgacaagctaaggtcattggtgaagaagtggcagactttgattgaagcccatgtcgatgtgaaaaccacagacggctacaccttgaggatgttctgcatcgccttcacaaagagacgtgctaaccaagtgaagcgtacctgttacgctcaatccagccaaatccgtcaggttacaacattatcataccatgtgcttactatttggctttctgtaaacagaagattaacattttccttgtaaatgtttcttgattcttgtagatccgcagaaagatgagtgagattatggtgaaggaggcttcatcttgtgacctcaaggagctagtggccaagttcatcccagaggccattggaagagagattgagaaggcaacacagggcatctacccgttgcagaatgtgttcatccgtaaagtgaagatcctaaaggctcccaagtttgaccttggaaagctcatggaggtagattgaagtcacattaatttcatcattgatgcactagtcttggttccaaggatgtaatgaaatctaactctttttgttttggtttatctttaggtgcatggagattacacagcagaggatgttggtgtgaaggtagacaggccagctgatgagacaatggttgaggagccaacagaaatcatcggagcttaggggattatagatttgtttgttttttcgctggcaaaaaaaaaaaagaacctaatgttatgtcgccattggtgtgactggttttggactcgtttttgatggatgatctttattgtttatcatgttttaccttttttattatatgtcttagttcttcacttcttcttttcatttttggaatctggatttgctctctcttcaaatatttaaatggacaagattaggatttacatcaaagtcaaactgtaaaaaggttaaaacttttgagaagaagtaatcgaaataaaataaaataatttgcactaccccgatttacctcttcaattattcgacaaactagcaatttccgcatctcttacacaattctttttgtataatttgagttatataatttgttgattcgaataatgatcagttgttacttattaggtcctggtaagacattgagattttgttacattttattctgactatggtccgtgatgaatgattacgtattcaaatggattatgcttttgttaaaacgcaatgattatgttctgtgttaactttttttttcgtctctcgttttcgttttgtcttatttttatgtgaaagaaaaaatcatttggatacatatcttttttttcctcatttattttacttagtgataatatagcaactaaatttctaatatgcgatttgatgtcattgattcgaacaatacatttgcatcacaatgatagattggattttaggtaaatctattgaagtttttaatgttttattaggtaaaactttataataggttagatattattctacatttttttgcctagagatattgcgaatacaagaatcattaactcaaaaaccacttgcattgattacaggacttgaaactctctcccattttcttgacgtcaaaaatgataaaaactactccatgttttataaaagataagaaaagggaaagagtgatgatgatgatgcgtcgtgaatcgacgaataagaggaaaatgtgacacgttctcttttcccccattacgctctcgtcactcctcaccagcctgctcccttttcaaacttttctgttttccccctaattttacgaaaatcaaaataagttaaaatggaatatataccaactttcaaaataaaaaatcttcaaaacatatcaatgtgtatatagcgacacgagtataaagtcccacacacacaataaactaaggttggcagaaaaaaatataccaccaaactaagtgatcgtaactactctttcgaaaaaaccaaaccctaatcttgttttaagactaagaccaattatactaaaaaggaaagatttcataattggaaggaaagtagtatactttgatagttattaaaaataaaaataaaatgttcaaaagatttggctatagtggttgctttggtgaactccactccaacggtggtttgcaccatctccattcccatcactaccaaaaacccacacttctttttttttttctttctttgcgtaatgtgggttaaaaggaactttatttatgctcttgtttttgggtgtttgaatcgaatttgaaatcaacatttgtttttattttattttatttataaaaaatttgtgtgtttggaaagttgtaaaaggttcaaggggtttcggtagagataatcttaatttggtttttaacacatcgacttaatccaaattgacatctctaataggattcagatattattatatctatcctgtaattttccataaaatgtaatcaatatgagatttggtattagggtatgaacttaatgtatcttatcggaaaaatgttttctcctttgggttacctaatctcatatctaatgccaaaaatagcataacatagaagattggctagatcatatgtggacatcaccgactgcatggcaatgtttgttttataatcgcgtaatacttgtttgtcatttgccagttctcataacaaatgcgaaaataatcttatatatccttggtaatgcatgtaaaaattaattttgcttcatgaattattttatattcttaaattcatgactgaatgaaatttcttatctatattcagacgcagtatatgggacatctaactcaattttaagattctagattggatgattttatgttgtttgacaaaaaaaataaaaaaattggatgctttctataaatttcatgctttgtattttattaaattttgagctattattgtattagtatagaattgagctattattggattgttcttatcactttgttaatttcatttggtcctttagttagatatcaaaatttttaaaattttcaaaaaagatcacaggtttaatcggtgactttcaataatactagttttaacacgacaagcaaaatattgtgcatgtatactattaaattgttaatgttagtactatgaaataacaaattcatcaccattgtaaaacttaatgtttcaacatttcctaagaagaaatggtcaacccttttgacaagacaagctaaattggcatggacaaggaacacagcatcatgatataacccttcacaataattataataaaaacaatcaaatttgtattgaataatgcgaaacagacctgacttatcaatatgtgacgaaggataagcccacgccaaaaacatccacgtaaagaactcattgattaggtccaaagaaatttggagaaaataaaacaaatcctgacgtgaaaataaaaagaaatcatcacttttttttatctcttttattttcttctaaatacaaaaattgaataatcaattaatttttcatgtatgcaaacaatttcttaacaagtcttgtgagctttaaatgaaatatagaggcgagtggattagacttgatcctgatcttttattaagctgatccatattttacattgaaataaaggacacaccgtttaacacgaaaatgaagagacaaataaagaagaggaaaagcattgattctgaaataccaatatagtatcattcgtgaaagaagattttgtaatattccacaaacttagaaattaggggaaaagaaaacaaaaaaaaaagataggaaaaaagagctttaacttttggaattggaagaagcacaaacacacacaaaaaaaaagtctctgttttaccttttaaccccttcaagaatcctcctttaagttcagtgccctcttacttttctcttatcggaatatctctcttcctctgtttcttcgccattctctcagcttttctccttcttcttcgtctttgtcaggtaaagagatacgatgagcatatcccacatacctctctcctcttctcatctttttagtttctcgaaagtttgcatgcgccgactttgttataggttataaactttagttttaagcctattttcgtatgtttatggttgttgtaatagttgagaattcagagtatgtcaagtgaaacttaaaaagaattctatatgtatgtgtgtatgtgttaaagagtgaatggagctgtggacagaagctagagccttaaaggcaagtctaagaggagaatctactatatctctcaaacatcaccaagtgattgtgtcggaagatttaagccgaacttcttccttgccggaagatttctccgttgagtgtttcctcgatttctcagaaggtcaaaaagaagaagaagaagaagttgtctctgtttcttcttcacaagagcaagaagaacaagaacatgattgtgtctttagttcacaaccttgcatctttgatcaacttccttctttgccggtaaatttctaaacttctttataccttttctttctcttcttataatcgaaagattttaagttatatttttcttgatttctttttttttgggatatttttaggatgaagatgtggaagagcttgaatgggtatctcgtgttgtggatgattgttcatcaccagaagtttcacttctcttaacacaaacacataaaaccaaaccaagcttctcaagaattccggttaaaccaagaaccaaacggtctcggaacagtttaaccggtagtcgtgtttggccactcgtttcaaccaatcatcaacatgcagcaacagagcagttgaggaagaagaaacaagaaactgtccttgtgtttcaacgaagatgcagccattgtggcacaaacaacacaccacagtggagaaccggtccggtcggtccaaaaaccttatgtaatgcatgtggagtccggtttaagtctggtaggctctgcccggaatacagaccggcggatagtccgacgttctcgaatgagattcactcaaatcttcataggaaggttctggaattaagaaagagtaaagagttgggtgaagaaacaggtgaagctagtactaaatcagacccagtcaaatttggcagcaagtggtagataagacttaggtaaaacctactttttgtaacattatctgtagtgttgtaatttaacaacttgcttcttaacattttgaaactgtttcaggaactagtcttaagtaaacaatggttttctataaacaaaattaatgtgtgtttttaatgatgtaagaccaccaccaccactactagtacttggaatgattttggtccatgtgtagtggcttaaatagactttttgagtaaacaaaatgccaaatggaagaatcatcttgaaaactccaacattactatatagtatatatattattgataaatcttgagattcgacatatttatttgataatcgatgcaagcataattaatttagacatttattcagcaaaaaaaaaaattaggtatgtaattaatttatacatatcgaattactaaaggttaattttcaggctaatcgtagataaacgatttcgttaaatccccatgaaagtaaatttaggcaaatgtatgatgctatgtctgccgcataattgtttaatctcaccatttgcatatcaatctttaagggaaacatccttttaatgtgtttatgtggccttgtctccgttttattgctactttgtgtcatactcaaaataagttgactataaagctacatgtatctacacaaaaagagagtttatttagtatgcttgcttgggaataagcaggagacaaaagaaaacatccaagttaaaacatgaagcagcaaaagagagtgttcatccacaaaatgtgagaggtttcttagcatataaagatattgatataaatctaatcattctcgtaagaacaagaacaaaatgaaagagccaaaaactaaacccatctttcactttttagatacgagaagtgccacgatcttttgaagatcttcctgattttgctttgcaacctttgtaatctcatcaagccggtgcatgtagagagcatttttggcactcatctctttcttaaactcatggataaccacactcttcttgtttatctccaaccacaagtcggctaggcttctatccgttttagaggtgttccataacccccaaacgaaggagatgcaagtaagagagccaaagaaacaccaagtgagaaacgaggtataggtttgtgagaaatctctggaggccttacctaggcaagtgtactccacaaaagtttgatgctccttccctttagctttagccagtagttgaagcttcttagcttgagatatgttgataaatttgagaaacttccatttgcgtttgacgctcctctcgcatgatctcttgaccccgatgtaatgaagcctagttgctaaaagtttaaaaaccttgaaccatgtcgattgtggatcgtcattaggtgtgtaatcatcatcgtcattattgctggatccatcatcactctttttcccatcgccggatccatcattgctctttttctcaccggatccatcatcatcactctttttttcaccagatccatcattagaactccttacaattttataatactaaattttgaataaattaaagtttaaattttttgttgaatccttatattttttattgttcaatggtggaattcttaagtggatttctttaaaaaaataaatatataatattataatatatttcaccaaacataataattattagaaatattaaaattctaaacatacataatataaaaacaataaaaaactataaaaatgaaaaacttgaaccacgataagtgttaaacttgattcgtgcaaaatttgtgtcatatatattcaaccaaatcagctctttattgttcacgcttagtctaatcacgaaatcaagttgagtaatccttaaaagaaaaaaaaaaagtttgataattttgaagtttagattttttgttgagtacttataatttttattatcgaatggtggagtaagtgaattttttttgggaaaagtgagtgtataatgaaaagacagatacgtagtgttaaataatttatttctttgactgtatcaacagtccgttgtagtctagctggtcaggatactcggctctcacccgagagacccgggttcgagtcccggcaacggagtttgtttttacctccttctttttttaatgggccgatttttgtcttaattcaagctctaatcaaaggcccatttgaaattttcttctcggtccctccaacggaaacagaaggttttccactgtaaaagatgaaaagagtgtagagagactcgaaatcaatcggaatcaggaagacaaaaatgagcggagtttcgacggcggcgtactttgcgcggcgagcggctcagaaggagagagttcgaatcctttaccgtcgtgcccttaaggatactctcaattgggctgttcatcgccatatcttctaccgtgacgtaagtcttttcctcagatctccgaatcggacatggactttttgattttttaccgatctctcattttggtttttgattccatttgatcttcgttacctttcaggcttctgatctgcgtgagaagttcaatgtcaaccaagatgtggtttgttctcttctcctttcattttgcatacctctctctttgccttgtttcattgttgattgttaaaatgtttgataatccgtagaaatggaaattgatattgttttgtttcatttaatttggtagagagactttagagatatgatgagcataatcatctaagtgtgtgtggatgagaaaattggggacttttgttgtggaaacacctctactggattttctcttgctaagttgtttaggttcttcgctattataaaaaaaaagtgaataggtaggagatatgggaaatagaattgctgttcaatgatttgtgtgttgagtttgcatattccactcattatcattccaatattgaattcaagtaaaggatgtacctttttaaactggagttgaaaatcatattatgaaattcttttttcaactactgccacaatgtacattgagtctctcatctttggttgtctcttgatatggtccttttgtaggagaattcaaagttagtaggatttaagcttttagagcattgttaagctagatccaaaacatagaaaataagagtgaaatgaaatagctaatgaaagctttttatagtgcaaaggaaataaaattattagtctttagattgttaacaggaacaaattcattttagatttgatatttcataagggaaagaaggagagatgcaatcctcatcttgctaagaaacctgattacatgggcttatgaacttgtatttggtcattcttgggctttatcaatgctctaatacctttgattggggtatttgtaggaggatgtcgacagaatcgacaaactgattgctcatggtgaagcagaatacaacaaatggcggcaccctgatccttatatcggtaagcgtctcgacccatatatgaatcgtggtagatttgatagcaagaactctttgtcaggcttatggaattcctcgtagattagataacatgagtagtccacttcccgaattggacactaaatgacacacattttctgttgtagttccatgggctcctggtggctcaaagttctgtagaaacccgactccgcctgctggggtaattttttgttctcaacacttatcacttttttcttcatgatctacctttcttcttcgcaactgctgatcttttattgtgtgtgtgactgatgcagattgagattgtgtacaactatggtctagaagacaacccataataaacctagcttccatattgtcacacccatcaataaagtaagttagagaattatcaaatgctaaggctgtatccacaatagtttcccttcattctagtaaatgtccctcattatatcgaaatgtcgcagtagaaccactaagacgttatgtttcaatggtgtttgttatatattgcagattgaagcatccggtggctatggtttggagataaattaaactgactttcaaggttgaaactttgagggaccaattgttattttcaaagatgtttcgttccagtaagacaattcttgtttcaacttggtttatatctttcatctaaaacatttccggctgctcttgagtcatggatgttcgaccatgaaaacttgtcagtaaaacaacaaaattgtggtctttttttcttttttcaaccttggctgcaaatcgatactggtctttgaggaggctatatcttgagaaggttttaatcgaacaacatctcatctcactctccctttacacgtcattgcgtctaaaaagggttttgttcttctgtctctgttgttttgataatcagctttgtcttccttaataattgtggaaacgcagcgtataaacacattccaaatctgttagagacacaatttgaagtcttgtaccacatattggtaattttgggtagataggaatcgattatccaacttgagaatcgggaccgatccctgcaaattgatgtcgtcacgtaacacttggcattttcggtgaggaccatggtcgggaaaagtaaatgccgattccaaacccaaattgcgaaattcaaagcaaagatgttataggattggattctaccaaccttagcccctttttcacttacattgtaaaagaaacggctacaattttgcaaacgaaaatagagagcttgaagcaaagattagtagaaacaagattgaacataatgttttgcagtttttggttgaattgtgaatcacttaagctttgacgtttaaaggttttagatttcgaggaaggtttaatgattctctcatcattctaagaaagaatgataaatatatttataagttatgaatacaatatatgttaataaaaacacaccaaaaagtgaaacgatcatctacaaattgaccgacatgaagcttagtattaccatattcgtcaaacttttcacctttaaatttgaatccttcctttttctctacagtattatatgcttttttttccacgatcgccaacaaccggacaagtataatggaaacaacaacacgttatctcgaatatgcataatgtcaaaaaattacctccacgtaaaacgaaacctgttgcacaccaagccgtgacttaaaaataaagaccactattcgataatgcaagatacggctaaaaacactcaatcatgagccacattatcaaataatcatttaaccgcttcccaaagcctaacagataaaagatgtcagtcgataaaacacataaatgtcagaatctaacatctccatgtgatacttgtgtgtgttgtcacattcacttcttcactcatcataacaacatcggcccacgacgccggttataagatgcggcgaacctgatccgttaaaaataccactagacaattttttatattttttatttaaaattattatagagtgaaaactgaaaacaacttattcacgattcatcgtttatttatttcttttatgtggtcaaacttttttattattattattataaataaaacgggaacggctacatttgaagggggaaataaatataaaaagatccgaatttcacaaaaggctttcataattcggatcttcttacttaaaaccttaaacaacgatggatcatggatctcatcatgttcttatttaataacttttatttaaagaaatcgtacaatgacgattttacgataatataatgcaacaacaaaccacacgacgaccaccttttctcacgcagagatgtaatcgtagacgtcttcgtcgcagtagtaaaacccaaggttactgatcgcagctgaaagagagttacttggcgatgcctgctcagttgcaagatacggcatgttgtggaacgaacggtcgagagaagccgccacattgttgaactcatcatcttcttcttcctcttcattttcaccttcgctaccacctttggtatgcatcatttcctctgctcggtgctttagggtctgaaacattagctccggctcatgctgcattgctcggagaacatccgctgaggactgaccaggcaccgctcgggtcactgcaaagctgtgtggtccatcgctctgggagacccggacaacgcttggtccaccaaacagattgtggactccaccgagagcctcctcgtaagcccctccaaggaacatacccaaaaagtaccttcctccactgccattcttgtccagctcgtgcaacggcaagctggattcaccgcctatgaacttgttgatcttcccgtcactatcacacgttaaatctgaaaggattccgcgagccccgggcctttgatcgagcttatggataggaactatagggaacagctgatcaatcccccagagatcaggaatcgaagtgaaaactgatagattgatattgtaagtatgaaccggatccgatgcgcctatagccttcaacacccactcgcataaaccatcaacagaagctaactgctcgatgctcaaaacaccttctttgaaaccttcaacacacctctgcttcagctgatcgacataaagaaggcagctttcgtggtctccacgcatcacagcagcataaagatcctcataattggctcgagcttcctcattaccttcaagcaggaactgaatatcgccgggagttgcttgatgaaccattggtttatctgctgaaacagcttcaaagatcagcacagaatgatgagagactatcgctctaccgctttcgctgcatatcaccggatgtttcactgagctccggtcacacacaacccgaacagaagctacaacagcttcagcatactcctcgagactataagcaacagagagatccgattctccagatttagacccgtcgtagtcaatccccaaaccaccaccgatatcaataactttcatatgtgcaccaagacgcacaagttcacagtaaagctgagcagcctcggcgacaccatcagagagcaacgaagtcgacggaatctgtgaaccaatatgaaaatgcagaagctggagacaatcaagcataccagattgacgcagcttcctcaccacacgaacaatctgagtagtagtcaatccaaatttacccttttcaccagaagttgatccgaaatgacccgaatgcttagtcctcagcttagcccttaacccaatgacaggcctcacattcatcttctggctcagctcaataaccagatcaagctcttcttcttgctcaagcacaatcacagtattcaacgccagttttctcccaagcagagccaatgatatatactcagcatctttgaatccattgcacacaagaaaggcatcagggctacctttacacaagcagctcatagcaagaaggatctcaggtttagaaccagcttctaatccaaatcgaaacgaagatccaaacttgacaatatcttcaacaacgaatcgatcttggttacatttcaccggataaacaccttggtaatgagaatcatatccttgacttttaatcgcgtaatcaaacgcagattgaagacactcgagacggttcttcaacacatcagggaaacgaacgatcaacggaagctgcaatcctaaaccaccggaagatttcggacccgtcaccttcttaacgattttgagcaaatcgatgtcttggtgaggcaaagtttcagagccatgaggacgaacagagatgttaccagacgaattggctatgaaataaggggctccccatccatcgattcgatagagagacgatgagagcgacggagaccaacggtcaacaacaacggcggcggaagttggtgatgacgccgggataaaaacatcaccggcggtgtcggagaaggcgtaggcaggaggtacaaaggacgtatcaacgcaagctaaagcaggcatctttatcttcaccctcttatcagcaaacgatcaacaatctcactttacagaaattctcgaacaaaacaaaaactttcgagagaagaacagagcaaaaactgaaaaatcaaacctttttttttctaatttcccagaatttgtaaaggtaggggtttaaaaaccgccgaggccggagcctcggctaccccctcaggagaagacagaagatgaatctatccccgccgtgaaaaccacctctcgcagcccttcccgatccgagaatctccacgatgaataattcagaagaaactcgaaaaaaaggaaattttccaaatctgaacccaacaacaacaaaaattctctaacagattctcccaaccatgcagaagtggatttgtttatgaagaatttgaggtggtgaggaattaaaaagaggaaaaggagagaatgtgaaggaattctggggaaaatgcaagaaaaaacagagacggaaacctagcggaaaagacggaaatgaagaagaagaagaagagaaggcgtgagattgatgaaggctattggcacttgcttatatagggactagggaatcaggaaccaacgtgagaaggttatgactgaggcaagtttgatttgggccatggggcccatttacgattacgttttatacttttctttttctttcaacattgtattttttccctctattaaaagaaatttaccctacatttctttaggtgctttgctccaacaaaaaaaaaaaaaaaagatttttgttggagaacgatttttatttagagaacaattttaaaataacctttatatatttaccggacaacaacggaagtggattttttttttttttgttaattctattttaatttataatcttttcgtttctgtattccctacactgagaagtgggaattactggcaactcgtgtaactcgtgttgtggtctcgtctactaaacatttttggttttttctgtaagcctgttatgtatcgacattttctttttcaaaccacgacagcaaaagaaattaactgtattcaaagattggtacaaggagcctatgctttcaacttgcgctagatggatggaccattaattaattgaagcttagactatatatgtctatcaccaataattgcgtaatttggtagttgcatgtgcttaatggaccattaaccctaaaacaatgtctctttatctcacacacacacacacacacacacacaaaattgcttttgtgttttaagacaaatttccttcttttgttttgttttttttcttcacgacaaatttccatgttagcaatagtaaaagtgttcttttgttgctgattaaataatgtattatattagggaaaaacatatacattaaatacagggataattttgttgatgctgtctggtttgaaaaagaaaaagctttattcatgaacactcggctacgaggcgccgcgtggcgcccttacgtgggaagtggttgtgttatgatgtttcgtctctgcttcttctccttttgccctttttaggttaaattttaaaattgcgccgctcgtcttttcacgtgcgaatgaatatataagtgttcgtgtacgtgtgacgttattatcaaatccgacgatatccaacgacgagatctatgattcttagtccaacggataagaatttgccacggtatctgtttgttcttgtttttccttaggcatagttaagtgcgaaaacattagagggccatattttttgattgcataaattttggaagcatgtaaataaatgtagtgaccctctctttcaacatgtttttgtttatcgcatactttcttagatcaacatcgtgtatctggtcgatttcttaaacctgataccaaagcatactaatttcgagagtatctggtcgatttcttatactcgataccaaagcttactactatattcgagagtatctggtcgatttctcaaactcgataccaaaaactataatgtttgagggttgtcatgctctttgaaattagttttctgtaaacttaccacaaaataatcatttaggtcaaaaaggtacaagagttttagttggcctcaacaaaacaacttagtttatatacagtggaaatcgcaggggaggtgtgatccctttcccttggatcatagcccgactatctctggtgcattatcttgtttggaatcttcttttgtttttctgcgtttaacggtgatatattatacgaatttgaagtaggacggtagcacatcaataacactaatacaaaccactatattacatgtcatattcgttttcatttgttataacattcttacgagagcttaaaattgtagccaaaagaaccaagtattcacaaattcttcaaagacaagagaaaacatagaactattaataaaaatgcgaagaagtatcgagttctggaaacactagatcatttggacgattcacaataaattgagttgttgagaaggtacactaaattataaatccacttttttgacaaacaacttgatttttgtactagcaaagataaagaaaaaaaagaagaagaggaaatcgattaaaattagtaaaatactaattacataaaaagtggaaaatgcaacaaatgatcaaaaggagaagaagtggaatattcagcaattagtataaggaaaaagaaaacgcgttgacggcggtaaacggccgtttactgaacgcggatggtacacgtacactattggctttcgtacgcatagtgctctttcatttcatctttcatgcaaactattccattcctctttatcttcagaagagattcaaactaatgatattcgaattgagccacagtactggttaattataaagtctcatttgagtcgtaaatcccagtgacgtgttatttggagaatttcactatcatgtggttgtgatggtcaaattaaggctacgcaatcactttgatactctcgatcatctattcttacgtgccgtctccaacgttatattttgcttatcataagcatacatctgtcctcttttcgtcatgttctaatcattatatttgatgcagtaatcaaacaattttaccatgtcaaccaaacaacattttccgttgattgtttgcttagtgtaattgtgtaaattatggttatcatttatctttataaaaatatatatgactatggttaagtgtaacttttatgtgtatagatgatgagataattcaagcaaatagttgtgaaaagaatggaataatgaagaaaaagaaagataactaggatcttgcgataaaaaggcaaaaacattctatcaacatgctagctatatcaccaatttcctttacttttgagatatttgatcacttgatcctactataatttatgagattttattttaattcaaattgataaattgtgtagtttttcacacacaaaaaaataaaaaataattgtgtagttcttaattgatacgagttcttttcactctatggtaattcgacaactaaatgaaagcaattgagtagttgtcctttaatgtttgagactttattgttttagcgcttaggtttcgccgcgtattgaacggcatcgtggacgatgggattgtgagtaatagtgagtgggacaaggcaacccacataagtttcatatggtagattctgacatatttaatcgttttatttattagactttgggaagcagttgaatgattgattgatatgtgggatatatatgggccatatggctcaacgattgagtttttttttctttctcttatgtattctgacatgtatgtgtgttattactactaaagatagttgtaattgctaaattcgttgattgtctttactatgttagtaagtatagcaagtagcaacggattccaaaccaatatatgtcactaactttattgagaattaccaatgaaattaacgataacatcctcttcttttttttattgcgcggcaacaacttaacctaaaattaaattattcaactagaaacgacattttaatagttgattttggtcgaaatgctgtgcatgcgcattcggttttctgaatacgacaataaacagactgtctataaaattacttcaaaatgagataacaacaaatttgtgagtggtgtagaaatacaagaaaataggtttgtgatcgtcatttaaccctacaatatatatgtccatatgaacatttgaagcacgtttataataaatttattatattactaatatatacaccaaatttattacgacgataaacattacaaaattctagatttttttttttttgcaaagaattctagaaggtttttatattaagtgtaagtcttgcatatgatggttgaagttttttttttcttttttttttaattttttccatatggttgaagttaatgaacattatttatttgccacgtgaaaagactgcctcgaaaaggttaaattcatataatttcctctttgattagcccctttacagattgaaaatcttaaagtggacctgaaactgcaaagtaaaactgaggacaaaggtttcttaaagcaaaaaaaaaaaatgaaaaacaaaaccgcgatgatcgaattgttgaatgattgatttaaaggctggatgacctgagttcgagtacttctacaacgatttcattcatgattaactactgtgaacattttgagttgcaagattactcaaccttcgatccaaattctcttggttacaaaataaaatcttttgtttaggatttgtagaaaatgactttggtttttgtttccaactccagttacactctagatcaataaaacataaaagcaaatttgtggtcacgagatctcatgacaaaaacgtggcgtttctgcaccacaaaattaaacataatggtcaaaaaattttaacatatccctatatcgccaatacttaaatttgtatccatccctctttaatttggtcagtatacactactaaattgtttttgctgcaaataatttactattcacgtgaacggttatcagtactaaattatttttgctgcaaatattgatagtaaaattaaaacctgcgatctttttaattattggtcttgatctgttcatgtttatgtaatagaattattatctgtattagaatagtataatttatgagattttttttttgttgaccgtattataaattgataattattgtttaaaagcattataaattgaaaaagttcaaaacaaaaacatgaacaaaacttttcctgaccgtttgtgtttattttttgtaatgtaaaacttttaacaaaagagttttgaaacattttttttttaatcgttgacatattatcgcaaaaaaaaaatacaaaaacaaattcatcaaaaggtgtgtcaaggctcaagtttaacttgttttcctttaaacttttgtcacaaaaacgttcaacatgaattttctagtaaatcatataaaagacacacaaaagcaatatacatcgcaggataatttcaaaagaaatggtatcagaaaagcaaacttctttacaaataaatgtatttaacttcctcaggacaaatacaagaatacaaaaacataccaaactcctcagagcttctttattacagaatcaaacaataaaattctacatcggagagtaaccaccggaaaagaaaaggagaatgaagataggcggttttgtttccgaaacaaatttccaagaatccagtaaaatttttggttcccgatgatacatcatactaatcacgataaaacaaaacgcacacagaagtaaaggaagtacctttgagcagtcttgtggtttagattctcattcagctctagactggccagctcgtgaggaaagaatgattcctacaataagcccgtaaagagcaagcgcttctgcgaaaataaggataagaatcatcccaacaaagagcttaggctgctgagcatttgccctgaaaaagaatcgcaaaagggtaagtcaaacaccaatgttacatatcttccataatacctcaaagcgtatcagtagcaggaggacgagagacaaacctgacaccggcatcaccaacaatcccaatggccattccagctgagagaccagcaagaccacaagcaagaccagacgagagatgtgcgtatccatcaaagaggtagtaagacttagccttggggttaatcccggtactgatgataacagcaatgatcaatccatagatacccaacactccagccataacaacagggacaatagatttcatcaccaactcaggtctcataactcccatagaagccacaccaacaccactctttgcggttccataagcagctcccatacctaataacatccaatgcaatccaaggattcaacatggtttcgtatgatcatataaagcacccaatgaggttccaaaattcgaggaatgcacaagagaatcgaatctctatctcagatttacagccaaataagacacaaaagcattgctcaatcagattttactagctcaaatgcaaatcatatcccataaatcaccaattccttatttttgcagatcgaacctaaaagactcattctttatatctatcacgatcatatacgcaatctgtaacaaatttcagaaaatgggaacacgatctcacgaagaaagaaacagatcaaaatgggaaaacagagagaaaatgaaattacaggagaaaacgagtgcggctgcagcgccgaggaagccgaagaagggagctgtttcatcgccgctgaacgtagacatgtcggagttttgtatctgagatcttaaatctgaaatcgagtcgatgaaaatctggcgagagagagagagatgaagatatatcgctgttgaatttatttattttgtttgttgtttttgttttcagatgagtggaagggaacaacgctgcttgttctgtaacaaggacgaccacgtcattttggcttgggcctattttagattaaaagcccaatttctaagataccgatgtagtataagtaacataaacaatggattaggttctgatttttgtttgggcctaaaatgttactgcatacatgagatacgggcccaatgacacaagtacacaactcatctaggcatatatgaaaccgaatcggttaatttctacttgagtcattgtgagagctgacattaactgtaacaccaaacaaggacaaaacattgaaacaacgaggcagaaacttgagctcatgaccaaacccttacactgatattatccaaaataacaatttgttggagagatccccgagtaatggaccaaagaagctttcaggcttcataatgagtaactaccatcggtattcatcttctccggttctccattccgccttagtcttgtccaacaacttcacacaaaacatggaaaatgattctcttcagagtcatgcgttgatttattaacacttgtttctattagatgcttttcagcagcatatattatccaatgctttctgttcatatgactgacatgcactaagatgaatgatctctcctaaaccaagctcatagatgagttgagcacatatgatgacttaccgcggagcgttctatcagagtaatatgcactcgttgcttaaacggcttcagaccattactttacatagattatgtcttcgtcggggtcatccacttcccaatcttgatcatcttctgttgagtcagatggttctgttttcccttcaccgcttcctttctcagcttttattttgtccagtattgcaattacctgaaacagtctccaattcagtttctgctcatagtgataaccgtacatggtattacaattgcttgactgactatatcagcatccaccaagttccggtttctaatatagcacagaagaggtgattttcagagaagacaatcaacaagatcaactagttcatgactcaacactcatgactatgaatgcaagatagagattttgaccgcatcattgagacattcatttactaactgaagactaaatttcattaaacgctagtttactttaagtgaaagatatattagaatcccttaccctgcttcctctttccatggcttcatcctcaataaacctgacctcaggcgtcaatctcaacttcattcgcttcccaagctcactcctaacgtacttagctttcgatttcaaccccgcaattgcaacgtctttccctctatcatctccaaacacggatacatatactttaaccacctacaaccccaaaagaaaccattttcagcttctaacattactctgaagtaataatactctcaaaccagcggctaggtccagcacacaaatcataaaacacataatacgaattgcttctgtcaaaaactgataaaagaatcaggattcaatccgtgcaagccacagtatagcataagtttaatcaaaagatcaagttaagcaattctggaatcaaatatttcgaaagaccctaaatttccactccagctgcataaatagagcaagacccacatgaatacattacacaagagtttccaattagggtttctcatcacctgcaaatcattagagacttcaacatcgctaatggtggtgagagaagagaggtagcggtcagctccaagtgcagcttcaggtaagacagcgtgttgtaaaaccgtgtctgttagaagcatgtcggagagttctctcattatctgcttagccaccatcttaactctcctcgggttcgccatacaccgtacggtcctgcgcacggagagattcgtacggaggttgaccggcgccattgattgcgggaagtggaaagcctgcgtctttgaactgacggtgtagattggcggatgatggaggaagaagaagtgagattgattggtgtggagcaagttaggcatcgtcacaatggttccttaatctcttatattcctctgttttggatttgaaaaggtctctgagcaagtaacgaaacaagaacaaattatccagtgttctaagggtatagtagtcgtttcacaaaatctaggtgacgtggaagagttcaatccacgaaaaccggtccgagtttcaaattaaaccgaagtaactaaaacgagaaccgaattaatttttagtatcagccaatacattttcgattcagaaattctgatcaagtaaattgcataaaacagagatttgaattctaaatgagacaaaattaaacaaaatatttcaaaaaatcagaccagaacaccacattatccataccaacaaatagaaactattgaaatgataaatattgttttaaaaattctaaaagtgaaaattcgaatactaaaatctatgcaacaatgataaaagaacaagttgaatattaagaactctagagactaatgatggatgcaaaacacagctagtttttaaagatttgaaaagctttttttataatctaaataaaaaacatggataataaaatttacataaaaataatataaaaataagttgaatgtttggtatgctaacgacccaaaacgtatccaaatttcgattagttatcatatatatatatatatatttaaatttagtataaaacaaaaaaaaagccttaaaaacttttataaatctaaataaaaaatatcaaaatttgaaaacctattttaaaaacttggatactaaaatctacataaatgtttgaaattgttaacgaccgaagctggatctaaaatcagattagttttcatatatatttttatataaatttagtatcaagacaaaaacaaaaaccttaaaaacctttgaaaaattcgaatcaaaaataacaaaatttgaaaagctattttaaaaattcaagtttttatgatatgaaaacaaattgaatgtttggaatcgctaacgaccgtagctggatccaaaatccggttagtttttcatatatatttttgtaaatttagtatcaaacaaaacaaaacaataaatcagaaaaaactttaaaagtccgaataaaaaactttgataccaaagttatctaaaaatgatatgaaaacaagttgaatgtttggaatcgctaacaaccgaagctggatccaaaatccggttagtttcatatatctttatgtaaatttagtatcaaacaaaacaaaaaaagaacaaaaatttttttaaaaaatcccaacaaaaaacttcgataccaaatctatataaagatgatatgaaaacaagttgaatatttggaatcgctaacgaccgaagctggatcaaaaatccggttagtttcatatattttatgtaaatttagtatcaaacgaaacaaaaaaaaaacaaaaaaaaactttttaaaattccaacaaaaaacttcgataccaaatctatataaagatgatatgaaaacaagttgaatgtttggaatcgctaacaaccgatgctggatccaaaatccggttagttttccatatacatttcttgacgtaaatttagtatcaaaacaaaaaaaaaagtcataaatttttttaaaaatcagaataaaaaacttcgataccaaatctatataaaaatgatatgaaaacaagttgaatgtttggaatcgataacgaccgaagctggatccaaaatccggttagtttcatatatctttatgtaaatttagtatcaaacaaaacaaaaaaaaaaaaaaaaaaaaactcttaaaagtccgaacaaaaaccttcgataccaaatctatataaagatatgaaaacaagttgaatttttgaaatcgctaacgaccgaacctggttccaaaatccggttagttttccatatacattttttacatagatttagtatcaaaacaaaaaaaaaatctaaaaaaagaaacacaagaaaaaaaatcttataaaatttaaaatcttttattaaagaaaaagaaaattaggaaagcgcaaaccttggttctcgctggtgatgattatcgatcgatcgatgaaacacaaatttgtcttcttcctccgcagtcgaattgtagttttaaagcctacgaatctgccaactggtcgttaatttcactatccctctcttggccatagtcttccgcgcatccttctccgtcgtgtaatcatctccttcgccgccgttgaaagaatccttcggtgaaagcgtttcggtggcgagatctttgatcgtgtgaaattagggagtcacgaactaaaaagtgaactcgattgattgaagattgttgtcacgagagaacgaaagcacatcagtgatcagtctctcagggaaattgcaggtatgaaaaagaaagaagaagaagaagaagaagaagataaaagatggtattttgatttctcaacgaagaagaagatacgagagttggagtatttataagcaaacgctccattgaaaaaaggaaattgtctcttttttctatgttttgcgaagaaaaggaaattgatcaatgtaacaaaaagtcaaattaagttaccgttacaagaacaaatatgtttcttactacctacgtaatttatttgatgttcacaaatcacaatttagagtgtttgttgaaagagatggaacatcaacaaaacaagccttgtaaagtaacacaaatctataaaagtcaaacctagtcatgtattaacataatgctcgaaacagaatgaaaaatatgccactagcacaatcttactcaaactacaagcaaattcacaacacaacacacacatctcctaaacgtatcactacctttccaagcaaaaatttcgtagaactcgccacaagcacaagcccccataaaccagttgctctgcttccgtttgtaatgacatggtcaaaatgtcaatggcttatctagtcggcttactctaactttcgtgtatctcatatttgaaacagacaagctcaccattcaaaagcttgtttagctgaacaacactcaaatgtatcaccgtcgtttactcaaactcatataggaacctacctacctaagactagcttctcaatatccaagcaacaatgtctgatgatggaggaagaagaagtgagattgatgggtgtgtagaaacttaggcatcgtcacaatggttccttaatctcgtaaattcctctgttttgtgtgtttggatttgaggaagtaacgaaacagaacaaatttatccattgttctgagggtatagttgtcatttggcaccatctacggtgacgtggaatagttcaaaccatattcaaccgaaataaccaaatcgataaccgaatcaaattttagtaaatagagagatgtctctcatataccacatcacccattacattttctgattaagtaaagtgcaatgaaaacagagagaagatttgaattcttaacgagacaaaagtaaacaaaacctttcaaagattcagacaagaacaacccttaaatcttaatccatcccagactcaataaaatagtaaaaatgtgccagcaattaaggtcaaatggaacacaaaattcaacaagatatcgtcatcatcttactccattagtacccaaaattgatcatcataatgcagaacttgaatatctgctatctaccgtacccaacctccttcaatgttgtggattcctccaacgagaccatcatcgataaaatctcctcctcgcttcaccttatcctctgtaggcttcaccggatagtcccccgtgaagcatgcatagcagaagcttctagaatcttcccccaaatgtttctttaacgtctcaaacgacaaaaacgcaagggaatcacatccgatgtaatccctgatttcatcaacactcatcctattcgatatcaactcatttgagctaggcgtgtccactccgtagtaacaagatgcaataataggaggactcgcgatcctcatgtgaacctctttcgcacccgcttctctcaataaacgcacaatcttggacgaagttgttcctctaacaatcgaatcatcaacaacaacaactcttttcccttctaaaactcctcggactggcgatagcttcagcttcactccaaaatctctgattttctgagacggctcaatgaaagtccttccaacataatgagacctaatcaaaccttgctgaaacgctacaccagctttagccgcgtaaccaagagcagccacaacacccgagtcaggcacagcgatcaccacatcacaatcaacaggtgactcagtagctaaaatctcaccaaagacatgcctagactcatacacagaccgaccaaagacaatcgaattaggcaacgagaagtaaatatgttcgaaaatgcattgctttggctcaggatgaggcatcaaacactgacatttgacaccatctttatccacaactaaaacctcaccaggataaacctctctctcataagtagcttcaatcaaatcaagagcacaagtctcagaagcaaacacaacagctccattacttctcctacccataactaaaggcctaaacccatgtgggtcacgaacagcaacaagcttatcctcagtcacaaacaccatcgaataagcaccttgaagcttctcacaagcatcaacaattctcatgaaaaagggtctagctttagaaatggcaatcaaatgaagcacaacctcagtatcagagctagtattgaaaatcgaaccattttcctctaaatcagctctcaatttcgtgtaattcactaaattgccattgtgagcaacaccaacagagccaaatcgataaccagcaacaaacggctgaacgttcttgagcatagaagaaccagcagtcgagtacctgacatgaccaatggctatgtctcctggtaattgatcgagtttggattcactgaaaacctcagagaccaaaccaacacctgtaatggtctgaagaaccttatctttactaacggtaacaatacctgcaccttcttgacctcgatgctgaagcgcatggagagctaagtaacagagtcgtgaagcttctgagtcaccgtagattccgacaactccacactcttcccgaggcttctcgtcataatcatcgttgtctgccgccaacagggtaagagggtttgaaactctgagcggaaacgaaggagaagaagaagaagaggagatagaagccggaagaggagagaaagaggaggaggaggggttaaggaagggattacggaggaaacggtgaggcttattgttgttgttgttgttagagagcttgttgggtttagcattgagagatagagaagaagagatgctagaggtggccgccatggatgatttttgagagcaatgcgaataaaaatttgctcttttaggtttattttaattttcttctgatttgtttttggttttggggtcaatttggggaaagggttgtatttgactgtgtatgtatagcacacgtcgtcagtgaagtgaccgcctcaccctttttttttttttttctgcgaatctttttaaacaatttttctttcggctttaaattctttgtactttgatgatattttagaagagaatctctatttttttcgtggtgggtccccttttctgtggctcaaaatgcatttttaaaacgaaacgggtcggcttgatacaaagcgggtcgggcgcacacaattagagaaaagcaattcttaattcatcaaaccaaagccatatgggcttttctttgaggctttgtaaaaagcctgctctttcaaattcttaaggaaaatcaaataaagaagaagatatctgagtatttattaattttcttttatgtgttgagtaagatattatatattaaaaacaaaaaaattgatatatgcatcaattcaatattcttaccaaaaaaaatacacacaaaccaattatgaaaagttgaccaattttgtttctgaaaaaaatttgttaaaaagaatgaaaacaaaaacagagctatgaatcttttatttataagataaagaaggaaaaaaaaagagaaaaaaaatcaaaaaaccataaatagagaagagtaaaatcgtaatttagcaaacgttagaggggcaaaatgaaacctaaatgattaacctttaaataccgtaacgctcccttcaatattcccctgcttgccgtattattccaaaatttggtgaaagcaacgcctaaagcaaaaatgtctcttctctaaccttttttttttttttttttttttgctctccaactttcccttcattttctggggaaaagcgagccaaaaaacgcaaaagcaatccacaagaagcaattgttcgatatcaatggggaagaacaataagatcggaagcgttgttcggatccgtcagatgcttaaacaatggcagaaaaaagctcacatcggatctagcaacaacgatcctgtttccgatgtacctcctggtcacgttgctgtttccgtcggtgagaatcgtcggagatacgttgtccgtgctaagcatttgaaccatccgattttccgacggcttctagctgaggctgaggaagagtatggattcgctaacgttggtccgttagcgattccttgtgatgaatcgttgtttgaggatattattgcgattgtgactcggtgtgagtcgtcatcatcatctggacgaggtaatcctccggcggcgacgcttgaggatctccggaggtgtagtcatgttggattggcgaagaacaacgttgaatctcgtccgttacttcctgggattgctgaaaaatctgtgtgctaatgaaatttgcaaacggaatgtgattgaaactttggttagagatttaattttgaaagttttaatttaatttcgttgctattttttttaatgatttttgactttgtttttgggaaggagatggcaaaattagggtttgatattgtttttggttgtcgccagtgtcgtcgtcccagaatgatgaagatttgatgaaggagatagtttttttggagagaggagccctcagtttttaatttagatatttttgattctggtcgagagattcttatttatatttctcttggctattttcaatttgtatattcagatttctgaattttaactgaggaataataaattaatttggaattattgttgtcaatttatttgtttattgcttaaagaaagatgctttttgattttctcattatagttcttgacttcttgttaccgaaatatttggtcaagaagatgatttcaaacctaatttgcagtttatacaaccaaagatgatctgcaaaatacctttctgatttcagagttaccgtttcaacactattttcactaattagagtaacattacttaacaaaaacagtaaacatctctgatttgatatgagaaaccaaagaaagtaaagaaaaaccaagttacattttttaccaaaaaaaaaaaaaaaacaagttacatagaaaacaaagatattatatatatgattctcaccaaaaaaatatatttacgtttactatatgaagaatagctactaagtcaatatcatacaagcaaattaatgtttgtagatatctatgcaaaattatgtgatattattagctatactggtgtatttgaaagagaaaaaagttatatgtttggtcaaaaataccttcataataaatgtaaatgttttagaccgaacatttttaatcacattagaaagtacttttacttgtggaaaattagaaaataaataatcgtggactatttgtctcctctaaattttaaaattatctctccctaccttgaccaacattatctaatttccatttgtacggtgtacgtggtacgtacctccatcaaatcatatcacctaaatcttacgctgatttaacagttgggagtatcgcccacttgcattttctccaccttctaagaaaaacaaacatatgactttagtaggagtataaatttacaacaacgacaacaaaataaagtattatctacaaagatcatctcggataagcttagcgttgtgagaaatgactaatgattgtgagaaatgaccctcttccttcattttaaattgaccacgaacgtgatcaacttcttacttactgtttcctttgggttttcacttttactatataacctaatgttctctaaggatgaattgatgatgaacacatactggtctctttccacttttttaatatgtgatcactaaaaaggttctttgcataagctcagtgttggaggtttttagaaaattttcatgatttaagagctatttccttatagataataactattttgtttcactagctagagaagagtatccggatttccgagtatatcgtagaaattaaccaattaatattcattaaaaattgttgacagattgatattgtgcttttactagacaggaatatcttggtaaatcacattgcttttgcgtgagtattcatcaaagcactaactaagcaattcaatgatttttaactcatcaagaatatcttcggaaagttactatttttaacccatctttattagattttagttaactatcatacgaagccattacttttcgaaggttttcgaccatggccctgccaagattcgtaaaatatggatcggattaaaactgatcctgatttctctccatagcctaaagatcggtcaaggcgacacaaataacatcgagatttaatatataatctgaaaaaaagtcgtgcagacctaaccaactctagttgaacctaacaagtttaccgtctgaatctttggaactcttttaaacaaaaaaatccaaccgaattaaaggtcaatagttacactagctagggagaaatgatttatgagcaagttgaattccgacgtttcgtaacctactaaaagtaagacactatttgctgttaggtcgttcgttgcttagtatgtgtcgtcataatccttataaattatgatgctttgcttttcgaaaagtggcgaggagagatcatagtgtctagttataagattacattcgttgctttgtttattacaacttgcaagcaaactattgtaaattaaaccacaaatcctaaatcttaaatcaaacccaatctccatttaataaattagacccttacataaaaaaaagaataacagattacgaatataagtaatgtcacgtaatagttaaatgaaatatcaaatctttcaaacgtgtcaagaaaatagacaaacgaacaatcatttttttttaacaatcatatttgtttgcaatgctattattttattttgcatccattcttttttcgttagtggatgcaaattaaatgctaacaaattatcatcatttcgtagtcctgtatacttttacggttttacctattcttcgtaatctctcgatcgactatagtgatgatttagctttatatgtacctaacaacactgcgttaattatgttgataaaaccaacgaatctcggaatgcgtgataaatctttcataaaaattcgacattaacgactattcaaaagagatccaaacaaagaattatacagttcgttataattagtagtattatttttataatggcgcatggaaggtctaaccttatttaacgatcaattaaacaaatgtttagttacaagctttaattaattgtacggaacgggaaaaagccgtagaagaaggaatcgtttgatagcgcatgcggtacatgtatatgcatatatattgctgactctaagaatgattaagggacgcaatatttggaaacagctcaatattatttgtaaagtcctgtttttgatacagcttccattaccatgcatgagtcattttctctgctttatacggctgtatgtttatataaatgagtagttattttccttgctttacacttttgtatattatgaataagtagattatttaaaagtgaaattcagtatttctaatgtgtagctttttatctagctagttgataaaaagaagtcatcgcttttttgggtgaggaacgagtcaactttcactagtatatatgttttgattaataaccaaaattagttagagttttggtagtataagaaatgtataccaaagaaccttaattcggaagaaactagaaatattcgagagtacacggagcaacaaaaaccaaattgaaacgtcttgatctttttcatctggaataatgtaccacattttttttttcacaattaccacaaattctaaagtatataaattgatgttgaaacttaattactagcacttgatacttactattgatggttgataatttatttagcagttgtatgtatatttttgtttttttgaaatagcaattaatgtttacgtttaaataaacagtggttagtgcggtcaccggtcactttaaataatactactataaaacatgcattacagtcaaagtagtgaatagtaataaataataatggtgggagagtagtagttatagtcactgcatgtgactatgtatatacacaatatagataatttttctcagtggaaaaaagggtaatttttctcgaaacaattctattgaattagccctttacacatataatattggtggcctaactttcgtctcaaacaccgttaaacataaacgttgctgaacgttaccaactaattagaatcttataaaccattttcttcaaacgaatgtagaaatcgtcttatctggttccgtacatgataaagtaccccacattctctgacaaacccatgttcaagcatgcactttcaaaaccttatgtatccattgatatgatcatttgacataaaattttcctctataagaaccctaatgatttagcaattacatggaaatttagtcttaagcgtttgtttaatgcttacagtgtcatacctatatttgtttgtaggagataaatgacaaaacaaaaatttgcacaagaatcaatagaaaatatcaaaataccagtgaaatattaaacaaatggatcggaggaatactttctcttgcattaaataacttctctcacagaacgaagatctgtgaggaaaacattacaaactttatttacagatctaaacccatagaatctctatctcatacggatttatttctagttagacgagtcaattaactcgtaaaaaaaaccctagatgggcttaaaaataaaggaaaaaaaatcttaaaaaaagagaagagatgctttttttgtatgagaagcttttccgcttcttctttaaccatctccttctgcttcttcttcaaatgataaaatatcatcggatcatggatgttagggtttgaaaaacgagttcatcacaaggaatggtgagacccatgtcgtgatcgaatccaaattcttcctcggctcgttgtaagagagattggaactcaggatgtgtcaagaaggagattgggacaatgtatctgcttctgttctctccgacatagacagggaagtgtccctttggtacgtcaagcggaaggcaatcttcatcgtaccctcctccattcttcttccctaagctcgagcatctcttcagaatctgcttcagcattgctgtttgagtgagttttgaagttttcttcattatagccatttgtttttggggttcctgagagataaaagtctttggttgtgtttagggagagagagagagagttatggagaaggagatgggtggatattgagggagttgaggagtatatatttataaataaagattttgtaatgggctatttgtctgtacatatttgtgtaggtaacgtatagagagagagagacatgaagacatgtgcatatgtgtggaaggagatggtgggagccaaaatgttaaaggccagctgaggatttaatttcattgttggtcctctttgtgacattgtggccccttctgatctcctggtccttaccaagattacaccataaatactatatccttttcatttcctactttctttttcttagttaaatacacttcaaacacgtatgtgactacttgaataaaaataagggcctaaaaatagtttacaaggaaaaacagtcacgtatatttttatatttcttaactcaaatactataagtgataaccacccttctaaaaccgttactatcatgtagaaagacaatgaaaattttatcttccatatatatactaaattgaatcatcgaaaatcttcaaaatttaatggtagaagaaaatgtacacatgtagtctctctctgttgagaggtgtcatcgaagagcgtaaatcacggactttggaaagagtaatgtactgaagggtacaaagtagaagaagagtgtttggagtgttgttaaatgtggttcgagagagtgtgcctgtgacactttcagacaaatttcttctaccttttttttgcaggcacccatgtgcatctctcatactctatttttttttctctctttttattaatttctgtgttttctgatcgtttttcttttccaacggtagacgttgcagttaatcctcagccttctctttttctttctttttataatcaaatatcttttcaaaatactcttaaatacgcgtcttggtatttacaaattttaaaaagaaactatttaggacacacaaaaatataaggattaggtcttagtcaccgtttgaagtaagttttcttcgcagcatgatgttgaactggaagtacaatgctgccgacgtttgatatacggaaataatattttacaaatgaacttaaactcttcttaacactaaaaccaaaaaaaaaacttaaactcttctttccatattccatgtgaggtttcactgttttaaattgctcaccaaaagggctttaattacaatttgaatctattttactacaaaacgattagtttactatcagtggctctaaattctactctaatcaaattaataggttacacaaatttgtttgctataaatacatataaatataatctgatatactcttattatttatatttgcaatatttttagtttaaagccctaggtcaatcggaaaacccgtaagggtggtctggctctttctccacaaccaagaacctgactttcttcaaccaagagcctgactgcacttttcccatgagataattagttgataaaagttctatgtttttatcctcttttcttcgaagtaaggtaaggtaacacttatgatattttcaatagatgtcttatcttaactagatattgttcgaaagagcaaactgcaatgtttgtttgatagagttcatttactagctagatagccaaatattgcaatttatctgtaaaaaaaggcagtgctaaaatcataaatagtggatattgttttttcgcatctttaaaatatatagttgtgtgatatcatgtaaaatagtttatcaaacaagaaagagattatatgtttttaatagagctacacatcatgacttttgttgtaaacacttgcttatttacagatttgcaaaacattatttttagaagtacacctatagaacttgactatctagtgcatcttcataaatatcgtagatatgtatggtaatgttttattaattcgatctgcacactctcaagaaaaagaaaatcttcggactattattttaagatacgcaggacacttttcttcccattccccgatatatacaatctttgactgaaatataaagctaaaaatgctattgtcaatattaaaagtgcttatatttgcataaaaactgaaaataattgattgggacagtaacaaatcgaacccaaaaactaattctatagactggagcttaactaatatttgctcgtttatataaaatactatgaatataagtatatttgttctcttcatttgcgtgtgcggaccagacccaatcaatagattcgctcatattacccaaaaaattgaaaaatgctgatatgactctgttttgtgcctaaacacagaagctttaacggttggactcaagatgtcagtgtgctttatttctttttgacagcaaaagtcagtgagctattttagttttgaaggtttaactactttggttagagacgagaaatttatgtttttttagctaaaatgagtaagtgggaaaataagttgttttaacacctacggcatattaagtgcgaaaagaagttttttttttgttcaacaagtggaaaataatatttttcctcaaaatatactttccatagtcgacgggattggtttagtcacaaaacttagaaagttagatagtcataatctaaaattaattattattaaagcaaacatggttttgtcttaaacaatcccatatgcactgtcttgggggctacggcccatgcgtttaggagccacctatgtttattaggtcctaatcatctttgtcctaatcgactcttgattattatataaaaatttgaagctttccctttttttttttttttttgtagcttactttttgataattgtgagattcattttgtataaaaacttaattaaatctttaattgacaagtttttgttcaatttatgagtttgtaaaatttgacgatgaatgtattgatccacgttctatatatatattatttaccatttaaatttatcttaaatataggattatttctaacacaacttctcaaaataaagacggtcagaattgatatatccttacttccttaggaagacgtcttgatctaacacaacgatagacgttctcttagataatacaaccgagaaaatcaggaactcttttcttctttcgtattgtctttcactttcgtgaaatttgtttctaatatatttttctatatacattcattaagttctaaggttgtttgccagtctaatctaatctaatgtacgtaatttatccagttttaaagtaattaacgactagcgtaaaagtgtttttcttttgttacaatttatggtgtacgcgattacagaatatccaccatcatcgtaaagtaaactatctctcgcaaatttagcatcacaattattgattataaaccattttgtttctgttttcttttttctctaattaacgacatattttgcatttcttttatcaatcactattttatgcctaatgtatagactctttacgttatttctttatgtctaaaatattgatttgttttctcacttcaaatttttaagaaaatataaacgatcccccaaaactattttccgattgtatcttttttttcgtaatacattacctcccaaccttgtcataggttgtattatataatacatatgtataattaatgagatataagatattctgaaccaaaaaaaaaaagagaaacatataagagataaatggtagaattataaagcaaaggtggtccaagggaaacatcgtgacttatctcttgtaggagcagcatatgtgtattcctattgacgtttttactgtgttgtctttttaggtattgtcattttgtcttatagattctggttttaatatgcttcagttaaaactaccatggcatctggctagggttgtgcctagacttttggggtcaaagagggaaaacaggtttattgtcgacgatcaaaaggatgggagggttagtaaagaaaaataaatagacgtagaggtacgtagtcatgcattttatttgttaggtgttggtttgcatgttctgtgacacaggatggatcgtgagaatacgtgattgaaacaagatgaccatgagcatatgggaccatattgtttttcattttatttattactaattattatattttgtttatgtttttttctaaattttctattggctggtaaatcaaatcaattgaatagttttatttccacagtaaatgttgtcgttcttcgttggtgatgttgtttgatcgtgacattagggtcagtgtgaggctgtgagcacatgaacgccatgttactccttcaccccttttctttcttacgtagataactttttgtcattaatatgtgttttatgaaattattttctttacaaaccataaatgaaatcaatttgaaaaatcagtaaaatttccaaactattttattattttgcggaagccggaagtatacgtcacacaaaacatattaagtttcatatttatagtcattaccgtgcatgtattttacactattattggttaacatacgattcgtcttactcaccatcagttataatttgagtttgaattacccatgaacttattacagacattttttttttaaatatgttgttgttaaagtgaacttatagactgttatggtcataatgttttgaaaggtcaatgattcgagttatacttaatatttttgttacttataatattcctattttttctaatatttagagcatattcatcttaaagctaaattaagggcatggcaactcgattttgtatataagtattagacatgcttaccatgcaattttttttcctttttctagtcgattttaaaaaaaataaaaaagctactttccactgcctcgtcttatcacatattcctgtcacgatgatcatgattttttttttataaaaaattgatcatgaataattacatgcgaatatatacgggtgcatcaaaagaaaaccaatgaaaagcatttttttattgaattggattgaaatgaattaggacagctaattccggacccatccatatatatatcataagcgtcatcagtgtttatatatccagctaatgttggtactttgaaggcgtacgtcaaaaatatgtcgttgcttctcctttttttatgatgtgatgttgtctactcgcattaacaaattgaaaaatatcaacagaaactttttaaaatatgattatttgaatacatatcttcttcttttcttttttctttttttttttcttttttgtctaaagaaaaaaaaacttttttttttctttttcttattgtagtgacagcaaaacacctcaccattacaactagaatttgaaaattttccttaaattttttattcaatatattatcacattttaaatttatggaagactaataaaaccgtatcaataaaagaatacaatgtaaattatatacataataatgtaatttgacatatctggatgtgttttgatataagaaactctaataaatcattttgaaaaacacatccagatatatctggatagtattaattcatattattatttatttttattaaactatatattcttcatcccctgcctctcgtaaaatggcgtataaagaaatttaaagaaggacaatgagtcaatgacaaagaaaaaaccttatccgggaaaaaaaaaaattaggggttttaggttacttcatatccaatagtctaaatgtttgggccagtaaattacgtggatgggccgaagttaagtagatccattcaagccttgtttttcagatagattttttttgtaaatatgtttaggtcattctttcgtacatcttttgggtaaagaatcaaagcaaacgtcacacgttgcttggactcggatatgttttgacattgtctatactctatacttctcaaaaatgaaatggcatttattttaatcgttttttcaacggtcattttttttaaacagccaacggtcatttatctttttttattaattaccaataagtataaattgcatttatacataatttcgtctcaattcgttttcttcttgtttacggtttaatcatttatccaaagttcaaacgaattcacagcatatatgtacaatacgatttatttcagttcgatacaaagtgtatatggataaattaaaagggtaattacattttcggcaataacatgcattatcgaagttactatttccctccaacaaataaaacacgtcccatatctgccaatttatatttgaaaagttgtcatatattagacgccccctctgtaatttagtgggtcacatcacatgctctctaattatttcatatgagaagccattatccgaaaaaaagaagatgatagatgtaaagccacgaaaatgagaattgcagaaacatggatatccacgaatggaccgtcacaagatcttccaataatatttagcttttttcagtcaaacgtagatagtcagtgagttgatgatgaagccctcgtgttgtacgtagctgccaaacactaacatattcaaatccacccaattaataaagcttcggagcacaataattttatttgcctttttgacctccattatgtcaatagggtcaagaggtcacgaggatataaacaaaaaaatacttggacatttctatttttaatctaaactattatgtataaatttctttaattatatttggagaaaaaatatttgagctattggaagctt

SEQ ID NO: 668 - DNA, 103150 bp, Arabidopsis thaliana
gaattcttaacgagacaaaagtaaacaaaacctttcaaagattcagacaagaacaacccttaaatcttaatccatcccagactcaataaaatagtaaaaatgtgccagcaattaaggtcaaatggaacacaaaattcaacaagatatcgtcatcatcttactccattagtacccaaaattgatcatcataatgcagaacttgaatatctgctatctaccgtacccaacctccttcaatgttgtggattcctccaacgagaccatcatcgataaaatctcctcctcgcttcaccttatcctctgtaggcttcaccggatagtcccccgtgaagcatgcatagcagaagcttctagaatcttcccccaaatgtttctttaacgtctcaaacgacaaaaacgcaagggaatcacatccgatgtaatccctgatttcatcaacactcatcctattcgatatcaactcatttgagctaggcgtgtccactccgtagtaacaagatgcaataataggaggactcgcgatcctcatgtgaacctctttcgcacccgcttctctcaataaacgcacaatcttggacgaagttgttcctctaacaatcgaatcatcaacaacaacaactcttttcccttctaaaactcctcggactggcgatagcttcagcttcactccaaaatctctgattttctgagacggctcaatgaaagtccttccaacataatgagacctaatcaaaccttgctgaaacgctacaccagctttagccgcgtaaccaagagcagccacaacacccgagtcaggcacagcgatcaccacatcacaatcaacaggtgactcagtagctaaaatctcaccaaagacatgcctagactcatacacagaccgaccaaagacaatcgaattaggcaacgagaagtaaatatgttcgaaaatgcattgctttggctcaggatgaggcatcaaacactgacatttgacaccatctttatccacaactaaaacctcaccaggataaacctctctctcataagtagcttcaatcaaatcaagagcacaagtctcagaagcaaacacaacagctccattacttctcctacccataactaaaggcctaaacccatgtgggtcacgaacagcaacaagcttatcctcagtcacaaacaccatcgaataagcaccttgaagcttctcacaagcatcaacaattctcatgaaaaagggtctagctttagaaatggcaatcaaatgaagcacaacctcagtatcagagctagtattgaaaatcgaaccattttcctctaaatcagctctcaatttcgtgtaattcactaaattgccattgtgagcaacaccaacagagccaaatcgataaccagcaacaaacggctgaacgttcttgagcatagaagaaccagcagtcgagtacctgacatgaccaatggctatgtctcctggtaattgatcgagtttggattcactgaaaacctcagagaccaaaccaacacctgtaatggtctgaagaaccttatctttactaacggtaacaatacctgcaccttcttgacctcgatgctgaagcgcatggagagctaagtaacagagtcgtgaagcttctgagtcaccgtagattccgacaactccacactcttcccgaggcttctcgtcataatcatcgttgtctgccgccaacagggtaagagggtttgaaactctgagcggaaacgaaggagaagaagaagaagaggagatagaagccggaagaggagagaaagaggaggaggaggggttaaggaagggattacggaggaaacggtgaggcttattgttgttgttgttgttagagagcttgttgggtttagcattgagagatagagaagaagagatgctagaggtggccgccatggatgatttttgagagcaatgcgaataaaaatttgctcttttaggtttattttaattttcttctgatttgtttttggttttggggtcaatttggggaaagggttgtatttgactgtgtatgtatagcacacgtcgtcagtgaagtgaccgcctcaccctttttttttttttttctgcgaatctttttaaacaatttttctttcggctttaaattctttgtactttgatgatattttagaagagaatctctatttttttcgtggtgggtccccttttctgtggctcaaaatgcatttttaaaacgaaacgggtcggcttgatacaaagcgggtcgggcgcacacaattagagaaaagcaattcttaattcatcaaaccaaagccatatgggcttttctttgaggctttgtaaaaagcctgctctttcaaattcttaaggaaaatcaaataaagaagaagatatctgagtatttattaattttcttttatgtgttgagtaagatattatatattaaaaacaaaaaaattgatatatgcatcaattcaatattcttaccaaaaaaaatacacacaaaccaattatgaaaagttgaccaattttgtttctgaaaaaaatttgttaaaaagaatgaaaacaaaaacagagctatgaatcttttatttataagataaagaaggaaaaaaaaagagaaaaaaaatcaaaaaaccataaatagagaagagtaaaatcgtaatttagcaaacgttagaggggcaaaatgaaacctaaatgattaacctttaaataccgtaacgctcccttcaatattcccctgcttgccgtattattccaaaatttggtgaaagcaacgcctaaagcaaaaatgtctcttctctaaccttttttttttttttttttttttgctctccaactttcccttcattttctggggaaaagcgagccaaaaaacgcaaaagcaatccacaagaagcaattgttcgatatcaatggggaagaacaataagatcggaagcgttgttcggatccgtcagatgcttaaacaatggcagaaaaaagctcacatcggatctagcaacaacgatcctgtttccgatgtacctcctggtcacgttgctgtttccgtcggtgagaatcgtcggagatacgttgtccgtgctaagcatttgaaccatccgattttccgacggcttctagctgaggctgaggaagagtatggattcgctaacgttggtccgttagcgattccttgtgatgaatcgttgtttgaggatattattgcgattgtgactcggtgtgagtcgtcatcatcatctggacgaggtaatcctccggcggcgacgcttgaggatctccggaggtgtagtcatgttggattggcgaagaacaacgttgaatctcgtccgttacttcctgggattgctgaaaaatctgtgtgctaatgaaatttgcaaacggaatgtgattgaaactttggttagagatttaattttgaaagttttaatttaatttcgttgctattttttttaatgatttttgactttgtttttgggaaggagatggcaaaattagggtttgatattgtttttggttgtcgccagtgtcgtcgtcccagaatgatgaagatttgatgaaggagatagtttttttggagagaggagccctcagtttttaatttagatatttttgattctggtcgagagattcttatttatatttctcttggctattttcaatttgtatattcagatttctgaattttaactgaggaataataaattaatttggaattattgttgtcaatttatttgtttattgcttaaagaaagatgctttttgattttctcattatagttcttgacttcttgttaccgaaatatttggtcaagaagatgatttcaaacctaatttgcagtttatacaaccaaagatgatctgcaaaatacctttctgatttcagagttaccgtttcaacactattttcactaattagagtaacattacttaacaaaaacagtaaacatctctgatttgatatgagaaaccaaagaaagtaaagaaaaaccaagttacattttttaccaaaaaaaaaaaaaaaacaagttacatagaaaacaaagatattatatatatgattctcaccaaaaaaatatatttacgtttactatatgaagaatagctactaagtcaatatcatacaagcaaattaatgtttgtagatatctatgcaaaattatgtgatattattagctatactggtgtatttgaaagagaaaaaagttatatgtttggtcaaaaataccttcataataaatgtaaatgttttagaccgaacatttttaatcacattagaaagtacttttacttgtggaaaattagaaaataaataatcgtggactatttgtctcctctaaattttaaaattatctctccctaccttgaccaacattatctaatttccatttgtacggtgtacgtggtacgtacctccatcaaatcatatcacctaaatcttacgctgatttaacagttgggagtatcgcccacttgcattttctccaccttctaagaaaaacaaacatatgactttagtaggagtataaatttacaacaacgacaacaaaataaagtattatctacaaagatcatctcggataagcttagcgttgtgagaaatgactaatgattgtgagaaatgaccctcttccttcattttaaattgaccacgaacgtgatcaacttcttacttactgtttcctttgggttttcacttttactatataacctaatgttctctaaggatgaattgatgatgaacacatactggtctctttccacttttttaatatgtgatcactaaaaaggttctttgcataagctcagtgttggaggtttttagaaaattttcatgatttaagagctatttccttatagataataactattttgtttcactagctagagaagagtatccggatttccgagtatatcgtagaaattaaccaattaatattcattaaaaattgttgacagattgatattgtgcttttactagacaggaatatcttggtaaatcacattgcttttgcgtgagtattcatcaaagcactaactaagcaattcaatgatttttaactcatcaagaatatcttcggaaagttactatttttaacccatctttattagattttagttaactatcatacgaagccattacttttcgaaggttttcgaccatggccctgccaagattcgtaaaatatggatcggattaaaactgatcctgatttctctccatagcctaaagatcggtcaaggcgacacaaataacatcgagatttaatatataatctgaaaaaaagtcgtgcagacctaaccaactctagttgaacctaacaagtttaccgtctgaatctttggaactcttttaaacaaaaaaatccaaccgaattaaaggtcaatagttacactagctagggagaaatgatttatgagcaagttgaattccgacgtttcgtaacctactaaaagtaagacactatttgctgttaggtcgttcgttgcttagtatgtgtcgtcataatccttataaattatgatgctttgcttttcgaaaagtggcgaggagagatcatagtgtctagttataagattacattcgttgctttgtttattacaacttgcaagcaaactattgtaaattaaaccacaaatcctaaatcttaaatcaaacccaatctccatttaataaattagacccttacataaaaaaaagaataacagattacgaatataagtaatgtcacgtaatagttaaatgaaatatcaaatctttcaaacgtgtcaagaaaatagacaaacgaacaatcatttttttttaacaatcatatttgtttgcaatgctattattttattttgcatccattcttttttcgttagtggatgcaaattaaatgctaacaaattatcatcatttcgtagtcctgtatacttttacggttttacctattcttcgtaatctctcgatcgactatagtgatgatttagctttatatgtacctaacaacactgcgttaattatgttgataaaaccaacgaatctcggaatgcgtgataaatctttcataaaaattcgacattaacgactattcaaaagagatccaaacaaagaattatacagttcgttataattagtagtattatttttataatggcgcatggaaggtctaaccttatttaacgatcaattaaacaaatgtttagttacaagctttaattaattgtacggaacgggaaaaagccgtagaagaaggaatcgtttgatagcgcatgcggtacatgtatatgcatatatattgctgactctaagaatgattaagggacgcaatatttggaaacagctcaatattatttgtaaagtcctgtttttgatacagcttccattaccatgcatgagtcattttctctgctttatacggctgtatgtttatataaatgagtagttattttccttgctttacacttttgtatattatgaataagtagattatttaaaagtgaaattcagtatttctaatgtgtagctttttatctagctagttgataaaaagaagtcatcgcttttttgggtgaggaacgagtcaactttcactagtatatatgttttgattaataaccaaaattagttagagttttggtagtataagaaatgtataccaaagaaccttaattcggaagaaactagaaatattcgagagtacacggagcaacaaaaaccaaattgaaacgtcttgatctttttcatctggaataatgtaccacattttttttttcacaattaccacaaattctaaagtatataaattgatgttgaaacttaattactagcacttgatacttactattgatggttgataatttatttagcagttgtatgtatatttttgtttttttgaaatagcaattaatgtttacgtttaaataaacagtggttagtgcggtcaccggtcactttaaataatactactataaaacatgcattacagtcaaagtagtgaatagtaataaataataatggtgggagagtagtagttatagtcactgcatgtgactatgtatatacacaatatagataatttttctcagtggaaaaaagggtaatttttctcgaaacaattctattgaattagccctttacacatataatattggtggcctaactttcgtctcaaacaccgttaaacataaacgttgctgaacgttaccaactaattagaatcttataaaccattttcttcaaacgaatgtagaaatcgtcttatctggttccgtacatgataaagtaccccacattctctgacaaacccatgttcaagcatgcactttcaaaaccttatgtatccattgatatgatcatttgacataaaattttcctctataagaaccctaatgatttagcaattacatggaaatttagtcttaagcgtttgtttaatgcttacagtgtcatacctatatttgtttgtaggagataaatgacaaaacaaaaatttgcacaagaatcaatagaaaatatcaaaataccagtgaaatattaaacaaatggatcggaggaatactttctcttgcattaaataacttctctcacagaacgaagatctgtgaggaaaacattacaaactttatttacagatctaaacccatagaatctctatctcatacggatttatttctagttagacgagtcaattaactcgtaaaaaaaaccctagatgggcttaaaaataaaggaaaaaaaatcttaaaaaaagagaagagatgctttttttgtatgagaagcttttccgcttcttctttaaccatctccttctgcttcttcttcaaatgataaaatatcatcggatcatggatgttagggtttgaaaaacgagttcatcacaaggaatggtgagacccatgtcgtgatcgaatccaaattcttcctcggctcgttgtaagagagattggaactcaggatgtgtcaagaaggagattgggacaatgtatctgcttctgttctctccgacatagacagggaagtgtccctttggtacgtcaagcggaaggcaatcttcatcgtaccctcctccattcttcttccctaagctcgagcatctcttcagaatctgcttcagcattgctgtttgagtgagttttgaagttttcttcattatagccatttgtttttggggttcctgagagataaaagtctttggttgtgtttagggagagagagagagagttatggagaaggagatgggtggatattgagggagttgaggagtatatatttataaataaagattttgtaatgggctatttgtctgtacatatttgtgtaggtaacgtatagagagagagagacatgaagacatgtgcatatgtgtggaaggagatggtgggagccaaaatgttaaaggccagctgaggatttaatttcattgttggtcctctttgtgacattgtggccccttctgatctcctggtccttaccaagattacaccataaatactatatccttttcatttcctactttctttttcttagttaaatacacttcaaacacgtatgtgactacttgaataaaaataagggcctaaaaatagtttacaaggaaaaacagtcacgtatatttttatatttcttaactcaaatactataagtgataaccacccttctaaaaccgttactatcatgtagaaagacaatgaaaattttatcttccatatatatactaaattgaatcatcgaaaatcttcaaaatttaatggtagaagaaaatgtacacatgtagtctctctctgttgagaggtgtcatcgaagagcgtaaatcacggactttggaaagagtaatgtactgaagggtacaaagtagaagaagagtgtttggagtgttgttaaatgtggttcgagagagtgtgcctgtgacactttcagacaaatttcttctaccttttttttgcaggcacccatgtgcatctctcatactctatttttttttctctctttttattaatttctgtgttttctgatcgtttttcttttccaacggtagacgttgcagttaatcctcagccttctctttttctttctttttataatcaaatatcttttcaaaatactcttaaatacgcgtcttggtatttacaaattttaaaaagaaactatttaggacacacaaaaatataaggattaggtcttagtcaccgtttgaagtaagttttcttcgcagcatgatgttgaactggaagtacaatgctgccgacgtttgatatacggaaataatattttacaaatgaacttaaactcttcttaacactaaaaccaaaaaaaaaacttaaactcttctttccatattccatgtgaggtttcactgttttaaattgctcaccaaaagggctttaattacaatttgaatctattttactacaaaacgattagtttactatcagtggctctaaattctactctaatcaaattaataggttacacaaatttgtttgctataaatacatataaatataatctgatatactcttattatttatatttgcaatatttttagtttaaagccctaggtcaatcggaaaacccgtaagggtggtctggctctttctccacaaccaagaacctgactttcttcaaccaagagcctgactgcacttttcccatgagataattagttgataaaagttctatgtttttatcctcttttcttcgaagtaaggtaaggtaacacttatgatattttcaatagatgtcttatcttaactagatattgttcgaaagagcaaactgcaatgtttgtttgatagagttcatttactagctagatagccaaatattgcaatttatctgtaaaaaaaggcagtgctaaaatcataaatagtggatattgttttttcgcatctttaaaatatatagttgtgtgatatcatgtaaaatagtttatcaaacaagaaagagattatatgtttttaatagagctacacatcatgacttttgttgtaaacacttgcttatttacagatttgcaaaacattatttttagaagtacacctatagaacttgactatctagtgcatcttcataaatatcgtagatatgtatggtaatgttttattaattcgatctgcacactctcaagaaaaagaaaatcttcggactattattttaagatacgcaggacacttttcttcccattccccgatatatacaatctttgactgaaatataaagctaaaaatgctattgtcaatattaaaagtgcttatatttgcataaaaactgaaaataattgattgggacagtaacaaatcgaacccaaaaactaattctatagactggagcttaactaatatttgctcgtttatataaaatactatgaatataagtatatttgttctcttcatttgcgtgtgcggaccagacccaatcaatagattcgctcatattacccaaaaaattgaaaaatgctgatatgactctgttttgtgcctaaacacagaagctttaacggttggactcaagatgtcagtgtgctttatttctttttgacagcaaaagtcagtgagctattttagttttgaaggtttaactactttggttagagacgagaaatttatgtttttttagctaaaatgagtaagtgggaaaataagttgttttaacacctacggcatattaagtgcgaaaagaagttttttttttgttcaacaagtggaaaataatatttttcctcaaaatatactttccatagtcgacgggattggtttagtcacaaaacttagaaagttagatagtcataatctaaaattaattattattaaagcaaacatggttttgtcttaaacaatcccatatgcactgtcttgggggctacggcccatgcgtttaggagccacctatgtttattaggtcctaatcatctttgtcctaatcgactcttgattattatataaaaatttgaagctttccctttttttttttttttttgtagcttactttttgataattgtgagattcattttgtataaaaacttaattaaatctttaattgacaagtttttgttcaatttatgagtttgtaaaatttgacgatgaatgtattgatccacgttctatatatatattatttaccatttaaatttatcttaaatataggattatttctaacacaacttctcaaaataaagacggtcagaattgatatatccttacttccttaggaagacgtcttgatctaacacaacgatagacgttctcttagataatacaaccgagaaaatcaggaactcttttcttctttcgtattgtctttcactttcgtgaaatttgtttctaatatatttttctatatacattcattaagttctaaggttgtttgccagtctaatctaatctaatgtacgtaatttatccagttttaaagtaattaacgactagcgtaaaagtgtttttcttttgttacaatttatggtgtacgcgattacagaatatccaccatcatcgtaaagtaaactatctctcgcaaatttagcatcacaattattgattataaaccattttgtttctgttttcttttttctctaattaacgacatattttgcatttcttttatcaatcactattttatgcctaatgtatagactctttacgttatttctttatgtctaaaatattgatttgttttctcacttcaaatttttaagaaaatataaacgatcccccaaaactattttccgattgtatcttttttttcgtaatacattacctcccaaccttgtcataggttgtattatataatacatatgtataattaatgagatataagatattctgaaccaaaaaaaaaaagagaaacatataagagataaatggtagaattataaagcaaaggtggtccaagggaaacatcgtgacttatctcttgtaggagcagcatatgtgtattcctattgacgtttttactgtgttgtctttttaggtattgtcattttgtcttatagattctggttttaatatgcttcagttaaaactaccatggcatctggctagggttgtgcctagacttttggggtcaaagagggaaaacaggtttattgtcgacgatcaaaaggatgggagggttagtaaagaaaaataaatagacgtagaggtacgtagtcatgcattttatttgttaggtgttggtttgcatgttctgtgacacaggatggatcgtgagaatacgtgattgaaacaagatgaccatgagcatatgggaccatattgtttttcattttatttattactaattattatattttgtttatgtttttttctaaattttctattggctggtaaatcaaatcaattgaatagttttatttccacagtaaatgttgtcgttcttcgttggtgatgttgtttgatcgtgacattagggtcagtgtgaggctgtgagcacatgaacgccatgttactccttcaccccttttctttcttacgtagataactttttgtcattaatatgtgttttatgaaattattttctttacaaaccataaatgaaatcaatttgaaaaatcagtaaaatttccaaactattttattattttgcggaagccggaagtatacgtcacacaaaacatattaagtttcatatttatagtcattaccgtgcatgtattttacactattattggttaacatacgattcgtcttactcaccatcagttataatttgagtttgaattacccatgaacttattacagacattttttttttaaatatgttgttgttaaagtgaacttatagactgttatggtcataatgttttgaaaggtcaatgattcgagttatacttaatatttttgttacttataatattcctattttttctaatatttagagcatattcatcttaaagctaaattaagggcatggcaactcgattttgtatataagtattagacatgcttaccatgcaattttttttcctttttctagtcgattttaaaaaaaataaaaaagctactttccactgcctcgtcttatcacatattcctgtcacgatgatcatgattttttttttataaaaaattgatcatgaataattacatgcgaatatatacgggtgcatcaaaagaaaaccaatgaaaagcatttttttattgaattggattgaaatgaattaggacagctaattccggacccatccatatatatatcataagcgtcatcagtgtttatatatccagctaatgttggtactttgaaggcgtacgtcaaaaatatgtcgttgcttctcctttttttatgatgtgatgttgtctactcgcattaacaaattgaaaaatatcaacagaaactttttaaaatatgattatttgaatacatatcttcttcttttcttttttctttttttttttcttttttgtctaaagaaaaaaaaacttttttttttctttttcttattgtagtgacagcaaaacacctcaccattacaactagaatttgaaaattttccttaaattttttattcaatatattatcacattttaaatttatggaagactaataaaaccgtatcaataaaagaatacaatgtaaattatatacataataatgtaatttgacatatctggatgtgttttgatataagaaactctaataaatcattttgaaaaacacatccagatatatctggatagtattaattcatattattatttatttttattaaactatatattcttcatcccctgcctctcgtaaaatggcgtataaagaaatttaaagaaggacaatgagtcaatgacaaagaaaaaaccttatccgggaaaaaaaaaaattaggggttttaggttacttcatatccaatagtctaaatgtttgggccagtaaattacgtggatgggccgaagttaagtagatccattcaagccttgtttttcagatagattttttttgtaaatatgtttaggtcattctttcgtacatcttttgggtaaagaatcaaagcaaacgtcacacgttgcttggactcggatatgttttgacattgtctatactctatacttctcaaaaatgaaatggcatttattttaatcgttttttcaacggtcattttttttaaacagccaacggtcatttatctttttttattaattaccaataagtataaattgcatttatacataatttcgtctcaattcgttttcttcttgtttacggtttaatcatttatccaaagttcaaacgaattcacagcatatatgtacaatacgatttatttcagttcgatacaaagtgtatatggataaattaaaagggtaattacattttcggcaataacatgcattatcgaagttactatttccctccaacaaataaaacacgtcccatatctgccaatttatatttgaaaagttgtcatatattagacgccccctctgtaatttagtgggtcacatcacatgctctctaattatttcatatgagaagccattatccgaaaaaaagaagatgatagatgtaaagccacgaaaatgagaattgcagaaacatggatatccacgaatggaccgtcacaagatcttccaataatatttagcttttttcagtcaaacgtagatagtcagtgagttgatgatgaagccctcgtgttgtacgtagctgccaaacactaacatattcaaatccacccaattaataaagcttcggagcacaataattttatttgcctttttgacctccattatgtcaatagggtcaagaggtcacgaggatataaacaaaaaaatacttggacatttctatttttaatctaaactattatgtataaatttctttaattatatttggagaaaaaatatttgagctattggaagctttgtttttttctgctctattggaagctttcatgaacatttgcaagttgtagatgcatctaagtcacaagtggtgcatgcagacttgctacgtttatataattcatttgaaatttattcgatatattgaattgatcgtttctagaacataatgaagttaatgtaattcaagaataagtttttttaaaaaaactcacaaatctggtttaagaaaaaaaaaaaaagcagagttcttcacaccgaaagttgtacgagttcgatacggtgatctatgtttcggctgaaacgaaaccaacaaaaagtattattagacagaatattaaaacgttgttattttattcgtatggaattgaagtatatatgaaaatagtaactttatttaatttcagaaatatagccacctttgagagaaagcatgacatatgaggaggtggtagatatatggggacagtcttttgctgataatgagaaataactaaacaaagagccattaattagttgcatttgtctgaaagaattttggattttgttcatttagctttttcgttattgctttttatgggtatgttcaattcatctatatatatgcaaagcattatctacagtggttgcaacaaatgcagatgcttttgttcccaaataattaaataatttccacggatgaaaaatatcgattaaatttacatacgtacgccatacttccaagttacagttcactggtaacctaagttttttttttttttttttttaataacctaagaacttttcaacattgaagtaattgcttaagggatgcttgagccaaaagtatgcttttctttcatgaattttgtatattttcatttattttgattgacaggattaatgaatttctcattcagacaattgctttagttagttaataggtagtctaaaatattttaaaactggcggattaaaggcctcggattaggatcggatactgttaactagatatcatttttgttattgaccctgttttttaagataagaaacatttaatcgtccaaatctggaactgccaaaaattgtgatagacaagtagccaaatggttcccgttctctcatgttcatatgtatatgttttaaggacagtcttaacgtggaaccaaataaagttattctaatagtactctgggattggatttaagcttgtatagagaatcgatatgggatgatccgatgtttcgtgtataatatattctctacctctcgcatgtggccttttgaaagtaatgggggctatgatcgatcatatgcctcaccccacaaacaaaagtctaaaatttgaaatagtttgcttaatatggtacgtcaaatcactcacgctaagtatctaacaaagcagtgtatatatccaatttccgaatcatattttaaatttaacatatatatggaatgtataacgtctttatcaaaagtaataatctcttacaagttgattgtgttaacatgtttccactttcttattttggttctattcatataagagatggtagggtcttataattcatatatattaggaatggtagggtcttataaacatgtttcacggaaatgaaagaaaaacaaagtggtttctaaaaggacaaggcataagcatgtgaacttcatccattagctccacctgatatgttcctcaaacttttacactcttcaataacttgcggtcaaaatttcagtagattctctatatatacttataaaactaagagaaacttgcttacaaacctaacccatttcagtagaagcccaagacattcaaacattcttggtcaaatattcaccacctaaaaagttctttcaaaatctcccttcttactcatttgcattagtcctcaaagatgggtatccaattgatcggactctctcaggcaaagcaaaagcttcaaagaagcttatcagcgagaatcgcaagcctcttggctacgtcgggtactaataatgtcccaaagggtcatgtggccgtctatgtgggagagacttatcacaggaagagatttgtgatacctatatcgtatttaaaccacccattgttccaaggtttgttgaacctcgcggaagaagagttcgggttcgaccatcccatgggaggtctcaccatcccttgcactgaagattacttcaccgctctagcttctattctaagtggttcatgataagggagctcattgatcatcacaacattcattaagtttctttatacaaatctttgtgtttctcttaaaatgtatttaaggggggagagaaaataactcgagactgagaaactaagtgagtctctttcaatttttgatctaaaatgatcttgtgagttcttttaaccattccatttgtaaagaattcactatctgaaaaattaatctatgattctttttgtccattaacagttatagcctttggatgtgaaatctcattagcatagtaagaagtatccacaaatatatatgcctcaaacatctcctgcaggagcgtaccttggaatatcaaaatatatactagaaacacacaaatattaaaatttacatagataatatatgtataataatgtttgtagcaatatctgaaatattattggatttgagagtactcgtaaactaaaacaatgaaagatgatcaaatctattagtgaattacataaatatatagtactgttaactagagtatataaaactgttccaagaaatctatatttaataaagttttagattttatgtctacagtagttttctcgaaataaataactaaatctttgtataatattggtaaaagagaaatttcccagctaattttctttcttttatacattttggttttgattttgcctagcctcaattacacatagacaataacggctttaccaaacggacaatcaaatactaataccaattaattaatttcagtactaataaatttattacgcttcagacgagaagtgatgtcaagaaagacatctttagcacaaggaattgtgaggtatgtcctctgatgatctgtgccaaattcatcttcggctttacgcaacaaggcttggaacaaaggatggtttaagtaagatattggaaccacaaatctcttcgtctccatctcgtcttctccaacatataccgcaaagtgaccctttcgtacgttgattatgtgtcttaaacgcgatatctttttatcgagtactctcttgacttgaaaaactatagtcttgaatcgaatcatatctatctttcaaatgaactgacttttgtatagcttgaacgaagatacatgcgtagactttgtggctttatcaattttataggggtgaaggtttgttgcttttaggagtagtaattcattgttataaatattaaaggattttgtaacatataaaatagtaaatgaaataaataatggatatgtagcatctaaaatacatattgtgataaaatttgtatttttttctctaactttaagaattaaaaatattatcttctatcttaatttttaaaatgaatctatcacattttctcattatatttttttttttcaacttaaaatttgcaaacaatataagacttcacaaaaaaaaaaagttatctaatttaagatgaaactcataaatatttatgaatacatcaattagagtattagctaatcttcatttatatatgtttccttaaaattttagaatctaccaactgtattagtgcgggccgcaaaaatggtatcagattaaggtgaactctgaatattatatatgattaagatcttaaatggatatactgtataaattttccttataaaaatacatttttatgtttaaatagatatttgtggagaatttttgcattcgcagacacttgaaactcactaattgaacttcctttcactcaacagaaacaatataatgtgaagtcttaattagtgcatgattttttttcagtaaaaagcagtagtaaattaaattaaaattgtctcatttttgaaaaattgtataaaacaaatgattgtttaaaaaaatactcattatatttaagataaacacaaaaaacttgtttagatcactcatgcgttgatcgcgtgattacacaagcctaatatttgttatgttcaatttctctctgcaactcttctcttcccaaacactaaaccatctatctatgtcaagcaactattttaggcctaaatgcgaagaacatgcatctacacaatcaaaaagataagagaaaaaagggatagtaggccataggcagcaaatagctatagatctatggggattttgttttcgatctatatcgatcactaaacagtactatgttgtttgttcaaatttcagtctagccacagtcacaatcatcctcataatcacatgcaaagatgcgagattcagatcttatctaatggcaaataaattgatcaaaactatctatggagctgaaaatttaacaaacaaatacatcacacatattttaatataatactaaaagatttgttatttcaaaattatatatggaaaaccatctcgttactcatctttcgtcccagcagtacggcccctagtttgagagcgaaggaaaatatactttaaaagactttggaacttattatacatactctttcaactataacaatctccaatattgctaaaagtggctcaagaactggacccacttagtctgatccaagtcacattattcaccatttcgaggctctaatttaatataaatacctaactttttatatatatttgcaatcatatacaagaaacttatgttatgtgcattttatttttatataaagatgagctaagccatgtgagccagatggatgacgggagggcccaacagcccacaactttttttttttttttttagtaatcaaaatatcgcatcgtactgtttttttagcattgaaagtcttttccttatcttgaagttacatactttaagttcactactataaatagaaacttcttcccctcgttgtctatcaagtcatttactttttaaaaaaatttacctaaacaaattgataagttccaaacataaataagaagacatgggtttaatgaggtcgatgcttccaaatgcaaagcaaatcttcaaatcacaatctatgaggaacaagaacggatcatcctcaccatcaacaacaacaacaacttcagggcttgttccgaaaggtcacgtagcggtttacgttggagaacaaatggagaagaagaggtttgtggttccaatatcatacttgaaccatcctttgttcagagaatttcttaatcgcgctgaggaagaatgcggatttcatcactctatgggtggcttgacgataccttgtcgagaagagtcgtttctttatctcattacttctcatcagctgcattgaggaacgcattaagtgatgtaatagtcttgagggatttaattaagctgtttttctttcctcttttaagaggagaattatagggaagttacttatgtgtgtatatggtgacacttgttcagagcttaagttgtattttgaaataagttttttttttttttttttaaataagatttgaaaagctagttgagctaaaatttatattcaaatcattaaaagcttttaacttttagtcttttacagtaaaaatggtggaaaataaacgaaactttaaatgcggtaaaaaaacaaattattatatatatctaatggttgaaaaatccatcttacaaagatgagaatttttttgaaattatcacacagtaaatcatcatttgatgatctcctgcaacatgtgacatgcctagacgttattttactatctattacattagcgtttagaaaagcatcatataataaaaacagaaaattttcacataatggaaatctcaattataagttttcatttgttttgtattttatatacccagctctgacttacatcataaatatagtatctcaaaaaaaaaaaaaaaggactttttcaaggaattgaaagtattttaaaggatggtggatcacatgcactctgaagaaactaaaatgggttgtaagtgaataagtgattaataacattagtatgatctatatatgttcttcaaatgcataaatcatatttattgaaaatgattgaaacagtactgcacaattttatcatagtgaactttgtcacaataaatgaaataaatcatatccaaattattgcatatttagattgtcaagctcatgttactctccgttattaggaagagataattgtgatcacaataatggaaatgaagcggagaaaaaaataaataatggaaatgaaacacgtgaccatttttcaataacaactgaaatttcttagaataagcgtaattgcactaatttatatatacgtgcgaataataacaattttcattaatttatgtggatcaaacattgggacttactgatttcaagtagcagtgatattaactcaactgattaattttgttttattaagaaaaaaatcatttcgatcttaccaccgtaatattgcagataagataacaaattaatgatggtcttaagtaaattcatcctggacaaaaaaataaataaatcatacaattaacttgatgttgtagaatcaataattaatgaggatatcgattgaactattgttgtaagttctggtgttataacggaggcgttgagtcccaaaactcatgatatttaactttaattaagaccaacaacttctaccaataaatgttttcgtgatcttgattcaacattctaagaaccctaagaaaccatgcacgttcaatgtttctcattttcatgattccaagcttaatagtaaaaatttaataatataaagttaggtaaagtcaattttacttaagatacaaaagggtcctcttaagtgggctatagggcaacacaaatagactaaaaagccaccattttcaagagccaacaattgacttgtcaaaatgtctattttcatcaataaggacacttgtttctgttgtctattcatgagagccaataggaccaaactggtttcatgtaatggccagagattttaataagtgacagagtgcatgtgagtcctgtaacaatgatgggtccctatctgattatattcattcttaagtcatacagaaatcagaatcagcttgatgctttttctaggtaaaccctagttttttaaaagtataccatgtgaaactctgcaaactcttaatattttaatctaataaaatctgttgtatcattaaaacatgactttgaaatttgattccttacctataaagaactctatatataacaacaacaaccgaaaacacaactccaccaaaaagcatcaatctttctctgatttcataaaacagaatagagatttataaaacttcttgcttttaaagatggcgattagattgtcgcgtgtgatcaactctaaacagtcccaaaaacagcaatctcgagtcccgaaaggacatgttgcggtttatgtcggagaagagatggagagcaagaagagattcgtggttccgatttcgtatttgaaccatccttcatttcaaggtttgcttagtagagcagaggaagagtttggtttcaatcatccaatcggtggattaacgattccatgcagagaagaaacatttgttggtcttttgaattcttatggttgtattgtttcaacttgagacaacttttttgggaaagcccaaaacttttttttttctttctatagaattactttttttgttgttgttccctttgtttatttctgcaaaggagaacatattgattcagcatgtaaatatgttgtgtaacttgtcaaatcaggttatgctcttatgtacttccagaaaacattgatgaaaaatattttcatgttttcgaagataataataacatatgaattcatccgaaatattcatatatagcttgattgatgaattgtacgaagaatcaataattcacccgggtttaaacctgacctaatcatgcattctgtcatatcatttacatttatcttctgtccactacatggccattttgaatatagaatttttcttttcaaaaacatttaattgttatgacttattcaatgtgtataaatcattaagtactatactcattgcaaattaattatagaagtaaacccatagacccttcataattaattagattatctagggacgacttagagcatttgataaaaatcacagttgtcttaacacaaaaatattattttctaagaaaaaaaaccctcaaaattttaatagaaaatgatcaaaacctattttaaaacaaaatagcataacgcttttgaaacaactgaactggccatgttctggacaaatgataggtatctttttaataagcttccttttattacttttttttttctttgctgattgtgatgcattaacctctgtacatgtcaattttcagaatgtagaggtctgtgatttgcaaatatttgtagacttgtagtttgagtgtacatggtagtttggtagataggatcatggcagttacatatcgtgcattaaaaagacgttagagagaatgacattccaacaaaaagatcacaacagccctttagaacatcttaaagatttacaagatgcggatcaaatcaagacaacagatcaatgtcatactctagttcatgatgacttcctttatgatataaaaaacacagtcgtatatatcaacatctaactaatccggataattaccaaatagcaatatttatataagaaaatctatccaaataaccatacatgttccgatcgatggtcaactcgaagagccatatatgctacaaaaccgtactaaccttgtcatttcaaagagttttaaatattactgaacatttgttttagagacgttaatcaaagataacaattgtggagttctgcaactagaaaattaagaaacatttccaagaagagtccatgtgattagagactgaatttgggtgatagatactactcaacaaatcaaagatcaaaatctcaattaattgaagttatttgcggccgtcatgatttgctactcagaagattcgcatcgatcagacgaaaccaatccaatgattaaccaaattgagcatttattctgtatttaaattggaaatatgagattggttacatgtatcctgaatctttgcttcatgttcattgcaatttcatccaatgtgccaagttgctctctatcttctttctaccttctttgtccacttgttattatctttttaaagcacatcttctatgttgaagagaaacaaatgatagtcagaactttctcagaaaatttagatttaatattcaaaaacagtattatagtgatatcttgatttttcaacttagttttattatttttatattagtaagaacagataactttttgttggagaacttgatgaatgagttaagccatgtgagaagatatataagtcaaacaacttacacgagaaataaaataaaataataaagcccattaaatgtccttaaatcattgaaaagctatgaatatatattatttcaaagatttcgattagtataaatagaggcaatcgtcaccaccttttatcatctcaaacattgtggtgtatgaagaaaaaaaaactttcattcaaagcaaaaagaaagatgggtctgagccgttttgcgatatcaaatgcaacaaagcagatattgaagctaaactcattggcaaacagaaaccgaacctcatcatcatcatcggatcatgtccctaaaggacacgtagcagtttatgtaggagaacagattgagatggagaagaagagattcgtggttccaatatcgtttctgaatcatccttccttcaaagagttccttagtcgagcagaggaagagtttggattcaatcatccaatgggaggcttgaccattccttgtagagaagaagtttttcttgatctcatcgcttctcggttacaataagaaaagttgcaagtttttttttagtagaattgtatttatagagatcttgaggattttgtttcttgagattaagaatgtatcttttcatcaattttcttcccatgtattttttttttaaatcatggagaatcaagaagaattgatctatttctatgagtctcttaactaacaactcttgaaatggaatataacgagttctgatatttgttaatatattttcctgattacattataagaatcatttactatattattttcaagcgaaaacgaataaatacaaagtttttttttttgtagatatacagagaccaactgctttaccatgcaattaacttcttgtcaatatgcaacatcctcatgcaagaactaaagcttatgcagaaaagtaatgaagcaaaacttgaatcttcaccttctgctgcgacgctggaggaatgctgtgatgtaacatgtactgagtatatatatgaagttccgtggaactactaatccttcaaaacaaaacaaaaactctcataggttaaggatcaaaatggggacgccttctcagtttctcactcaagtgacaggttccctagtcgaatgctgcgttgctgacgactgatttggtttcctaatggtacttgcgatgatcttaaatcccctggtttcccaccagagaatggcgaatcgagctttggttgaaaccagttcttcaaagaaacaccattgattcttaatcttgaatcctttctatgatatggtatatctaaccttctcaacaatgcaccaatttcctgtccgaccctgtcagcaaaagggagggatgatcttaggatctcatatgactcagaatatacgatttaacagtaaacatcatcactgtatactaaaaaagaaataggatactcttgattcaccttcctgtaaggtcaattgtcttctctccttcaggagtcctaatttccttctcttgaatggaaatgatcaaattaatgtgaggtatcttcgcacctgaaacatatatgacctcaacgcctttcagaaatttaatcaactagtttgatcttcacaactaacaatttggttaactaaacccaactaaacttatcctactttgaaaagcaatggttctagagaacaagttatcttaccagcagcaaggcgatgcttaagacctttaaagatggttaacaggtaaacctgtcaaattattcatgacaaagttagataaatgagaatcccaaaactgctgaaacagagagatattgatatatgctcctttttgtttttcaactacagtttgatgtaaattttaaacagttcatgatcactggaaatttgaagcaaatatcaaaatgaggaagaaaaggaggggccagaaagaaagggatcctctgtcaggaacatttaggatctaacaaccttcccagctatgaatatctttgggaaccagaagatgatcttgcaaagacatgtaaaagttattcaaccaataaaaggttatttacctcagcaacgtttttcggcaattctgtcgtgtcaaaaaatagtggaattttattgaatgacacagaaggaagaactccaagagaagtagcctcctgcataatcatgaaacatataaactctgtacatctaatgagacccagaagaatctatatatctaaatgaagctaccaacaaacctcaagcagtgaaaatgcacgaggatcatactctccaaatccatcgactagtgggaatatgttatgttgtttttgtgaagaaatgtttatgcctaaagtcgaaatcagcctatcccgcaaagcagcatcatgtggaagttgcaagcaccccaaaacttgtgaaactacttctgtagtaggaaccgttccacctgaaattgtctcgcggtaaaccatcaaagccattgatgtcctgaaagaaagggaaatttatcaatattaacctggagttggtttctggtgtatgtctttagtgaagaagagagagtaacacaactatatgatcaaatccaacaaatttactgaaacctcaatcaagagtgctttaactgggaagtatcataagattttctcgaccccttcccaacattatgaagaagagttccacacttaataattgaaaaaggaagcaatactgaccatttattttcaatttgagggcgccctgatttgaaggacacaacaggttcaccaccagcgcaagctttctcaaaccttcgtttgcataggcctttacaaaacagcaaaaaagacaaacaaacactttcatatctgactgcatcatgatggacacagatacatctaaagaaatattaattctctgagcctcaaagaatgaggaaagagatgaatacaaaatacaagcttactggttatgcatctgcacatgatcaagtttggtgatactccatctccttttgcttgagaaaggagcttaaagcttacctcaaagtcatcctttctacaaagggaaaattcagaaaacaatgaattctcaaatctacatagtgatcaacgagcctaaataattcaactaaaaagaagatacctctcacttgccagcatgagcatagagtaagtgatagtatttggttttaaccctaaagtctttatctcatcaagatattccatagccttgggcagttgattaccttcacctgttgataatttaaggagtcataccactaatgatattttgtatgggatactgcaagtgtagtaataccataacacattttcttttcaatcttatactatatcatctttctcttttgttttaggggaaaagataaagatagcattgaaggaggtcttacacaaagcagttataagggcattcattgttgaaattgttggtctaagtttgattgacttgattttttcatagagctccagtgctttcttccaatctttcgcctaagtaaaaaacaaaataagattatcagtattttctccataaaagtttaatccaagaaagtcaatgcaatcgcaacattccaaaaccctaagataatgtaaactacatctcaaaaactactttgatcaaataaggatcttttgatgctacatgttcaccaaagttctgtttctccttaatccaccacgtattctaatgatttgacgtagaaagctcaaaacttgtaagtaataataaaaactcctgctacagcaataaaaggcacatacgttacaacaagctcccatcagtgagctatatgatatagttccaagacgtatcccttgagattttgcatcctgaagaatgccaaaagcctcgtctaacatttttgcatgtcctgcaacatcaatcaatgcactaaaaaacacctgcataagatgaaaaccaagattcaataaatatgtatgtataaattcttgtaattaaacacttgcctcagcgactttcatgagttttagcagatatgtcttattttaactcaaaaatgaatttgttagacatacctcgtcaggggtcacgtctttttctttcatgtccttgtatatgctacacgcaaaatcccagtccccagacttgctgcaactattcacagcaatggtatacacttctggagtacccctgattccatatttatggatcatctggtaaacttcttttgctcgttcgacctgcaagaaacttattctcaatcagatggaaagagcaaaaaacagaagaagtaacaggaaaaaaaaagccacacacctgaccagcattacagcatgctttcatcaatgcaccgatcgagatatgatcagggtctatagggtgcgtctcagccttcatttcagctaacacatcaaaagcacggtcgacagctcctgattgaccacatgcagagatgagggcattgaatacaacccggtctggcttaacattctactgcatcgaacatgtcatcaatgtaataattgatttgagattccaaagcagaaatgaacatataagcagaattaaaaaaaaaaaaaactgtagccatgaagaaatagggtattttttgaaatctaaacacatgataggagggcatccaaacttgtggcatgcttaccttagaccttaaaattccatacgcaccaaatgccttagctacttgtccagctctagcacagccatcaataagtgcaccaaatgtgtgaagattggcttccactccagaatttgacatctggtggaacacctgacaatataaccacacagagagaaagagagttagagctatggagtttgagtgcagtcatattttgaagcttgattagacaataataacatttcctctgtcgggaaccaagaataacatacagaaccattcagacaaacattagactagtatcagtgattttccccagaaatctatcatgcatcatgattttgacagagattcaaagaaccagccaaatatgtatctttgtccaaaataactttccggcacaggaaggtttctatacctcgaacattgcatcaacttttccacttttagcacaacttgatattaaagttgtgtaaagtttgcaatcagcagtcataccgctctcttgtaccagacgtaacactccccgagctcctacataagtaacaattcaacatctaggagaataaaaaatgaataagaccagtgatttaatactggaaatatgaaatatcaccttctatgtcctgggagcttgcgcagacagacattaacatattgaatgtgctcatggttggatttagaatcaacttggtaaagcgaaatgcttccttgacagccctttgcttcttgcaggctttaaagaaactcgcatgataaatctgatgtgaggaaattgggaaaaacagatcagtgacaaactcccaatagaagcaatactaaaggtttcatccatattgctgaggaaagcagtcgtaccttgtccatgtccaatagatccctttggtccaaatcttcgagcaagcttatgcaatcctttatcctgttataataaatattaacactctcaaagtcaaacaatctagaacttctcattggtactaaaacatccaagtaaagaattagcagtgacagaagaggaaggaaaggaaagccaagattcaaaccagataaaacttattaccttccatctctaagtaaacggttgtaagcatcactagtttctggagaacgtccattactattatgtagctcaaaatttcgagcagggaactggggcatgctttcatcaatttggtgacccacatgcttcccatcacttggaaatttccagtctcctttaacatctttcctaatgtgggatacaccaccgttactgtgtgccacaaggttttcttcttgcacatcacctgaaacggaaattaactttaaggaaacattgtaatggattggcaatgcaagcttcttagaaagcaaacataagattgtgtcaaatctgacacagtaagtacaacattgtcaacgtaccagtagcctgaccagaactctgtcctgggaactgagtatcaattactccattgttcttgtggtccaggaataaactattagttgcagaagtaacagcaggagagacggctttaagacttggcaaccgtgatgacttggctgatgaatgattagacccatagaatgtgtgaatctcttctctcttactctcggcaaagatgctgtactcgagaggcttctggagcaaaccattgtactcatactctagagcacgtgtatcatctaccacctgtggagaagcaatcgaatgaattcccaccactgcctgtgaaaaatcatgctccaaacccttctgatcttcgctatttccaacttgtttttcaggtgtttttactccaaaggtagctgattccaaagcaacagacccattaacaatagaagatgaaaaggattcatctattaaggtatgtgccgtggcaactgtggtcacactagcaacagcaaactgagaatcctcagctgaaactgaatcataatccatcacagcaacttcatggatttgatgagccttttcttcctccaaaagattcacactttcttcctctacctttctgaaacctacatttatttccacaggattgccttcatgaatatctccatgaatttcccgccgattctcagcactattttttccgccatgaaccgttgcaacctgaaaagcttagctagtcagaaccagaattcttatcgaattttacaaaaagtcagcaactttatgcactctaatgaaacaaaacttaaaaattagttaaaacaagcaaaacccttcgctcagaaatttcagttacctcatcggaagatttccgcttcctgaaagtactttggcaataagcgaaagcaatggcagagaacgcagtgacagcaacaacaataagaatcaaaccagaatcgatagaagctctaacaactaaacgaggcgatcgaattgaagaacgacgagaattgcgtttcccggcgcgagttcgaagatgaggagaaggacggagactatgacaacaaccaagaaaatcacggcggagagtagaagccggaagaatcaccggagagtacgaagttaaggtaaggtatttagaagatctggtagtggagatgaaggtggtggaggtaacctccattggagaggcttagagagaaaacgattagaggataaagcttcagagaaggaagtgaggatatgaaataacgaacgactctcttcttcgcattgtggaccccttgcttacgtggcataaacggccgtcaagtcgtcaacgttgtttatattaaaaaaaacatattttattaattatgctaaaattttattgggcctgggtccgagtagtggataggattcgggtcggatccgggtttttgttttccgggggaaatctagaaatttgatcttgacgaatcgccggcgacggattctcagacgctgctatggaaggtgttatgggtcaggtagagaaacggccgatttctaccatcgtcttcatcgttggtactattttgtctttactatttctcgaattgtgatttttttttcttcttctaatgggtttgtgtattaaaagctatgcaaaaggaagctcagcctctgatcaacagattacgcctcgttgaagaagttaatactccgtgagttctttgacctctttcaattttttattttgattcgaaatcaaatgtgatagcttttttgtaggtttccaaaagaggtgacttggattatgtttaagggaatgtataaagacttgaacatcaatatagtgtgtcctggaaaagattcaactcttggtatgtgtatccatgtggttaagtgattgtaagtgaaatagtgtttcaagatgttttgtgaagttcttgatgttaattcgtttttcaggggttgagagtgttggcacagttcctgcatcactcgtgacttatgcttccattctagcaattcaaccagacttaatcattaatgcgggaaccgctggtggctttaaggtatcaacattacaaatttctctacatagttctcgtttcatgcctcttatgtgtcagaaataatgaacacccttccttgtttttaaatggtcttttcaggccaaaggagcatgtattagcgatgtttatgttgtctctactgttgctttccatgacagaagaatacctgttcctgtaagtgctcctttgtattgttcatgtatcagtatgagttgcaaagtaaacctgatgttcttgagtgttatacttgcattctaattccatatatttttgccctttcctaaacatttttatactttctgcaggtccttgatatatatggtgttggtatgcggaacaccttccccacacccaaccttataaaggagctgaacctaaaggtgtatactttattagttgctctgagttcaccatttgatcctcatgcaagattttggttatttcttgatatggtttgcataagtggtagatttatgatttagttgcaatgttcccaggtgggaagattatccactggcgattctatggatatgtctccacatgacgaagaatccatcacagcaaatgatgctacagttaaagatatggaggtcaacaatccataagtttcctgtgttgatgtacctggctccatactatgtgtttgtctttgtgtctttatcagttactacgacttatttacggattcttggcatttcagggagcagcagtggcctatgtggctgatatctttaaagtgcctacgattctaataaaaggtgtgactgatattgtggatggcaatagaccaacttctgaagaatttttggagaacttagctgcagtcactgccaaacttgatgagtcacttaccaaagtgattgacttcatcagtgggaaatgtctctcagacctctaacaagtcatacgtattaagtttcatctgttcagtatgtgcattgggcgaagaaagcatatgaagattcaagcaaagggcgtaggtagggaataggtttgagcagaaatttcaactcttcaccttttctcatttgttcctctatttctttttgctgtctttctattgatgatccatcatacatgtagaaactcagcaaatttgatacccaacaacagagtcataattctttaatatcaatttcgaatgattgatgttaacagaagaaaaaatttagttagtttctctttcattctttttaagtgtgaagatgtacaaaacaactataactataacacacctttgtgttggcttttaactaagcctaaagactatgtatcaagaaaaaaatctcaaagaactggagttggattttagaaagagccaatgcaataaacatgaagcttctaaatctcacacctactcttcaccaaatatcaactagacagaaataccgcacaatatgcaggtcacaaaactgcaaaagctgcagtgtatatatatgccttcactttgaaccttatttacagacccaagatttgagtcttcaacaaacagatacaaatgggaagcatcgatgctgcagtgttgggttcagagaagaaatcaaacccgggaaaagccacaattcttgctctgggaaaagcctttcctcaccagctagtaatgcaagagtacttagtcgatggctacttcaaaaccaccaagtgtgatgaccctgaactcaaacagaaacttactcgtctctgtaatctcttcattttaacctctgttttcaactttttatctcattctgtaagctcctgcaacagcaactgaggtttgtttgaactgttcgtttactatatacaggcaagacaacaacggtgaagacaaggtatgttgtgatgtcagaggagattctcaagaagtacccagaacttgccattgaaggaggatccacagtgacgcagcgtctagacatctgcaacgatgcagtgaccgagatggcagtagaagcctccagagcctgcatcaagaactggggacgttctatttccgacataactcacgttgtctatgtctcctcaagcgaagctcgtcttcctggtggggacttgtacctggccaaggggcttggactcagtcctgacacacaccgtgttctgctctactttgttggctgttctggtggcgttgcaggtctccgtgtagccaaagacatcgccgagaataatccgggcagtagagttttgcttgccacgtctgagacaaccatcattgggttcaagcccccaagtgtggatagaccgtatgatcttgttggggtcgcgttgtttggtgatggagccggagctatgatcattggatccgatccagacccgatctgcgagaagcctctctttgagcttcatactgcaatacagaactttttacctggtaaaagaccacaagatttatgcatccagttatgtctataccttgagactattcttggataaatatggattttcattttcatggcgcagaaacagagaagacgatagatggaaggctaacagaacaagggataaacttcaagctatcgagagagcttccacagataatagaagacaatgtggagaatttctgcaagaagctaataggaaaagcgggactggctcataagaactataaccagatgttctgggcggttcatccaggtggaccagccatcttgaaccggattgaaaagcggcttaacctgtcgcctgagaagctgagtccaagcagaagagctctcatggactatggcaatgcgagcagcaattcaattgtttatgtgctggagtatatgttggaggagagcaagaaagtgaggaacatgaatgaagaagaaaacgagtggggtctgattcttgcttttggacctggtgttacatttgaaggcattatcgctcgaaaccttgatgtctgaacaataagtttttaccttgcagatcgagaaagaaccccttatgctttaataaagacatgaagctaaacatacgaaatattttttacgatgcttaaatctttcatagtctaaaaatatttcacaaagcaagcaacgtaaaatttgcaattgaaaaatgaagaaaagagtcgttatcagcattaaagccaggaatcacgaagaaggttcttcttagctcatctctttccaacgttttcaacaagtccaggagttggatcttctcataacgggtttcatctgtttgtcttcctcaagacaaaccataccaacatgtgacggatcttccagcatcatcttggctactaagtatcctgcgactgaccaagtctggtttttacgcgactgtttccccacgtatctccctacctttccatcatagtattcaggccagtggtccttatgaagcctagcctctgctacttcaattgctcgtcttgctatttgaggtcgaccagttttgatacaagcagccgtcagaagccatagcagcactgtgtaccattaaacataattacatcaataagggtcagaatagcaatttactaggattaagataccacagaggaaccagaagaacactgggaaaggagagattcctttgtagtccaatcaaaagtacaagagaaaaggcaaacctggccacgatcctccattgtggtagctccaccgagtgtttttggggtcacaaccagttactattctccattcatggctttctatggcgggatagcaaactttcagtggcatttctccaaccaactcttcccagcgagattctatcagatccataattgctgtcgactgttcaggtgtagccaaggaagacaatattgctatacaattacccaaagcaaaccaacggaaatccattcttgcagggctaacgttgccaataaagaaccctccgtgaggcggcataaagtcgaaaacccattctggaagagaatcagggattacgttgaacttgttgacagcagtgtgagagtattcctctgtcttatatcggtaaatgtcattaagctgcttcaagtctagccaaaagtagctcctcatgtggtagctcaatgcatgaagtcgcttcactatctgttccaccatttctttaccttctccgtcatgtttaagcaggagcaaggcacaccttaaggccataaagaaaagggcttgaatctctatcgggtaaccataaactccctacaacaaaaaaagcacaaaattaaaagatggaaaactgatgaagcacctagctcaaactctccttgtagaaagaatcactagaaataactaataaagtaaatttgctgcttaccatcctacgatcaatcatacagcaaccatcagcacataagagagtggggaaggtatcaaatccctcagacagacacaggctaagtatcagccgaatacccttctggcattcaggcatgtcagcaagagaagagtctcctgtagattttgtgtaggctctgagcaatataatccaccaaaaccctgaatcaaccggcgctactcttccaatagcactctcgccaaaatcagctatcagcgtttcatggtttctaacaggatcatggaaaactttgaagctagcaggcataacaccctcaccaagctggaatctatcaatctttttctcccaagattgaagacgaagagtcttcaaaaggaagtttttaactatatctggctctccattcatcaagaatgctaaagcacttggtacaaaatctctcacgaacaccttaaggataaagtcaatgcagagatacaaggtcaatgacagtaaaatgtggttattcagaagttttcagaagatataaagattcttcacctgatcatagttgagtttttcttcagaattatccacagcagcaatagtgccaacaggttgtccacgaaagtaaaccattgagcgcctcaaagcatcccaggcctcaccaaccataggatgagactcaaatccaggctgtgacctaggagtattgaatccagacctcctaccaaagcttggtgaaatcacataatccgcatgatcaggggcccgagaagcattatccgcatttctaagctgtggtgaaccagttaattcagtaagagacctttcgtcaagtgatctcagtctatcaatattcaatggccttggcttctctagcaacttggcaaaatcaatgtcatcaatatcgtccaatgtagataaagaatcaacattcttgatattcccattctgattcacatctacactcagattaaaactcgacatagctccaggttgattcaaatcttaaccaacaagtccaattatcaatgccctgcatttccacaaatcaatcagatccatttagctcgcaatacagaacagaggtcttctataattcactaagaaattgaaggaaaacaacaccaaaacaatgtcatgatcaaacgtgtaaacaggttatagacaaactggattgggcatcctcagttgaaaaatgtaatcaaaccttccttcaagactgttctatacaagattaatgtaaaccggatcaaatcagaacacaaacaacagagaaacttcacgaacaacagaaattgaacatcgaaacgtcggattccatgtaatcacaaagaacaagaaaacaaaccggagagatttcgactcggttttaacgatatcacgcacagaaacgatcggaaacaaaactctcgtcaagctaaagcacgcggagagatccggtgaaagcaaagcaggaaaaataacttcatcaaccgtaacgttcataaccagaggaagacgtagatagatcacgaaccttatgaatccagcgtcggatgaagagaaagaagacgatacgaaacgagcttcgctttctctcttctctctcagaagcgagagtatcactgagttgataggtacaagtaattaaacgagagagagagagacgaaacggccaaaggtataagacgatatcaatcagctagtgagcttaaagaggatgtgggtccacgtgtacggacgagatgtgactgtgatgggaagatagagactagcacagtaactctagcgatcgggaaggtgaagcctaaaccctttaagccatgcatatgatatgatttgcacggaggttgtttgctttttgtatgcattttatttgtaatttgatttattaaaatgttttttttgcgatttacctactaaactataattacaagttaaataatttttagtgacgtgagagagtatctttgcagtgagtaaaatgtttggttgtccacgtgtgcggtggcagtggatctcgtgccctgcgcagcctgctgcatattggttgtttctttctgaatttttgttttttaaaactttgaattttagttttggcaagtttgtccttcaaaattagtaatagtcattgttgttgataatgacactaagaaaaggtcgtatagtttgctaacgttggagaaagaatattactagctttaagattactaaaatgattgtgtctattggacaactccaaaagtttcttttgcgatgctttgatttgattttacttttggaatttagggacataaatacttcttttgttaagaacttaagattattcgaatctagacagtagtgtgatactaatagtgtataaaatatgatgaaaattgttgaaagaaagattccggctatagaccattgttaggagtcgctgatccaaaaaccatatgtttaagaattgatgatgacttcgtacttagttttttttttttcagtttggactttggattcacatattgatgtgacatgaaaataatcaaatcactttgccaaactaaacaaagtggcctaatctagtaaaaagtaaaatctactaatcccacccaaggcataattagtctcattcaacgcaaatcattacttacattttctggctttctttttgtttaaggctttaatcattacttatctttgtctccaacattcttattttgaaggatatgagtggtcatagtctaccaaccgatgtaaaggaagtggatcaaggtcaataagcaaaaaaagaaagaaaaagagtgaattgtataaaagaagcgaaataagcaaaaacaaaagtgaatattcagctcaaaacctccctcattattctactttttatttgtttttcaagtaaatcgacgttaatgtaactatgcaagtcataagtaagatcattgttcgaagaaaataagatcgtgaatccagtaaatatcccatcatacaagcgttcacgtgcagaaagataatcactacctaaatgatttaaatgggagtgtcaatagaatcggataacgagtgttgtggcaaaaaaatgctcaatcatacaccaaaaaattgtaatgttaaaataagatattgggctttaggcttttggagtcggcccacctaaactccaacgccgtaattctgtcggtccatctaaaaagaatcaaatcaattatggaaaggagcctaggatccacgcgacttcaaccctagtcagatccgattcaaccacggttaatttccatatcatcacagctctacacgtgtcataaatcaacggtcaccaacataatttccattttcagattcaccgttttagaaattaaatcctctctataagaacctctccaaaaaccctaatttgtcatcatcactttcacaatcttcttcatcgatttctctcttccaaatctcccaaaagatgtcgaaccctagagttttcttcgacatgagtctcagcggtactcccatcggacggatcgagatggagcttttcgctgatacaaccccaaacacggcggagaatttccgtgctctctgtaccggcgagaaaggaatgggaaagctaggtaagccacttcacttcaaaggatcgatcttccaccgtgtgattcccggattcatgtgtcaaggaggtgatttcaccgccaagaacggaaccggtggtgaatcgatctacggtgctaagttcaaggacgagaactttatcaagaagcatacaggagctgggattctctcaatggctaactctggtcctaacactaacggatctcagttcttcatctgtaccgataagacgtcgtggttagatggtaagcacgttgtgtttggacaagttgttaaaggcttggacgtcgtgaaggcgattgagaaagttggatctgattctggaaagacttccaaagtcgttaccatcactgattgtggtcagctttcttagatctgagtgagaaagtgagagactttgatctttatgagtaataatggtgtcttttgctttcggttgttcttcctcttaccttaatggattattctgtttagggtttgagttttcgtttcagagtttgtaacaaaacccttttgtgttttctggggtttgaaataattatgagcttacccaattgcttctttgtgtttttgcttctatgaacaagtagtaactgattcgtcttctgattcttcaactgaatcgtgaatcttgtaagactgactagaaaaaagaagactttgttacacgcaaatctgtttaacaggaaaaaaaatacaatctttttgaggagatgattgataaaccttagcacaactctcaatcttaaattcaatcgtttcgtctcacaaaagctacataaatgaacgtcaaattttcatacttgtatgagttaaaaaatgtaatgcaagtaaagtacactcaaatatgtaacacagtttggttgattttcgttaacgatgttatcaaatctcgtttagtaaagcaatcgagttattggcgttgaccattttcctttctctttctctagccatggttgctctgcgtttcttcttcttctcatctcttcttattcttcttattctttctcaagctcttattatgtcagttggatctgcctctcagatcaggcttagctcaacgttctcgatccaagaagctaccattgaagacattagagttgctttcaacgagaaacgactaacatcaaagcagcttgtggagttgtatctcgaagcaatctccaaacttaatccaatactccacgcagtcatcgagacgaatcctgatgcgttgatccaagcagagatcgcagacagagaacgtgaccttaaaaacaccactaagcttcctatcttgcacggtgttccggttcttctcaaggattccatatctaccaaggacaagcttaacaccacggctggctcgtttgccttgcttggttcggtcgtggctcgagacgcgggtgttgttaaaagactgagagaatctggtgctgtgatcttgggcaaagccagtttaagtgaatgggctcattttcgatctttctccatcccagatggttggagcgcacgtggcctccaaggaaaggttactttcttcattcatgacattcatttctctataactatttggtaaaccaaacatcttacaaaaagattctaatgctgcagaatccatatgttttatcagcaaatccgtctgggtcaagtagtggatcagctatatctgtaacagccaatcttgtggcagtgtcactagggactgaaactgatggttccattctgtctccagcaagtcagaactctgtggtcgggattaaaccgagtgtcggactcacgagccgagccggggtagttcctatctccttgagacaggacagtattgggtgagagactaagactctaaaagcacccaaccactactaactgtttgatttgtgtaccattttaccgagtgtttctctatgttttgctgttaggccgatttgtaggacagtgtcggatgctgttcatctccttgatgctattgtgggttatgatccattggacgaggccacgaaaactgcgtccgagttcatacctgaaggcggttacaagcagtttctgacaactagtggcctcaaaggtaagagattagggattgtaatgaagcattcttctcttcttgatcatcacatcaaaacattaaggtaaaatgcgttataagaaaattttcatcatctgagaacaccatatctaattctagttctggttttccttggataaagacgagaaggcgctattgtcattaacaatctgacgataccaaacatcgaagtcattgtgggtgggactgatagtggtgaagagatagcacttttggctgagttcaagatgtctctcaatgcatatcttaaagagcttgtgaaatcaccagtccggtccttagcagatgttattgcctacaacgaggaattcgctgaacaagtaagtactaagcttcaaacgatttcgattttttcttgtttggtagctgaacaaatgtgatcattgaactgaaaaaaacacaggaaaaagtgaaagaatggggacaagaggtgttccttacagcagaagccactagtggaatgggtgagaaagagaaaacagcgttgcagaaaatgaaagaactatcgaggaatggaatcgaaaagctaattgaagagaacaagttagatgcaatagtgacacttggttcagatttgagctctgtcctagccattggagggtatccaggaatcaatgtccctgcaggatacgatagtggaggagttccatatgggattagctttggaggactgagattctcagagccaaagctcattgagattgcttttgcctttgaacaagcaactcttattagaaagccacccaagttcatagcttgagtccccattggagggtatcctctgctttcaaaagttttgtatcatgaaatggttctagtcactcgaataatttaccttgagatttgactgttgtaacttttccctatcgtttttacctttttaatgattacattataactacatttaatattaatatataatacgttaaaagcaaaccaacttattcttagaaaaatggatcggagtgaaaaaaagtctcgctctcttctctctctaacattcttcagagagggagactttatccttattctgccgttcggacgtggtccgatatcgccgttagtttagccgtgacacggctttccgttgccgcgttctttgtcgtccggtttcatgccggcttatgtaccaaatctccgcgatggtcagctctcgtctagcaccgcttagcttcttcagcaacggtggctagctcttgcccggcacgaccggctattctagcggtcatggccggtttatgttcttctttaatttctgaattttgttttagttttgctaataatctcatcggatttatgttgggggtaataatctgtcatatcctcgatggttcttttccctctctatcctttgagttttcaagatgggtttcgccggatcgttttttgaacttaggatttacataatggtttcaaagaaatttttctcttttgttgaaggattgaagattcttccgtcgtttatcacgattccttaagccgttatctttaatttggagctttgatgttttcattctggtgcaaaacacaagaatcatctcaccggaatcagctcaacggcgaaggttgttgccggaaaacttttgattattcatccagcgtgtgacgtggtatatcccggttgtcgacatgtgttcatggatggagttccgatagaatttcttctgcagaaggttatctaatgggccttttttgggctttatgtaattccaaagttggagcttttgtttaagctcttgtatgatatgatgatgtttaataaaacttatgagacaaaaaaaaaaaacttattcttagaatattttctgggaatagctttggaggattgagatactctgcatcaaagctctttgaaattgcttttgcctaagttcagagcttgaggcacttgtagtctataaagttgttgcttgtgagaaacatatctttataaatatatatagtgtatactgcttggtaaatgtatctttacagatatgttacatttatatggagactgaaaataagttacagatatgactttctcacaatagattgatcgatctgtttcccctctgatgatgttcaaagctcaaacactaagattagggtagaaatctgaatttacaaaaggagctgaaaattcgtcgaaacaagccatcctgatacgctctggagtggctggactctctagagggaaccagtctgtgagacccacctcggttctagccgctttaatagcttcctttatcgcaaagaaaaccgatgatgcaagaaagaatggtggctcacccactgctttagatgaatgtattgcctttgtattcggattcccctgatttaatacagtataacctcaggttcagtttcaaatgtgttgctactaccaatttaaagcttggtctcatagttacaaaccttgagaagcgaaacattgaggttgaacggcatgtcgttgatggaaggtattttgtagtttccgggtccgcaagtgagtaaacttcctggtttaatccatttatgagctgcatctccccatttgagttcttctaaagctacccaacccagtccttgtacaaacgctccttctatctgtaaatagtcatttcagatacaacactattcttctaaaagataagaaagtataggagggtaagggaagaacacgcacttgtccaacatcaatggctgggttaagagaatatccgaggtccaacattatatcagctgctcttgtgtggaaatcaccagtcaatgtatctatctcaacttccgcaaaggcagctccatatgtgtaatatctaaaggcgttcccttttccagatatccagtcaaacccaagatcaggaactatgtgaaaaccatgagctgataggtctatccgttgaaagtagcaggcacttactagctacatatactcagagagaaggacatttttttcatcaaaataggcatctaactcttctgagtttatatcacgttgcaagataaaaaaaatacctcagtaaatgtgttgaaattgtgcttagatgcaacaggttccattcttgctataatctgctcacaagcgtctaaaactgcagcaccatacatatcagagctcgcagaagcagcagttggtgacgcattaggaacctatcaagagaccatcaaaacgataagagaggaaaaacatttttgtctgattatgtctcggcccaaagtgtgcagctttgtaattgacttagatgtaccttgtcagtgcttgtctctgacacgaaaactgagctaagtggaatgttaaaggcggatgcagcaacttgagcgacctttgtatgcaatccttgacccatctccacaccaccatgagtcactaaaacagtcccgtcagtgtaaacatgaacaagagctccggcctgtaacatccccataatgtggagggaaaaataaaagataagtattttaaaatttagattctagctttgcaagcaatggtagtgcattggcgaaatttccatggcagattttctcttattgttccagtttctcgacagataactaacttgaaagaaaaaggatccatgtcaaccaaagataacctgattcatgaactttgtggtaaatgatatgccaaattttgtgggaaccatagctacaccacgctttttccaccgattatgactattaaattcgtcagcttctctgcgggcctttaagaagttgcacgatactttcagctctttccagagctgatgcaatgtgcagtgctgaagagtctgacagtaatgggtgactgatccttccacttgaaagttcatctcctaaagtaaagtatatacaccagaaaatattaagataagaaactgataaaaggaggacaacttcctataaactttcaggagatggagatgtttagaaaatattcaactcactttgatttcttcagggcttttattaagctcagctgcgattctttgaatccagttttcagttataagcataccttgggggcctccaaaccctcggaaagcagtgttgctaggaaaattagtaaagcaaacattcccaacaatccttacatgcgggatctcataaacgttatccgagtgaaacatggcacgttcaagaacagaaagggagagatccaaagagttgccaccattgttgtaaatttcaaggtccaacgccaatatttttccttcgttcgtaaatccaacctttaagatagcagaacacaataaaaaaaggaattgtttagtttgtctaacaatctattcccactgtttcttctactgacaaccgtttctttccatttcattgctcactgcctaaaaattccggggaaataactggaaataccttgtactttccaagaaaactatgacgatgaccagttatcatcatgtccacatctcggtccagtatgagtttcacaggtcgattcaataggtaggaaggaacagaagctgccgcagcaatgaaagctgatcttgtttctttaccaccaaagccaccaccaattcgtttggttttgcataccactttagacatcggaagaccaagaacatgcgacacatatttctggtgcttttgaggagcctgcatataaatcacaaccaccaacatttgcttaagcagagacaacattatcatataatatcttaaactagctgatgcctaatagttttcttgtacagagacttaatggtcatgtactggtccgacaaaccaagaataaaaatgaattccactcagtaaagtatatggcagtacactaataatatgcttacctgtgtggatgaaatcatatgaacttcgctgcccccatctactgtccaaaccaaactaccattaggctccaagtagaagtgttcctgaccacccatttgaacctctccctctattaccctgtcacactgaccagattgaaaacacagctcgacatccccttttcttagccttttctctgtgttcggatggaaacttttagcattaatagcctccttgattgataatattgctggtagttcctcatacctaacgtcaacttttcctgctgcagtttttgcattttcatgtgtatccgcgacgaccacaccaatgacctgaaataccaaagtcaatttaatgaaataattgagacgtaagatatacatatatactagatcatatgagaactttcatttacttttttaagatataaacagtactattagaaaactttgctcgtttactttctggtgatcagaagcatgcaccaaaaacagatttgcttataaaaagcatgtaaaatttcttctgagacacaaggaagttctaggctccattgaaaagctaagaaaaaacgtgaaaatttaggtttcaaatttccttacttgtcccacacacgtgaccacatctgtagcaaataattcttcgtcgggaacaattggtccaatcatattatccccaggaatatctttggcaagaaacagaccaacaaaaccagatgaagatttggctgccgaatcatcgattgaaaggatgcgggcatgtggcactttgcttagcacaaaggcagcatgtaaggtattaggaggtactggagtatcatcagtatattccgcttcccctgtgacctacataaaaataataagtgtgttgagataaaatggtacgctcttctctactcaacaacttatagagaattacaccaaaaagagactttgatgggatagaggttcttaactatcaacgacaaaaccatcccaaagccaacaatatccagacaccaaacttatcatttttaccaagcttaaacatattttagagttaagcttatggagttgataatggtgaagtttggagttgagaaaatatgaataccaaggaataaaaaagatacaattaaacagtagacctatgttatatcctgaagtggctaagaaaacaaccagaatgagaatcaaagtggagaaccaatttgggtaaatggaccaacatacctgcattctcgctgaaagatgcacctccgacgagccaacagatgttccctgctttactgtctcatagtcttgttttccaattctagataaccgaggaacaggttgcacagctgacatatgggagggtgggaaggtctctatcgcagaatttgcattattgacattatgagaaacccataagaaaaatttaaagaagaagcttagggttagagatttccgaaactccaccattcccccaggagcatcttccttaatcacgacatcgctctgtatgaccttaagcgcatcctgcagaagatctttattccaattctttccaattagaaactcttcagtctttctcgcacacaaagaaagaggagccacacctccataagcaatggatgcatcagaaacgaacaattgttgacccttgtcttcaagaaacacacgcattccaccattgacaatagctatatcatcatccctgcgatgggcctgcttaaattctttcacatactctaagggtcttgtccatggaaggaataccgacaacaagatctcgttgctccccatatccactttacgataaccgaggaagaaatcttttgcaggtatagacctaacatctccattgcagttggttatccgaaactctgctcttgaagccatccaaagaggatttaaatcagatattggactagctgtacagatgtttccaccaatgcaagcaacatttcttatttgtgtcccagcaaaccacttcagctgttcgataaaagccttgcatgctgatgtttcatgtgcaggacgctcctttactatcttcctgaataacctcaggagttcagaaagtctcaaagctgaaccaacctctatcccattgtcattgacattcaatgcgttgagttctgggacttgagcaacagagatcagcacctgatactgtaacctcttcaatctcatttcgattcccacctctgtattacctaccagtagttttgcatcaggataatttgctttgagctcaagcaagttctgaagacatacgggtctataccaggtaatccccccatttccccttaactttaagggagttaacttcctcagcaaaagttcaggggggaaaataagctccttatctgtatacttagctccatctatatcactataagagattgactgaaatctatcttcattacaactggcaacttcatttgttgtttttgatccacaagagcaaggtttgccagtagatgggcaaatagtagaaccatcttgaaggctaagtgaagatacaccacagtagagagcatcatcagattttgcaaaaacccgaaacgcatcaacaatgggtcgataaccagtacaacgacatagatttcctgcaagacattcttcaatctcctcctcagaaggtgagtttttacttgacctcaacaacgaatacatggacatgataaacccgggagtacaaaacccacattgggaaccatgggaagatgccaaagactcctgagagaatcaagatcataacagtgacaaaagaatctccgcaaaataagaagaaatagaacctgagagaagtaaatcttacctggacagggtgcaagccaagtttgcgatgcccaagtccctcaatggatattacatgcatcccttctacagaatagagaggtgctaggcaagcgttgacagcataatgcctgcaataaaagtttccgtatgaacagagaaagaatcaataagaaggcgcaaatataaactaaacaaagccaacatataggagggacagatacgcacacagaggtctttgacttcctgtcataactagacaccatcaccgtgcaagccccacaaccaccttcgccgcatcccagctttgtaccggtcaatcctaaatctacaagaaacatctgtaagttagaaactacttcatgatcgtttagaaaaaaagattgatctctgcaagtcattttttgtccccaagcgaatctagcaattggagcataatcttactcaaataaagacagtggtctaaaaaaacaaaagaacagtggatcaaacataatctcgatttttttagaatccagaatctataagtcaaacataagcctttttctttaacatactagagtaagaaactaggaatccaaaaaacagaatcttcatagagagtatcagttcaaaattgaattgaaaattaaacttgtttgagtacttgaaatcatccccagcaattggatattaatcaaagaagttgatacgcacctctgagatattcgagaagtgtcatatgagccaatccatcaggcaagactctacgaacgccgttaacgtacagtaacgcctccgtaaactcatctccgatctcgccgtcctttttcagtgaacccatttctcaaattgagagaaaactcgattgggatcgaaacaaaaacgaagatggcgaagttgattacgccaagtcaagagaagcaaaaaaggaataacattttccttttttaataataaaattcgtgttcctttccgatagcatccaccgaatgaatacgcatcttcatcatcatcacttgtgcagtcaatttttttttttttttttttttttttgtaaagaacccaaaatagaaagaacgaaatttaagtttgaacaaagtaaaacaattgaagcctatatgatgtttttacaatgccacttatatatttgtttaactgaattttgctgattatgtttcgtttataaattgtagtctgattagttatgactagtgtgttattgtcttgtcttaagatttactttaaaagaaattttgatgatattgtttgttttatttttggttttgatatatgatgatgataagcgtcttgcattgctcagcataactgcttcacattctttgctcacttgaagttagaggttgttcagaaaaaaaaaatctgatattttatctcgatggcgcgcgcatttagtcaacaaagttgctgctttgaagaaacatgtatcatgttacatcatgtatttggagactggaagtaacttacatatatgactttgacaaaatggattgatccatctttctcccctctattaaagtttaaagctcaaacactaagctttgggcagaaatctgaatttgcaaaaggagctgaaaactcgtcgaaacaagccatcctgatacgctctggagtggctggagtctccagagggaaccagttggtgagacctacctcgcttctagccgctttgattgcttcctttattgcaaagaaggctgatgctgcaagaaagaacggtggctcacccactgctttagatgaatgtattgcctttgcatttggattaccctgagtataatctcatgttcagtttcaaatgtgttgctaccaatttaaacagcttgttcctatagttgcataccttgagaagagaaacattcagttggaacggcatgtcgttgatggaaggtattttgtagcttccgggtccgcaagtgagtaaacttcctggtttaatccatttatgagctgcatctccccacttgagttcttctagagctacccaacctagtccttgtacaaacgctccttctatctgcaaatggtgaatttcagaaataacacttttctctatgattttcttggattttaaacattgcaaaaggccaacgaacagctaaaagcgtaggatgttgagagaagattgcgcacttgtccaatatcaatggttgggttaagagaatatccgagatccaacattatgtctgcttttcttgtgtgaaaatcaccagtcaatgtatctatctcaacttcagcaaaggcagctccatatgtgtaatatctatatgcgttcccttttccagatacccaatcaaattcaagttctggaacaatgtgaaaaccgtgagctgataggtctatacgttgaaagtagcaggcacttgctagctacatacactcagagaaaaagagagttttgttcatcaaaatcttctgagtttatatcaaattgctagaagaaagaaagaatacctcagagaatgtgttgaaattgtgtttagatgcaacaggctccattcttgctataatctgctcacaagcgtctaaaactgcagcaccatacatatcagaactcgcagaagcagcagtaggtgacgcattaggaacctgttacaaggcaatcaaaacgacaagagagcaaaaactgtgaggcatttggaacctattaagagaccacagaaatgataagagagaacaacaacagttttgtctgactacgtcttggccaaaagtccactgcttgtaaccgagttaaatgtaccttgtcggtgcttgtttctgacacaaaaaccgaactaaggagaatgttaaaggccgttgcagcaacttgagcaacctttgtatgcaacccttggcccatctcaacacctccatgtgtcaccaaaacagtcccatcggtgtaaacgtgaacaagagcaccggcctgtgacagccgtttaattatatattggattaagtatctcaaaattcagattctagctttgaacggtagtgcaatggtgagatttccaaggaagctttagcttaatcttttcagttcctcgacagataactaaatttgaaagaaaaggattcacatcaaacaaagataacctgattcatgaactttgtggtaaaggatatgccaaattttgtgggaaccatagctacaccacgctttttccaccgattatgactattaaactcgtccgcttctctacgagtctttaggaagttgctggatactttcagttctttccagagttggtgcaatgtgcagtgctgaagtgactgaaagtaatgtgtgatcgatccttccacttgaaagttcatctcctaaagtaaatatcaccaggaaacattaaactaaacttacaaaaggaggacagattcctacaaactttcaggagatgagtatctttagaaaatattcaactcactttgatttcttcagggattttatccagctcagctgcaattctctgaatccaattttcagttataagcataccttggggccctccaaaccctcggaaagcggtgttgctgggaaaattagtaaagcaaacgttcccaacgatcctcacatgtgggatctcataaacgttatccgagtgaaacatggcacgttcaagattagaaagagagagatccatagagtttccaccattgttgtagatttcaaggtccaacgccaatattttcccttcgttcgtaaatccaacctgtaagatagcagagcacatttaaaaggaatgattagtttgtctaacaatctattcccactctttcttctactttcaactgttttcagtcattttttgattggccgctcattaatggccactgcctaaaaattcaagggaaaaagctggaaacaacagagaaagataccttgtactttccaacgaaactatggcgatgaccagtaatcatcatgtccacatctctgtccagtatgagtttcacgggtcgattcaataggtaggaaggaacagaagctgctgcagcaatgaaagctgatcttgtttccttaccaccaaagccaccaccaagtcgtttggttttgcataccactttagacattggaagaccaagaacatgagacacatatttctggtgctgttgaggagcctgtatataaatcataactaccaatattggcatacgcagagacaacattatcatttaatatcttaaactggctgatgcctaatggttttttgtacgttattctaaatgatgtaaatactaaataatatgctcacttgtgtggatgaaatcatatgaacttcgttgcctccatctatagtccaaaccaaactaccattaggctccaagtaaaagtgttcctgaccacccatttgaacctctccctctattattctgtcacactgaccagattgaaagcacagctcgacatccccttttctaagccttctctctgtgttcggatggaaacttttagcattaatcgcctccttgattgataatattgctggcagttcctgatacctaacgtcaacttttcttgctgcagtttttgcattttcatgtgtatccgcgacaagcacaccaatgacctgaaatacaagattagcttagaaataagggaacgaaagcagtacatgaaaactttttaaacttatttgacgtaacaaaatcaatacatgctcctttacttttctggtatcacttcttctaagatacagataaactaaaagttccccattgaggtttattttcttacttgtcccacacacgtgaccacgtctgtagcaaataattcttcgtcggcaacaattggtccaatcatattattcccgggaacatctttggcaagaaacagaccaacaaaaccagatgaagatttggctgccgaatcatcaactgaaaggatgcgggcatgtggaactttacttagcactaaagcagcatgcaaggtacaaggcggcaatggggtatcatcagtatattctgcttcccctgtgacctagatgaatatacaagagtgttgagatacactctatggaccttcggcgagccaacagatggaccaaaatacctgcattcttgccgaaagatggacctctggcaagccaacagatgtaccctgttttactgtctcatagtcttgttttccaattctagagaaccgaggaacaagttgcacagctgacatatgcgagggtggaaaggtctctatagtgggatttacattatttacatgatgagtaacccataagaaaaatttaaagaagaagcttagggttagagatttgcgaaactccaccattcccccaggagcaccttccttaatcaagacatcactctgtatgaccttaagtgcgtcttgcagaagacatttattccaattcttaccaattagaagttcctcagtgtttcttgcacgcaacgaaagaggagccacaccaccataaacaatagatgcatcagaaacaaacaattgttgccctttctcttcaagaaacacacgcattccaccattgacaatagctatatcatcatccctgcgatgggcctgcttaaattctttcacatactctaaaggccttgtccatggaaggaataccgacaacaagatctcgttgcttcccatatccactttacgatagccaaggaagaaatcttttgcaggtatagatctaacatctccattgcagttgattatccgaaactctgctcttgaagccatccaaagaggatttaaatcagatattggactagctgtacagatgtttccaccaatgcaagcaacatttcttatttgtgtcccagcaaaccacttcagctgttcgataaaagccttgcatgctgatgtttcatgtgcaggacgctcctttactaccttcctgaataacctcaggagttcagaaagtctcaaagctgaaccaacctctatcccattgtcattgacattcaatgcgttgagttctgggacttgagcagcagagattagcaccggatactgtaacctctttagtctcatttcgattcccacctccgtgttaccaaccagtagttttgcatcaggaaaatttgctttgagttcaagcaagttctgaagacttacgggtctataccaggtaatcccctcatttccccctaactttaagggagctaacttcctcagcagaagttcagggggaaaaataagctccttatctgtatacttagctccatctatatcactataagagattgactgaaatctatcttcattacaagtagctgcttcacttgttgtttttgatccacaagaacaaggtttgccagtagatggacaaatatttgaaccgtcctgaaggctaagtgaagataaaccactgtatagagcatcatcagattttgcaaaaacccgaaacgcatcaatgatgggtctataaccagtacaacgacacaaatttcctgcaaggcattcttcaatctcctcctcagaaggtgagtttttacttgacctcaacaaggcatacatcgacatgacaaaaccgggagtacaaaacccacattgagaaccatgcgaagatgccaatgactcctgagagaaatagggagaattaggatcgcagaaatgagaaaaaaaaaatctggaagaagtaaaaccccacctgaagagggtgcaagccaagtttccgatgaccaactccttcaatggatattacatgcatcccttctacagagtagagaggtgctaggcaagcgttgacagcataatgcctgcaataaaagtttccggtatgaacagtataagaaggcctaaacttaagcaaagcagatgcaacctatgagagaaaaagatacgcacacacatgtctttgactctcggtcataactagacaccatcacggtgcaagacccacaaccaccttcgccgcatccgagctttgtcccggtcaatcctaaatctaaaggaaacaaaaaacgttttcaagaatcccaccacacaacaacctaaccctctaaattttgctgcattgtacaatttgtggcttctctactctatctaaacttagattagatataagcatttgaagaaatcaataatatagagttaaaagcacctctgagatattcgagaagcgtcatgtgagctaatccatcaggcaaaactctacgaacaccattaacgtacattattgcctccatgaactcgttctgctccatcttcactgaacccagacgaataactgttatccaataatggcaaatatccaataatggcaaaaatccaataattgcaaaatcttctctttttaaaatgttttttttttgttttcatttttcgacaaaaaatagaaaagcccaattattaagcccataaagaagaatgtagcccaaaataagcccaatattggagtcatcaatcaggtctgggacattgaaaaaactcagtaacagtctaacagaggaaacgcggcggaggaggttttacgactattttcccttcacttcttcatcttcttcctgcgccgcttttcaaacctattcgaccagacaaactcggaaatttcatattccatgggtaagacgaagttaaaacctgtggaggatgtgaactcggaagtggtggacgaagttgagaaagcagaggaagttgaggaacagagaaacgacagagaacaagaagaagagcaaaaagaagaagaggcacctaaaagtttcgaagagctagggcttgattctcgtctaattcgtgccctaactaaaaagggtatagagaaaccaacccttattcagcaatcagccattccttacattctggtaatgataatagaaagtctctaccttttttttgagtttcgtggctacttatataatcttgggactgatgatttattgtctctgttgttcttatataggaaggaaaagatgtggttgctagggcaaagactggttcaggtaagactttggcttaccttttgccattgctccagaagctattttcagcagattctgtgagcaagaagaagcttgctccttctgcatttattcttgttccatctcgagaactatgtcagcaggtttgttttggaccattgtttcatatctctcctactttcatttatttcagtaattgatgggaaatcttgtttgatttggaaaaatacaggtttacacagaggtttcatcgcttattgagctgtgtagagttcagctaaaagcagtgcagttgactagtagcatgtctgcatctgatatggttagtattgcatttctcatcatgaaagcattccattgtttttttctaattttgttttgatgtttcatttgcagcgtaatgcattggctggactgcctgagattcttgtctccacacctgcttgtattccgaaatgttttgctgccggagttttagagcccactgctgtcagtgaatcactttcaattctggttcttgatgaggtatgatatatgtgcttcaattataatagtggctttgttagaggttgttttagtagtcactcttttaagtggaagtctcatgatttgattttcttggaagaacatgtagtttaagcatttcttagtggttatatctatcatgtttttcctttattcctcctctctttgagagttgatgttgataatatttttgttatcaggcagatcttttgttgtcatatggatatgaagataatctaaggtcggtaacatcaataatcccaaggcgttgccaatgccttcttatgtcggctaccacaaggttagacatatatcgataataatgattctgtttagactcatatttttctccgaagtttgtcttgcatggttaactgaataatatttttgcaaatttttagctctgatgtcgaaaaattgaagaaattgattctgcacaacccaatcgttttgaccttgacagaagataatgacaaggaagaggccgtcccaagtaatgttcagcagttttgggtatgattcggtcgcttagatatttttataagttcacatttctgggtctgattaatgattataagtgtattatcttgtcttagatctcttgcagtgctcaggataaactgcttcacattcttgctctcttgaagctagaggttgttcagaagaaaattctgattttcatcaatacaattgacatgggattcaggttgaaattattcttggaaaaggtaacttgtgggcacctatacgagcattccgattctaaaaactgtacctgtaataataatattgaattagtcttttgttttgtttcttccagtttggaatcaagtctgcaattttaaacggggaattgcctcagaattctcgacttcatatccttgaggtacatcaccaagtcatgcacctagatttagtttttccggaagcagctgcgtttcataattaatcagtgtatatttttttgtatacagcaattcaatgcaggacttttcgattacttgattgcaacggatgataatagccagactaaaaaacaaaaggaagaggctaaaggtgaggctaacaaggagaacaagaaaaataataagcgtagcaaaccaaagctagatgctgagttcggtgtagttaggggaattgatttcaaaaaagttcacacggtatgctacttgacttttgctaagggggttttcttttctttgtttttgtactctttgctgcttgggatattgtaagaatccttcttttctttgctctatactcttaaccttcccttaaaccttttttatgcacaggttataaactttgatatgcctcaaagtgttactggatatatccatcgaattgggcgtacagggagagcatatagcagcggatcttccgtttctcttgtgagtttctcgtctaataatactgttgtttggcatgatctctttaaattttgcaagtctaatgctctgctttatttggcacagatttctcctgatgagatggaagggtttgaagatataaagtccttcttagcaagcgacaagaacaaggatattgatattatcacaccctttcctttgttgaccgaaaatgctgtcgagtctcttagatatagagctgaggtgagtaatctctgtagtaagatgattacttctttcattaagtgaacagtattaaaagttgcaatttgtttgcaggatgtggcaaagagtgttacaaagattgcggttcgagagtctcgagctcaggatttgaggaatgagataatcaactctgaaaagtaagcaagaacataactacgtgtgtgatgtgaattctcttatttttttcatcttcttaatttctctacttctttcttcaggttaaaagctcattttgaagctaatccaagagacttagatctgttgagacatgacaagcctctgagtaagactgcacctgcaccacatctaaaggacatccccgagtatctagtggacgcaaagactcaagaagcaagcaagatggtaaagctagctagagccgcaatgggcaacactaggagatctggtggaggcggtggtcgcaacaacaaaaacaagaaacggtctagaaaaggcagcgacccactcaaaaccttcaaccctaatgtaaaacacaactgaatttctccatttcttctctgttttgtgtgtatatttgtgctaattttttctatgttgtttgcttacttcaatcaaccaggggtctaagagaggagccgttggccagaaggatggcaaagattctagctcgaccaaaaaacagaagacagtttaagttatttcgtttagcgtaagtgtaaccaaattttgactcgttatagtcaatcacacaaaagaacggagacgagagcatcaatctttgtagctctattcatgtagcatcaggagacaaagttttgtgagcatattattagccttttgaggtttttattgaaatagatttttgtaagcttatgaagacgatatctgcagggttcaaaatactcaaatccacatggttttggacccatttagatattttcgaaatgaattggcacattatatgcttgcacgttttttgttccgagtatttatgccacatgtgtcatctaactgattgtgtataatcaattaagtataccaaattggataaaatttaccgattgaaaattagttgttttacttgtacatcgtggtctatatatatcattttccaacataaattatacacttgagaataacactttctgttgagttgatttcttatattaatgccaaagctaagactaaataaattctacaaaatatttttaaaaattttaacttttgaaaagctaacttcaaatactaaaatatatactatttgaaattgattaatattatatagaccaagttggattttgatataaaccacatcgcatattcgttttattaacaattcatgtttatcatgacctaattagttctcttaaatagttgttggcaacttttaattagatagccaatcaatttgaataaagaggtcaaactccaaccaatcccacaacaaataattgtctttgatttaacgttttacacttaaaagacaaacactgcacgatatctctctcagatttataagtgaaccctacaaagtacaagtcgtaaactcaaccacaagagaaaccttatcttcttcttcttcttcatcatcaatctctcaagacatgctctcttttttctctaaccagatcgaccggcaaaaagatgtgtctaatgaggaaaaaaccctaaccaatctcgaaaaatctgacggttcacaattccctggcgatgactaccgtccgtccgatcggaaaaactggatggctggtcttacgttggagaaactaactctaaacaagatcgtgtggccaggaacgcatgattcagccaccaacgatatcggaatacctctgatctctcgtcctttagctgaatgccaatcgctctctatctacgagcagctcgtcctcgggacacgtgtcctcgatatccgtgtgcaagaggatcgccaaatctgccacgggattctgacgtcatacgaaattgatgttgtcattgatgacgttatcagattcttgtcggagactcactcggagattgtaatcctggagataaggactgagtttggacacaaagatcctccggggttcgagacttacttggcagacaagttaggtcaattcttgatacatcaagatgatagcttgttcaacaagccggtatcagagattttgccgaaaagggttatatgcatctggaaacctagagagtctccaaagccgagccgtggtggaattctctggaactcagattatctaaaagataattggatcgatacggatcttccatggacgaaatttcagagcaatttgaagcatctgagtgagcagcagccgacatcttctagaaaattcttttaccgggttgagaacacggtcacgccgcaagcagataatccggttgtgtgggttaaaccggtgactgatcggatccgaaaacacgccagactatttatttctcagtgtgtttccaagggatgtggagataagttgcagattttgtccactgatttcatcgaaggagatttcgttgatgcctgtgtcggccttactcacgcaagaatcgaaggaaaggtttgatagaactctggaacgatcgatggttgatctcaagcattggaaccaagattatttgcttttgggttgcgtgtatcttaagttatgctatgtattaaagtgtgtaatttaagttttctatgattgtacattatatctgtttttcgttatccgtcctgtttgaagaatcaaacagagagataaagagaaggcaggggaatttattcagttgctttattttgctcagattcttgtaccaagttacatatcctagtgaaatttcgaaacccttttcggcaagattagcgtctcaatatccaaaacgcatccgccatctaatgacctcttcaagaaagattactcatatatatgttttggagcagcttttctaagctcactcaaatagatttggattttggaccacaaatcattcacagaccctgcctaaaacctgaccatctttctcttttcggatttttcaactatagtcttattttggagcgtcggaataattaaattttgtttatcttgttgattagttattgacttatttcaaagcctgattaaatatttatacaaaagtaaacttataattaggaagaaaaaaagttaaaataaagagaagggtgtctaagaacattctgacaaatattttatcgaatattggattatcgtatgaaatagttgtaaataaacacatcgcatgtatatagcttgtcaacaacttcatatataataataaagaacaacaacttgatatcttatatatggtttagaaaggaaaagtcttagtgacggagtggtggccaacttcgttaagttgagaatttaaccagaaagaacctaaagaaagttctcatctctcaaataaacatgtcttttttcggaaaactcgcagacactgtggtatcttttgcaaacgattctgcgaaatctgttgtagaagaagtggtaaatccaacggtgtcttttgcaaacaattctgcaagaactgttgtagaagaagtggtaaatccgacggtctcttttgcaaacgactctgcgagaactgttgtagaaaaagtgctaaatccaacggtatcgttcatcgatagccagctccagcggccacgggacgtccttgtgcaacaacaaatcctagacaatctccaagaatcgaatggttcgaatttccctggggatgactaccactcgcctgaccggaagaactggatggcccatctctctgtggataaactaacccttaacaagatcgtgtggccaggaactcacgactcagccaccaacggaattggggaccctttggtcactcgttggttgggtgaatgtcaaacgctctccatcttcgaccagctagttcttggcacacgtgtcctcgatatccgtttccaagaggatcgttgtgtctgccatggagctctttcttcgtacaacgttgatgtcgtcctcaatgacgtcatcagatttgtgtccgagacccaatctgagatcataatcttggagataaggaccgagtttggaaagaaagacccttttgaattcgagacttacttggttgataaattaggtcaattcttgatacatcaagacgataacttgttcaacaagccggtatcagagattttgccgaaaagggttatttgcatctggaaacctagagaatctccgaagccgagccgtggtggaattctctggaactcagattatctaaaagataattggatcgatacggatcttccatggacgaaatttcagagcaatttgaagcatctgagtgagcagcaaccgatatcttctaggaaattcttctaccgggttgagaacacggttacgccgcaagcagataatccggttgtgtgggttaaacaggttactgatcggatcagaaaacacgctaggctttttatatctcagtgtgcttccaagggatatggagataagttacagattttgtccactgatttcattgaaggagattttgtcgatgcctgcgtcggactcactcacgcaagaatgaagggacagtttgataagatatctccaagttagacaagcattggaaccaaatatatttatttgcttttgacttacgtatactataagttacattatttacaaaggcgtgtgtgtgattttcgccgatgaactttatgcaaagtgtgtgtgaaccctttttacttttccttgttcataatatcttaaatttgtaatgtttgagctctaccgttctccttaagtaaaaagaatatgttttagtggatgtcatgactaaagaagtataaaacctaattatgtaccactttaaccattaggttgttagaaatttctaaaaattaaaattggagcacgatgtttgctggattaataaagagagacaagctggtgtccttgactgtgttatgttgtgccataatttgcttgcatccaaacgtatcaagaatcatgagttattaacgaacaagaaactcttcacaatcagactcaatgcatttatgttattacctaccacaagccgtgccaacttggacaagcccgaactttgacacatatggacataatctcatcttagttaacctaaggcttcaaataaaacccaccctcatggttattacaattttcttcgtcctcttcattcaagattgtgattttgtcctgcatatacaataatttcttgctttaacattaaatatgtcgggctaaccatgcatgcacaacattgcgtatttgttgattacaatactaattaatctatacaggaatttatcagtttagactttagtcagcattggaccgttatacatagtctccaccaacattcgaataatgttgttgctataattatactaagtatccgattcagtttctgtatataaaacgtctatttttggagagcctttcttcttccttgaaaaattcggagaaattaacgtttcaccaatatttcattttcctctctgtctctctctctccccgcctcgctccaccgtcgtctccggcgatcaaagccaccatcttcattaactttcaattggattacacaaagaaaatctgagttataagagtttcttgattgttgtttctcatggcggatattgtgaaacagatcttagtaagaccgattcaattagcggatcagataactaaagcgtcagacgaagcttactcattccgtcaagaatgtctagaggtcaaagccaaaacggaaaagctcgccggtctcctccgtcaagcggcgcgtgcaagcaacgatctctacgaacgtcccactcgccgtatcatcgacgatacagagcaagtcctcttcaaagccctagccctcgtagaaaaatgccgcgccacgggactgatgaaacgtgttttcaccattattcccgcggctgcgtttaggaaaatcacgatgcagttagagaattcaatcggagacgtttcttggctcctacgtgtctctgcttcaggcgatgaccgtgacgatgagtatttaggtctccctccgatcgctgcaaacgaaccaatcctctgtttgatttgggaacaagttgcgatactgttcacaggctctctcgatgatcgatctgatgcagcggcttccctggtgtcgcttgcacgtgacaatgatcgatacgggaggttgattattgaagaaggtggtgtaccttcgttattgaaacttgctaaagaaggtaaaatggaaggtcaagaaaacgcggctcgagccattgggttattaggacgagatccagagagtgttgaacagattgtgaacgcaggtgtgtgtcaagtgtttgcgaagattcttaaagaaggtcatatgaaagttcaaactgttgttgcttgggctgtttctgaattagcctctaatcatcctaaatgtcaagaccattttgctcagaacaacatcatccgtttcctcgtgagccatttagcttttgagacggttcaagaacatagcaaatacgctatcgtgagtaacaagcaaacattgtcgtcgatccatacggttgttatggcgagtaatacgaatccggcggataagaaggagaacaatgagcaagatgagacaaaaagcaatatttcacatcctttgagtaatcaaacaccgagccagatgcatagcttgattgctaacacattggcaatgaagggttcaggtcccagttcaggttcaggctcaggttcaggttcgggaactaacaagaatcagataaaacagagcaatcaacagcaccagaatcataccaagggtggttcaaaccctagagggaacaatcctacgcatgtttcattaatgggcacaagcattaaaggaagagagtatgaggatccagctactaaagctcagatgaaagcaatggctgcaagagcattgtggcaactctcaagagggaatctccaaatatgtagaagcataacagagtcaagagcattgctctgtttcgcggttctgttagagaaaggagacgatgaagtcaagtcatattcagctttggcaatgatggaaatcacagatgtagcagagcaatatccagaactgagacgttcagcctttaaaccaacctctcctgctgcaaaagctgtagtagaacagttacttaaggtgatcgaaaacgaaatactggacctactaatcccgtgtatcaaatcaatcggtagtctttcaagaacgttccgtgcaacggaaactaggatcattggaccactcgtgaagcttcttgatgaaagagaagcagagattgcaatggaagccgcagtagcgcttatcaaattctcatgtaccgagaatttccttcgcgataaccactctaaagcgattatagcagctggaggtgcaaagcatttgattcaactggtatactttggagaacaaatggttcaagtcccggctttgatgctactttgttatatcgctttgaatgtaccggacagtgagactttagctcaagaagaggttcttgtagtacttgaatggtcgacaaagcaagctcatttggttgaagcaccgacgattgatgagattttaccagaagcaaagagtagattggagctttaccaatctagagggtcaagaggatttcattgatatatgacgaagcttcactctctagtatgaacattcttgccttagtctgcattttgttttcgcctcgcaagttttgtttcttctttgctgtgttcacttatgtcttctccaaggtttgatgaagctctctgtatatatatacgttggtgatgctcatagacattgttataaatgtagactatgttgtaagtcaaaaccactatagattatatatcaaataatattccgagttatgtttgtttcgtattcttgtttatcagtagactctagaataagtttaaccgaattacaattatttagatggttttgtcgaacaagatgtgtaaattagcagaacagaaagtgcatataaacaaataaacaaaaattgtggaaaaggtttttatcatccgagccagtccctatcatgcagttgattcttatattattttccctcctatggaattgaaactgtcccttcgtgaatttgtcccttcggaaattgaagagaaattgatgttcgatgtaatgtgactatgtaagtctcattccaattaaatgtcttttgtaggttcgtgaaattgtagattattgacatcccattttctgaactttaagccatactagctggttaagcacacttaaccaaccggctttaacaatagtaagcataagtgtagtacatacaatcatcccttcctttgatatggaacatagaaattctttcgaaaatagacacaagaaatctacatattactatagaactaaagatacccaaaaaatgattttcaccaaaagcaaaatccactctcatcgaagattaccaccagatttcttagtcttcttgctcgcatgaatcttcgcatagatccccttggttctatacgcaagcaaaaggtcaagaccgaccccaatgatagaagcaaacgccattacaatgaagacgatacggaaacaatgagctcctacacacgtattgcctccaccaggagtaggtgtggcttcagcatcgtagagtaaacccgcgagtagacccgagaagaggaacgatcctagaggcatattaagtataaggatgttgtagatgagtccatagtatttgagaccgaagagttctgatgctgttggtacggttatcgctaaccgaactccatagcataccccaaccaccattgaaccaatatagagtgaaccgggcaaggctaaagccatcagtagatatcccacggccataatgatttgagctgctgcattccataatggtcttggtgttccagctttcctataaagttaaaacaaatattcaagattagtctcaatagcaaatattattcaaggtcccacgatctttagttttcaaataaagacgaaagaaaatctaaaaagatattttagcgcaaaaagtatgttatggtcccccgcacaagctattggaccggtctagtgttagacaaggaaatttctccatatggaaactaacatgtcaagctttaattgaaaaatcgttaaaagaaatatcatgtaaatggaaaatattcaattctaagtaacggaagaggaaagtaatatactctgccttagcgacaaagcaaaggtgaaacagaggaaactgacatcaccattcacagaataaatttgcatttgaatgcgtgtgcgtaaagtgatcaataagaatattccaagtcacgatgatctatgttagtaaagtgacttacttgatgaagtgctcggagatagtaccggagagaatccgaccaaagaatccccaaatgctagtcatggagacaaaaatggagacatcagtgtaaccaagcgcaagcccgatctgacccatattgttcataactgctaaaccagttcctactccacacaagaacgacacgaacaacacccaaaagtcaacggtcaacatagcttccattatggtgtgttcttctccaagaaccggtcttttcttctccgtcgtcactatagttccgtgattctcttcctcctcgttacttaacggcttaagagacggtggcaattcgttatccgccgccgctgcagcacctacgattgtttcctccacttcaatctcagatcctgatcttagtaaaggttcatctattcgtccttctacgtcttgctcatcatgaactttgctacggataaaagcgtggaaaggtacagcgacaggagaggctaagagtatgagaagtatggaagcgaatgcgattgagaaagctcctgttttgattccgatgatgtcgtaagactgaaggtacacagcaacaacaaccgcaacgatgttaaacacagcaaagtatttagactcttcgttatcctcggcgaaggtagtagacggagggatttcacggaggaagaaaaccgccgtgagacaaacggcaaaaggcacgacggagaggaggacaagaaacgaagctgggtcagaggaaaacagagcattacatagatccgtgaaaatcgcagtacttaaaccaacgtatcctttaagaatccctgaaacaggaccacgatttcgccggaagtttcttatacaagtaaccagaaccgccgtgttcatccacgtcgtactgtttcctcccatacagagaaacacacacatctacacacaagaaacagtgaccgtcaaaattgaggcaaattagggttttcaatttagaaattagggtttgattaagtacctgccaataaggtataggttgaatcgtgcggctaacgacaagccattgtacaccataaccaagaagaccttcgaaagaaccgatgaggaggatcaccggagttgaaagacggtcggaagcaagtccggcgaggattccgaatgcttttccgacgtctttagcgacggagagactgttgagttctaactgagtgaggttcattaaggatttgagtgcgccggagtaatttgagaaggtgtaattgttgccggagatggattggacccaaacggcagtaacgaaacctagccatttcagagctgaggaagaagatgaagaagaagatgtaccaaaacccattaggagatattgagaagaatgaagaagaaggagaaagaagatatttttagagtgtgtttgggttcgttgagcactctgcgtacggttttaaaggtgaaatgttacgtttattttattttatttttcgcaacttcgatgttataatattttagacttttagtagaaagtatttatttttaatattaatttaataattaaactattgatttttttgtactttataattagaatgacaaatagtgagaaagtacgaaagagacacgtacggtgaaggtgtagaagcggtgatgaatttacgatgtgctccttcttgtttgtgttatataaaagtcgacaaggaattaactttttatataatgcaaaattgttctccatgggatatttttcttgaatgtgatgattacaatatgctcaactaggatgattacttcattagttgtatttagtggatggttttggccagtagtttcttccaggcatgaaagttcatgcttccgttactttttttttttttttttacttattagaatagtatatagacgaccacaaggttttttttaacgaaaaatatgtatttttttagtaaagttatatttttcaactattgcttatgttcgaagatgtaaagagagcgatagccaattagcggccagtagcttatttgtctctcagtgtttggtaatggaatcaggaagagaatagaatagttagaacggaatatctgaaattacatatcttttattttggtcattactttttagtttttgtaatgacgataaatcaaaattgtgatttggaataaatatatataattagcaaaatccagtggaatgaagaaaatattctatcataccatatagtataacctgccgtaattaaagtccaaatattaataaataaacattaaataataatgggaaactggaaactgttgtacgacacatgacaacatgaaatgagtgaaagtatcgtacaaactacggcagtggatattcggatcttcaattgaagtttgaaattcgaaagtgtgacttgtgagttgtgactagtacggctcattatctttgctagaagcttccaactcggtttgattttcggttcagacgaaagaccttttttgacataaaaagggtcagatgaaagtagttgcttgagagttttgttatcatgttatgaagcagtgaccagtgagccaaagttgctatattgtattgatattctgttagaatcatattccaaatctacggcaaaaaaaaaaaaaaaaaaaaattcgaaagagttggaaaaaagttctagttacaaatatttctctaattacatctcgggactgataccgactagtgcataccacaaaagaaaatccaatattgtacttaccaatgaaatggaaagtgatagaatgtttacccgctgagttacttcatcaaaaaatggtcgtatacattgcgcgcgcaattacatgcaacatgtctttgaccgtaaatatcacattaaaatagaatgacagtcactttctgatataatatattaatatacaccaaccagcatgactaggatcaaggtgtacaacaattttttttttgaatttatcaaattcacacaaaacatatcgtgtacaactctaacgtacgtttcacatcggctaagccttgtatttctttatttgtagcttgtacggaacatttatagcttgcaacactgacaattttgcagattagttgctttgttctgataaagatggtttaagaatttagttattccgcggtttactttcgtatggaatacagcagataccacaatttaaggtaccaacttggaaagagtcattcggatcatcggatgagacaactattttcatcgaccaagtaaagaatatttcatcgatcggtttagttttgttaaacataattgcagtatatgtgtgttaaccgtcaaaaattagagtgccaataaatctttttttactctaccaattaaaaaaataaaaaaataactggaagtgaagaaaatatcatttgcaaaataaattaaataaaacgtaacgtacgctaatatggaggaggaatttcggaatttcatcagttctttttttgaagcttatcgacaccgcctgacggctttgctggatgaaaatatagctggataacatttatttttaagaagaacaaaaagtgtaataattatgtgttgtatagcgattgtaattcatgttatccttagccgcctccttattattatgtaagcaatattttctttggcaaaatgaagttctaataatctaatccaagaaaattcgtaagttactctatcctgtgatacaaattcagacacgcatgaataaaggagattaaaggttgcatgtatctttaaaaaaccatcatttctttcaacgggttaaaaatgagttattcacaaataattgttttgcattgcataattagattgagttatatatgttattcgattccgtcaggtttacatgatcagatcagcagacaaaagattaaccaaaaaatgaacgtcggtggattacagattgagaaacaaaaatatgttcaacaaagtcgtgttgtatttgacagcttaaaccacttgccagatgtggttaatgataagagcgatgtatatttgatggggccaatccgggattttatacagtaagtgagtgataaggatatgtttctttctatcagctagtgcataaatattgtgggctaaattatcacaaattgtcgaataagtgatatgatttgtgggcgaggttatcacagattcacaatttgcttatcacaaaagatatttttttgtttgttttagaaaaacaaattatttgtatggtatcacaaaaagacatttgtgtatgttaatgttgtaggattccaaaaacgacttcataataataatataatgatcattaacaaagaaaatgtggcaacggttgagaatgaaggacaaaaatatttaataaaataaaaaagataatagcatgtactagtagcaaacaacataaaagaaatgagtaactatcgctttaattaaaagtgggactaaacatgtctctagactattgaaatattcttattgatttgaattttcttattgtaaagataactttgaaattcactctttaattattttcttaacgagtttttggaatggatccgaatgtatatatatatattgatttgtgtttctatttatctaagcttgtggtaactttattggcgatggttaataaaaaacacgttgggtgcgtatatgcaatattcttgatactcgaattcattcctgaacatgagatattaagataaacgacctactacttcgtgattaaaaaacataagttaaaatttaaatgtccgaaggaatcatagttaagtgacagcatttaagttgtctaaaaattgccatttgccactcgcatcaatttgtaattttgcaaagtgcaattttatgtctcaagatttgtttcgcagtaagtaatgaaataacataatcaatgttctaacaaaatatctcacctaccagccacacgagtgtcaatttagtttacatttgaaccagagacctaaaagtttgaactaccaaaataatgattttgccgacaaaataggaaaactaagaaagtagtaatgaatatcagatatctgtttcttcagatcaaagcctactaaggaacgcaaaaatatataactaaacaaaattgcgtaaatttagaaacagtgattaaaagcccatatttgattcaatagtaattgaaaacagcataagataatggcccattagccgttatttaggcccgttatcatatcacaaaacaaaacacgaatcatctacgacgaagacctgaaaaaacacactgcaattgagatcgatttcgactgtaagtgaactttgattgccgcgaagattactcaaatcgccggacacaagtttttcagtgaattccattggcatagaactcgagagaaagagacacagagagagagagagatctaacaagagtcaaagtttctgactttttcgcattctttttgagatcgagttctgtttttgttggcgtgtgagatgaattcttaagaaggaagaagaagaagaaggaaagatgcgtagagagatctcgtttttgctacagcccaggtgtcttcttcttctcgttgccctaacgattttcctcgtcttcgcgctcttcaacaccggaaaagtaagcttttttctccgacccgttttcatcttatttgtcacattttcatgtggatctcaaattcttgtgtttcttcagaagatctgattctcttgaacccttttgtggagttactttctgagtagtgtttttttggatttggttattagtagtagtttcactttgattcaaatcaacattttatctccaagtacattaaagtgtttaagtgagtatcacacacattataagctccatggcaaatgcttgtcagattcttcttatgatggttttgaactttgggttattgtaccagaataacattgttgaacttgggttagctttctattttccgggtctgacatattattgttaggtttctctttgttgaatttatggttgcttggttagtgagaaggtttaatagaggagcagcagaatgtgatatgccttgtgtatgtttgcgcctgatttacttcctctcttgatacttaggatgaggagaagcaagtaattgaagatcatgaaatcaccaacagggtttttctcgatgttgatattgatggccaacgcttaggtaaatggacttgacatattggctttttaatgtaataaatgtttttggagtcaaactgttctttaattatgtgttctagggatcacttctttgccattagcttccatcaacttctgttgatttcgctttctgtgattgaaatctgcaggcaggattgttatcggactatatggcactgttgtacccaaaactgtaggtatgtctttggcatcttgaatgcaaatctcgggatttggttaattgttttaaatagtttctaatgtaagatttctttactttttgcagaaaatttcagggctttatgcacaggggagaagggtaaaacctcaagcggaaagcctttacattataagggaacaccatttcatcgtataatatctggatttgtaatccaaggaggagacattatccatggtgatggaaaaagtagtgactcaatctatggtggaacctttcctgacgaaaatttcaagatacagcattcacacgcaggtgcgcatatacatactttaccaatttatgaattttgaagaattgttccggaaaatggttttagagcattttgcgcaagcaatttacgtatacttgttgttcataggaaaatgaattttgtatgtgtaggtatggtagcaatggctaatacaggaccggattctaatggctcgcagttctttatcactactgttaaggctagctggtaagctctactctcataataactctcatgcacaatgagtgtaagaactccaaatttaaggcaggcacactcagtttcacttttggtcttgggaaagtcatgtaactatcctctgggatcgaaccttgatgcaccatggacaagattatgcattcgaattgtactctagaataacacgtgaattcaaaacacatgagataatcttgtggatttcagtgttgaatttgtaaaaggtaaattttgatgattgtgaaaactgtgttgcaggttggaaggagaacatgtggtgttgggaaaggtgatacaaggaatggacaatgtattcgccattgaaggtggagctggaacttacagtggcaaacccaggaagaaagttgtgattgctgattctggagagatccctaaagacaaatgggatgaagagagatgacaaagacaaacctaagatacacagcactacgacaaatctggttctgttcctgtgagattctgtctctgtattttctttctatttatagttttgcacatgtgatgatctgaattctgaacgcaatgtcactgtagttagtgtttaaagctgggcctggaagcatctgtagcttttcacttgaggtttttctagactttatttatatgatttttagttcactctacttcagttatgtagatatatttattatgagttgaattattgtatacattctatcattattttcacctcttacgtatgatacaattctgacatacataaacatccaaaagtatcaaaacaatttgccaactagttcttactattcttctactcgcttttccgggagaaaaaaaaaataaaaaaaaattcgttgattaacatttttaataaaaaaaattgttcctgaattatgcctttattagttgggttaaaatataattatattgacatatctaattaaacctctttacactcaaatcaagacctacaatttcacaagtttaaggttgggattactcgatatatagaatgaaactattgcaacaaaaaaaaataaaaaaatgaatgaataggattgatggtgtgataaaagaagagatgaatacaaagaagaaacgaacacaagtattgtgaacaagtcaaagcctaactattgaacaactttagaagacaagccaccaaatgtacaaacaaatcctcccaataacaaactacaaaagagaaattaatcaattagaaatcataagacatatcgacacatgctaatggtattatctacttacacctcatcaaactcgtgcatgggctattgttatccacatatgtatacagtcatggttatgtcccctcaatctcttccagcttgagaactatttgtaaaccactagtcaattatttcatattcagttcatagatagcctataaacattacatattatatctctagagataacaaaggggagcaggaagtgttagtactgtcgaccttatgcgcccatataattcttccatagctttagattttagtgtttgggctattttaattgcacccgaataatgacaggtaggggtccatgcaaactcatattcatgtgcatatcatcataaaatatccaaaaatctatcttatctatataacttcattgaacaaaacatatatatattcatgcagacgtatggcatgatacagttaatggtctgaattgctcaacgtaaaccatacatgcactagacagtttcatgggaagactaagattttgggactgcaaaattcttcttggaattgtgtagcggctttcaacgtatctttaggttatattcggtgaaccctttatttaccggcacagaatattacggttgatattcaattgatcaaacaatgtgaattagacgtctaattattgatggtcgccatatgaatatcttcttcttccttttccaaaccaacaccaacatcttttaatcgatagaagtgtcaattcgagctcgactctcacatctaatgcgtcattataagattgaaaatcagagacttgaagttttcgtttaggaacttaaaatgaagtttataactattgcttaacgtttttgttgttcatcccaagaaataattgacgttttcaagttaggtttttccaacccaatttattttattatccaataatattataaattctctagtgaaatttcattccttagcttccacgcaaagggtcgcttgagttttgagtaacacaagattggagagatcaatgagaatgttggcattggatccaatcctactatttgggaccagcttcactcgattcatcgcgtcctatttttgtccgtttacacatcttcggatcattcaattcttgtttaatcatcttcattagtaataacgttgccactttatttttaagacggatttatcttctgcaactcccaaattcatattcgctaaatcttctctaaactcagcataatagttaacttgaaaaagaaaaaaacgaaaacgataactaagatggtgaccactcgcatggtttagtgatgaatttagttaaaccgtatgttaatttccttggttaggctcttcaaacagaaattcgaaaacgatatcaaatgctccatgataagtttatgatttcttagcattgtctaatctaagagactagtaagaacatgaaaacaatattcgttaaaccaagtggtaaaacaactatatacagtatgtgtttttcgattataatgttgttaacttttaagattattatattttatattatttcttaaaatatgttgaggtttaaaagatttcttttcagaaaaggattaatgtcttcagcaatatatgctagtaatttactaagtgatattttgcaagtttgttggcaatatttaaccttttctgaataaaataaattcaatattaagaaacaaaattatatacatatagtagtatttaattgttatctatttttaaattatatgtgaataaaacaaagcaagtgtaactgtgtaattataacattggtacacgcacgggaaaaaacacagctagcaaattgaaacgttaatttggtaaagaagaaaaatattttatttttaaaaacacttaatatagttttaattggtgattttcccaattctgaacatatatatgatgataagttttccatcccaagttgttttttctcattagtcactggaaacattaattaccagcaatcagtagttactttggtattccccacacaaattcaaatttaaaagaaataattagtagtacttcttatgactgttttttttactgaataaaaaagaactatatataggttgttcttaactataaccactaaaaaaaggttctaaaattaattttaaaaagaaaaatatatgaagttaacttttatatattacacatcaaattccaatttcaggggctggtaatttggtaataattaaagaaactcaatggcaatgatttaagcacttctttatataagtccaccaaactacactgatctcctcaacaccacacacagcaaaacaaaaagctctctacactcaaaatataacgaaagaacaagaagacatcatcttagctcactatggctttgaagacggtaacaatatacaaactttctctattttttccacttttgatttaatgaatctaaaagaaaatattttggatgattggtatataggcgacgagtggtatgtggatgacggatgattgcaagaaatcgttcatggagatgaaatggaagaaagtgcatagatacgtcgtttacaaactcgaggagaagtctcggaaagtcaccgtcgacaaggttggtgccgccggcgagagctacgacgatctcgctgcttctttgccggaggatgactgtcgttacgccgtgtttgatttcgattacgtcaccgtcgataactgtcgtatgagcaagatcttcttcataacttggttagtgtcactatctcttgtcttttcgatttctcgaattgtcgattttacccttttcccaccatatagttctatcgtctcactcgatgatcatcaaaggataaaatggtcatttggatgtcctaagcccaggctttttaacccaaggccggtttgatcaaatataaccgtaccgaataaaaccaatcaagataattgattctgtttggttaaaaaatggtttactttatatcttaagtcgaaaaactagtaaaaccactgaaacttaatcaatccataatgtggttgttattggaataggtcgccggaggcttcaaggataagggagaagatgatgtacgcgacgtcgaagagcggactgagaagagtgttggatggtgttcactacgagcttcaagccaccgacccaaccgagatgggatttgataaaatccaggaccgggccaaatgatcacaacacataactggagttatatcgtcagtaactagctgttcttaacagttatgacttatgagcagcaattaattatctattaatgttatttagtgcttaacctcttccctttggttgtcaaacaaaatgatttacttctattttgttgacaatagtactaaactattattagtgtttcagtttaattgttgttgtttagttttttaaaaactatgttgaatgttattttgtctctttttgtcactaatgctaataaaaagaaaaaagttttaatatgtttgacttgaactgaggcatgaggataaagttttgatttttgtaagacagttcaagcaaggcatcagtaaatttaagtatcaaatcaaatagtaaaagttactaaaagtttttcgggttgggtctagttcttgtgctgaatatcggaattgagaaatagatcttaaacaactcaaattgtattgttcatctacaagcccacgtcccatgatccaaatctttcaattctcaaattgaatttttgtgacgaggcaatgaaacataaaatagttggaccggtctacacatttgtatatgaactacactcacttgagtctaggcccaataattactaaaactaaaacccaactcagcccaaaaaccttttctagtatctatttaattatatagaattctactagctcaacagaaaggctctcgtagctcagttggttagagcacccgtttagtaagcgggaggtcttgagttcaactctcaacgaaagcagaattaattttgcatctcgttttggtgggacccacccacattaacctcgaaatgatgaaattgtacgtttattgatgggagacatttaacttcgaaatctttaaatctcaattcaacatttcatgtgccacttgacgaaaacaaaaaatcaacatttcatgtgccccatcatttacattttttgcaaactttagtagcttccctattttagttgagacacaacttttttgtaaatataatattttataacaagttaaagtttcaatctaattgtacttttagcagatttaattacattgataagcaactattagtagatgcaatgtcgaagaacgaaccccttttataaaagcttacaacttttacggttgaaaagggttacactttatatatcaataataattttgttgataccgctggcctgtcacattggacccatataaggtccacgaaactttcaatcttcgtcccacaaagaacttgatttttgttatcttctataaatccacacttggtcaggtttttcaatttcacaactaggaaaccaccaacccaaattcagactaattttcgtgatttctgaaaatttcatagtactaaattatgcatgggtaactccgcttctgagaaatctgaatatttgtatgaccataaatatcaaatggttagttggatgctcatattggcatgtgaaatttattgaaacgaaatttccatttattgactacagaattaggttccattccgacatgtgtgtgcctttcaacccctctttcacatccctttgtttgctcacgcaaggttaatgaacttcaccaattgttaccatttcttggaccaactttcacatgaaatttacgatatactacttagttactaatgagtaatgaccatgtatagagcatgctaatcactaaatcataatataaacaatgaacttaccaaattcattttccctaactcaaaatatgagttgcttaagtacttgaatcttttacatggtgtagctatatacggcctatcatttttactagacgctacagaatctatttatagatattaatgaacccaagtaaagaaatgggtcctcactgcttattgttttactgcttataatattttttaggtgggaactcaaataaacgtcaaagtatccatggaccatagttatgaatgccactttgctcagatcaatcatctctgtttcccatgtcgaaatcaatcatcttctatcattatgttgtctttatatcatctggggtcttaaatcgttctaatgcaatgattccataaaatttgtacatcattgatctttcaacttctatttttttgccttcataatttcttttttataatgaatacaagtattaaacattgtttcctctcattttgcttaactatagataaaagataggataaaatctcattaggaataagaaaaacacagaacataattaagattataaataaaagccaactaactcaaaattctacagttattgctacaccacataaagggtttacgatcatgagtcatgaccgcatgatcatcccaaacccgacccggaatcacaacgtatccatttgggtcaccacgatggggctccgaaccacgtgtttcccaccatcaaaccacgtgactgacccaaacacagcacctgtttctcccaacacaacattccttgtattaaccgtcactgtaaccgcatagctccgtctcttaacggccgaagtaaacacaagcctaggtggtttcactgtcaccgtcactcctctcggcgactctatcctcgcccgataaaccgcctcagcctgcccgacattcgtcgccgtccttataacagttttactcaccaatcctcttctattagtaggaaacaccgccgtgatcgaaggataattcaaattcccgggagacggtttcctggtcgtcggacatctcaccggtgttcttgttatcacttggatcgtctttggtccgtacccgatggagcaaagaaacgtaatgtaatcatcattagttatatcgtagacaagacccggattcatagcccggcccaaatttaaatgacccgacccgtaatcataaggcgtagccgatttcccggtggattcatcgatcaacgagcggttagagttatcgacgaggttagtcgttgtcatcattgccgatcgtatcacggcagggctccaatctggatgagcggatttgagaagcgccgccgcaccactaacgtgaggacatgccattgaagtaccggagagaatgttgaattccgttttccttggatctgacggcaaacctgtaggtccaacagcgtctgtccatgcggcgaggatgttaactccgggagcaatcaaatccggtttaagaatctccgggcttaaaccgtttggtcctctaccggagaaagaagcaataaccggagccggtttaatcccaactatagttcctctgaaatcaattgaagcaattggattcggatgtgaagaagcatatgctttgattctatctccttcgtttgatccaacggcacaggctggaataagatgagcatctccgactaatccttcaccgttagatgctccattagcgagaatcattccgacaccacctgctttcttcacaaccaatcctttggctacgcgtggactgcttcctctatcgcagattactattttacccctcacttgcttcggatcaagcgtgttctccatacatagagacgctgatgacattcccgatttaccgggataaaccaccggaaacatacgaccgtttaaaggtactccagcgtaaagagacactcctctgagacgatgtccgtcgccgagaatagcatccgctgggaaattccgatcgattgtactagcaccaacggtggttacccacggcgcgaggttcgtaactgacataccgttaggtccttcgtttccggcagaggaagagacgaagattcctttcgacgcggcgccgtacgagcctatagcgattggatcgaggtaatacggcgaagtaatcccgtctccaccaccgattgagatcgatataacgtcgacaccgtctctaacagcggcatcaaaggcggcgagaatatcggaatcgagacaaccggaatctttccaacagactttgtaggcggcgatacgagcttttggagcaacacctttggctacaccggaggcgtaaccggacatactcgctttaaaagcgtgacggccagcggcggttgaggaagtgtgagtaccgtgtccatcggcgtcacgaggagatagaaactcaacggttttgttgattcctccgattacagcggcttgttgtcccttagcgaagaatcttgctccgataattttacggttacagttccgaggactgaatctggctccggattcgcaaacgcctctccacctttttggaattggaccgaggttaagatctgagaaactcctccgctccggccaaattccggtgtcaaaaacgccaatgattacgtctgatccgtaatcagattctgaccatagtcctttttggttttgtaaaccaagaaattgaggagaacgtgtggtgtgaagctctcgacgtcggtcttcgaaaacagcaagaactgctgggtggttacggagattatctgcttcatctggagtaacaacggcggagaaaccatggaagactgtgtggtaaacatggacgattcgagattcttcggcgaactcggtgctataccaatggtagtgcgtcgggaaaatagaaggcatagatccaccatcgatacggaaaatgaaagtcttcgcggcctgagaagctgcgaaagagataaacggaaaagagaggaagagaagaagaacgatggtggaggaagccattgaaggagtggagcgagtgaagtgagtggggggagttttaccgacatgacattggtgctctcataattataaaggaaaatatcattctttacttctttttttcatttttgattaataacttttataattgttagtttactcagataaatcatcaactttggatatttcttctgcgaaaatattcctagtactatgtcgcttgtatgattctgggcaataatatagttgtctgattaacacaagtgagagaaaacaattttgataaatttcatttgtttgtaagataacggaaatttcattagcgaatgagataggtggtctttgtggtcgtggacagtgatattaatgaaacgacagcgttttacggagatactgcaagaatgagtcatcgctttgtaggattcaatgtattttattcatttttatacaattttggttagagaaaagtaaacatcggaactgcggaagttacctttcatcaccaggaaaagtgtgatcgttcacatgcaagtgagatcatcataactatataatacgatccattcataacggtcgattagtttctcttaaaacaatcaacaccctctaatcgtaaactcatcacatcctctgtttactattaacatgttgattttgtcaacacaattactagtaatcaaaaactaatcatatagtagattagtaggctttttaagtattagtaggctttttgtttatctcttttatggtggaggagcggagagttgagcagagaatctgagtcactgcaattggacaataaaagcgacggaacagagacttttagtgattctcaatattactatattcgtccattatatgagcttacaacggctataatttcaacttctgatgaaaatactattttatgtttctcagagattaggataatataggttttacacagatgggcatgccaccaacccagtcgcatatcccaatgttgaaaagcccatttgatgcattgggctactcatactaggccatttattttgataggctgaatttattgttttggacttcaaccaagttttgtatatcatgcagaagtcaacttgtatgatttgttttattcgttttgagttctagcttacttacatcattctgatttgcggttcaaatctatttgaattaatttgatagtcagtaaaagcttacaggtagtttgtgtcgatttatggtgtgtttactgtttagtaggcgtcaccaaaatttaagtacaaactatacattgaaagctaattcggactgtttacagaattcctctccatattttgttgctcatataggttatcctaatcttgagtttacattttgcactttattatatatgaaaatatccatcaagtaggtcaaagcaatataactcatatatctattttgatatcgttcaatctttgatatatgtctcaatatacatttcttgaaatttcgtatctttaacactatcacatgtagaagaacctaattatgcccactagcctgatactaaactaaactccaaagttttaggttgatgtccgttgttttacataaacaaacatttggaaaaaaccaaaccacactagttaagttcttatatgtatatatttgtatagttttggaaataaggtgagtgacttttgtttaatatagtgaacaacacattaatgtgataaagacattttaccaacacagtgaatgctttgaattagtactaaaaataatcaaacgaaatatgccaaaaggttgcaatgaatagaaaacatgtacactttcaatcgttctcacgcttctcatccttacacagcttatccacttcattgatatgtccaatctcttgggaataaccatcgacatacatttgtcaaacattggttggattatcgagtaaaattctagaaatataccaaggatcgaatttgaatgcatatgtcttgtcagcaaagcattacacccatgcgacacttacaaatggcgaacattttcgcatctttttagtagattatcaaatatgacgacagatcctaacaactatgatatgaataaaattactagttattagaaaagttgagaaccatgaacgagtctgttaatagcttttatatcacaattcacagctataaattgattaatatagtatttcatttcatttcatttccaaagtgctaaaatccaaaaccctagtgttgtttagacccaagaagtcataaccaatgctactactaatgtcggttgaagaataactgctgctactactgtcctctgtttgacatttcacattattacagctacactccttgccgttcccgaatccaaaacggcacgcactgcacctatacttcactctcccaaaccttaggttcctctcatcatggagcttgtcttgccatggtggactgatcctaagctcaagattcaagtccagacatctttcttcaacaactgagtactcaactctcttttgaattctctcgtccccgaaatttgctattttctccagctgaggaccaaaagagagaatcttgacaagagggtcctctgttttactagaatcagacgaatcttgagaagttttggtctcgttgataggtcgatgagtcgccggatcaatcccttttcttaatagcttcctcttaacatgtgtgttccagtaattcttaatctcgttatctgttcttcctggtaatctcgtcgcaataagagaccacctgatagaagaaaaaaaaaacagagtttaaaaaacagagctttttaacataacagaggatagtaaaaaaaacagaggagttgttttgtgactcacttgttaccgagaaggctatgtagtttgatgatgagatcatcttcttcgagggtgaagttacccctcttgagatcaggtcggagatagttaatccatcggagacgacagctttttccgcaacgttgaagaccggcggatctaggaagagaacgccaacaaccttcaccgtgagctttgatgtaagagatgagcttatcgtcttcttccttagtccaagctcctttgtttgtgtggtctttctcacagcaaggagaccttcccatctttcttcttctgattcttgtgatgaagaaattagggctttatggagagacggtttgagaaagagagagagagagagaggttggaagaggaaggtgaagcctaatttgtttctagaagagagttggtaagacacgtttgaaggagtggctagtgggctccgttctcttttttctttttaatctaagattaaattgtgtttttgtttgtttgtatcaaaactagaaactgcaacattcacacgatcgtgttcgcagtttcaatgagaaaacgctatatggcttttatggttttttcaaacctgagtctagttgtctacttatttacttattagcctagttgtaggtgtgaaaccataattatgaatggcgacatgcgttttgttggtgattttagcaatagaaactgtgatcaatatttcacatttcctaaagaaacttttcaaactttaccaaatttaatcatattatatttaagtagttagataggtgaaaatttggttcatcttgtttttttctatattttagtttcattaataacgtaagaaaaaaaaaatcatcgagtttgttcgatatgattttatatcgcaaataataaatttgtttgagctagggttgtaaaaacaaaagtagaggatatatttacattaaagtaaatagttataaggattttgtttttggacaaagttggatggtttcgtactgcaacgaatttaattcaaattatggacatttatgttacaatggaaaatagtatatatttgccatagtgagtttggtaaggaggttgtaaagggcatccaaatgaccaaattaagtatattcaaatcagtataaagataaattcgttagaatttctaaagaaaaaaggagaacatgttagtttgataatttttttggttaatcaaaagtttggaggattaatctagaagacacaaacaaggttggttttgagggaaagttaatttcatttttgggtacggtttggtgtagatttggctgcaatatggggagtggttcgtgaccttccactttatcctacttcctttaagaagtgttaaaacatatctcaacaaatcgtttcgtatatataagaactattcagataatgtatcaaccgtttaaattttaatatccattttctcttcaccaaagtagtgagatatagcattatataagtaaaacctacatcctatactaatatttagctacgcgctatatgataattacttgtgagtaattaacacaaaatcaggagttcctacaatcggtgaaacctcacgtggagtttgtaatgtaatgaaaatggagagtgcatttctacctgctttctccttcttccattaatgatttgccctaacacgtgacctttttactttctcaactaccattttaccaatctcttaattaattccttatcttcttttccatcaattcaaggtttcttatttatcgtaacgaccaactaattcttagaaaaaaatcatagtttcttgagaaacgcttttcgtaagctagcttatcatttgaattgatatctatgaatttatccgacgtatctatgttcttgacaagttacaaagaccatggcctacaaaatattcaagaattttgctgtcatcacgagctaattaagctaatatcagtatatatgaaaatacgacgactctaagaaaaacattcgtgaaatgcttttgtaaataggtaaggggatattttgaaataagtatcgataaaaacatatcgaataatgattgtggtttttattcttgtttggagttctttatttggaaaagggaaaaagctttattggtgaaagtttgtttgatacctgaaagacaatcttaaaagagtttggtagatttcatggtgtacatttactctgaactcctaccgacatatttgtatatttaataacgaagaaaatagaaatgggatagaattgacatgtgatttgttatctacacacacaccaaacaaatcttaaaaaaataggtacattatacgacttttagaatgtatacaaagtgcaacatgtaacatatatttcctaattattaaaaatgtatggtttatttatttaaactacttacaagttacaaaaccttcgttcttgccaaatttagaagacatgcgtttctttcttttagtttcttatataagttattgttaggtgatttcacattctgttaaaatacagtacacttcttttacgtaacaacaattcttttatgtcaacttgaataaagctatttgctactttgcgtccattacatgtcatcccgagcctatatttaggtaactggcaaccaacatcatatattatcttctttaatgaaaatacgaaagcaaaaaaaaatttaattttaatttcttagtagaagtttcctacctaactaaacctaccactaccaggttaggtcaagtttcaggttatgtccccactttggtagatatcgaccgatctttgtttctttcttttttctttttctttggtactaattaataagtgaaacgaacattgcaatgaacaaatatcgcaaaaatgaatcacggacccaaaatattgactttttaacttttttactactaaacagtagaatcgtggattcaaagagtttagaatcttgtagcagcaaaatagattcgatagacgattaatagtttctttaatacccaaataagagcatcgttgcttcgtgttttacttcctatttcgtttacttcatcctcttccggatctcgtaaaagtaaccaaatgccacaaccgcagcagcaactgcaaccccgaacgcactctgtgccagaatcgtgctgtctgcaactgctttgcctgctgaggagtttgggttgaaaccaagctcagagagtttcttgtgcgattccgcgtagtctctgaagaatgcatcttcatcctgccaccacaaactgaacttgtcaacacataacaacactttcttatcttattgaaacttaattaagcaaggaaatcataaagaaccataggaatttctgtttacggttctaacaaaaagctaatattacagttctcactgatagtagtaagagtgttcattttatcattttgcaacatcagcaactataaaggcgataaggatccgtggggttctctagaacaaaaccctagataatttggtttgtgattcagtgtgtgtgcttgtggattcagtgaaaatgtgaaaccaataaaggaaatcgagttatgttccaatggttattatagcaacgcaagaaacaaatggcaaagaggcagagaagatctccagtatattatacctttgcataaagctcaacaagacgacggaactccgggtcttccaataaggtcttgtcagttggaagtttcaacaagccctctgattctcctttcagcagttccctggtaccaaaacagtaaataatcatggataaccgatcatgtaaaaaagtatctgtttgctgcttttatttcttggagacacaaacagaaaagattaaaaaaatgcacaaagaaaatctctgaggataaagaaatgaaaattacacgaagtaggagttgtcaaacttcagcggctcttgggtccatggtccatcaaagcctgacctctccgggtgagcccttccctaaacacccaatgtggtcataagcacaacaagcatatttgttcaaaaacaacggaagttaagtaagtgaccaatgaatttaccagagtatgaccccctgagagtgccacaatatccttatcagatagtcccatgcggtagaagacatctctgagatgttggaaacctacagagatataaacaatgtgaattcatagaaaaaatcttccaattccaaaacaagattatcagtagaaaacatgaaaagtttgttataattgatacaagaatttagtgtaccttgtttggcatcaggaagtcttccttccttggggcagacatttgaatcctatcaagaagaaacatacagtaattatgtttgctttagtgttaaactgataagctgttataatgtctcaagagatgagaaagtatacctttctcccgggaacgaacacgatgtcaggtccaccagtaacctcaactgctaccacaccagcaagctgaaacaaaacacttaaaagtaaataattcatacccaaaacttaattgccattaaactggtacacttctattgggaattcataaataaagcctcgaccttgtaagaccaaatataaaatggagaaacggcaatacaaacagtcgtagagacaggttataggtacagacgacagacatgtgacttaggatggaaacagattgacattacattacagtttccttcttggtcgtttgaattcattcagtgtatattttacttgaatttagctattactgcaagagataaaagttctagttgaacaacatagtcaatctatgatttttgtaaaccaaatcacaatcagtaacatctcctgaaacaaattacaactgaaaccatatttacacagctgctcaactatcaactaagtctcctaaacaacaagctcaaacctgggacgaggtaatgacacaagccgaatacagttccagcgaactttgaaaaacaaatgtgcagaaaaagcaacaaggacatcaaaaagatttctctcacagccttaactcacctgatacaggtctgcgtatgtgattttgggatgcttagctttcacgccctctgaaacatcaaagataggatctcataattaagcgatacaaagtccatttccaaaagcataatgtaattattttgaacagtgttcttaaaccacaacataaaacggatacatcgcatgaaattatccagaaagtgaatctacaaaaactaaatcaaaatcctaccacagagatcgagagcgatcttcaaaccactgttggcaccatgagtgtgctcttcttcgttcctgatagagccattaggtccaccggtcttcgattgagcatcataggttccagcatcgtgccatcttcataaaaaccagatgatacaaacatttcaacattcaaaaacaaacaaaatcgattctacagcctaactacaatcgaacgatctccacatgaataaacgaaatctgtaacagtcaactcgacgaaaaaccaaggaaatcgaaaacttacgccaatcggagcatgataggagcacagttcttgttcgcgatgagagaacggagctcacggcgagccttagtgatctctttcaagtactccgcatcaacaatcggtgcagccatagctcctactcgtttaggatttgtgaagaagaaagagagcgatgaacaagaaaatggtcaaggatgtgtgtgaagattttttttggttacaccgaaatttgggccaaagagataaaaccacccaatgagaaacgggatttgaatgggcggtgtcagttatctcctgttttcctcagccacatctttcggtggacctcattggctttttagatacgattgttggcacgtgacttgcatgtcattttgttacacaaaaaacggcacacgagtttgctagttatttgttaaacagcgtgcatgttcattccttaaattttgtaaaatggaaacattgaataaaaatggacataaaccattattttttccggtgatttatgttttctggatcatattcgaatatattactcgtgtattagagttaaattgaagaaatcaaatacaaacagaacgacaaaaatcgatgtcacaacactttgaaattggtctactaaacacaatacatgaaccatatgtaatgtgatgatatacactcttcagttcttcttcccacgaccacacttgacttgcacggcaagcatcttcacaacgttcttacatgaatccttcttgtcttgttgaaacgtgctcttgttcaccggaatcacacattcagctttccccaaacagtgctgcaatagattttttttattggttactcctatcataaggtacaaactatatagcaagaagaaacaagatataatattttaccttctcgatgacttgctttgaaacaggagcattacaagtaccaagtgtgaagtttccacaaacaccaatagggtttccgaagctagcgaactcaactgctgcgatcttcttagtgcctgagcatttaagagtagccgtgagactcacgttatctgtgatggcttgaacttgatctttcttcctagtccagtgtctaacacttggagtgtagttttctccaacgtaagaacaaacagtgtctctgttaacgatggcaaagtccataagctcaggcttcacattaggctcttcctcaaagataacaagaaggttcttcttgggctttaagaaagatctagggatgtgatactctatttgtgtaggttgacctaatggagacaagaacgattgccaatatcttccaacgccttctccgttcacccaaatcaacccttttcccattccatgcatgcgaatcgttgctgcgcttacgctctctggtgcatcaaagtatgtctgcaatgtttcacattccttagaaaacttctacatatcataccaatcatactctgtatagtttgatttttgtttttgtctcttacctggtaccatgtaagtcctggtgcttttccggtgaattttttccattcgaccttctttaaaccttcctcagtgtggattccaagtttttcaccttccataccgatctaatgatcgaaaaaaacggatcagaagaaggaaatgcatactcaatgttgaaatacaataacggagaaattgtttataaaccttgtttccccatttgctgctctcagtgagatcaagtgttccagaagtcaatcctaagatggaaataccacgaggaccggtgtatctatgctccatgtaagatccactgtcctgtaagaaccaaaaatcccaaacattaacgaaacaaatcttcatctatagatattgaattatgtttgttaattacttactgggaatcctgtgagaacaccaagcattacaagatgattctctcctgcttttagtgtaacctgtttttggaaaacaaaactcttctcttcgtggcttccatgtccacttcctgttaagaagatatcattattatagctcattgttgtagtacttgtagatcattcttgcacaaattcttaccaaggtattctccgttaagccaagcgtgcaacgcgtgtccaagactagcaatcctcacaaaagtcttaactcctttcttggtaggtaagtgattcttgtgaaccttgaagctgcaaagcaaaattcaacttcaaaattctcttcttttatatattcaataaacaatcacataaaagtaaattctttaccttgttgtgtaccatccatagtctgtcttgtctttagtcaaaccataaagctcaacgggtatgtatgagttaccttcgagtttactaggcaatgtctctgtgaaaactttgaaatcaaacttcttgtttgcctttttagacttcataaagttccttgaagtgtgttgagaaacaatctggtccaataacaaacaagaacttgttaaaactctgttttttttgctcaaataaaccggtatttaatgttttcttcacctgtgcagtgttgtaaacaacagttttacaatcgggaagaatactaatagaacgaggcgcgatcacgtattctctgcccttgaatttgatggtttctgcagcttcagtattgttgttagccaagaaagcagcacaagttttggttccaggttgttcgtagtatctaatctgttattacacaccaaaaagttgaatcctttaagcattttgaaaaaacaaatcagagtctgtttgtatgtgtacatgcatatatgctaatacctctgtatcttttccaggtttctcggttttaggctgaccccaaagaagtggcttcttgcagaggttaagagcgttgtgaagatgcttaagatgaccatacttaggctctttctctaaaccatattcatcaagaggtgcatcatcgtagtatctagtggtcacataatgtgcagaggttcttccaaagttagtccctccgtggtactacaagattaaagaaccattttgagaattttgacaatcatttttgcatatatggttaactcgaatggatcataatttttaccatgtagtagttgacatgggttccgttcttggagaagaatcgagcaactgaatacgcgatatcttctactgatctttgagttggcggatcaccaaacacgcggaacctattgaagaaattggcaagatattcaacacttatatgaatgaacctaaggtttttacatgtttaattcaagagtaagaaaaacaaactcactgagtagtccaattctcagtccataaagatggtttgttttctctgtttggaccggggaaagtatcaccgcaatgtcttccattacaagcattgatctgtttccacagtgttttcaaatattttaaaactttcttcctcattcggataaaacacaatcatgtaaaaatgaactttaccataggatcaggagcgtcgttctgcttgcacataacccatgggatcccgagtttcattgagtccaccaaattagatgcccatttaatgtagtttaacccgtcttgtttatatgcacgttgaaccgcgctatattcgttttctatctgcaattcatattcattccaaaactcatcattttataacatttttcaaatcatatataaatatataggtttctcttttctttgttgtcacctgtcctaatataatggggcctccttgtgacgcaaacaatctttcctccttcattttgtcgagtatcatccgtacatacctttctgtatgctcctgcaatatttttatggtcatatcttgtaatatatctaattgtaacaaaacacacattgacatatatatagtaattctatgtataataccttgaattgtttattgtctgtacggaagaaaattccaggaacttctctaagccaataaggaagtcctctgatcatcacaaagagatcatataaaatgttaaaatgaagatcttgagaacgccgaaaaagaagaagaagcaatgcattattacccatgagtccattcagcttggatgaacggtccaagccttaaggtcacatacattccattcttttgaatcaactttatgaacttcaccaaatcagctcgtcccgaaaagttgaactgatgaacgcaacacaaaatacattatgaatcctaaagattcatgcatgcgtgttttatatgttctatatatagatcagtttttggttatgaattacctttccttgttgaggctcatgtacattccagaaaacgtatgtctgaatcgtgttcaaaccgccttgcttggctctcttgatgatacttggccacatctaaaccaaacccaaatgacacaataatctcaatatacaaaaaaaaaaaaaaaacgttttagaaaaacagagattatgtgattcaataaatacttccggagtgcttctcgggtaatgaatagagccagaataaagaagctctcttttgccatcgatgatcaaagaggttccatcatatgtcacctccttattactcttcttcttcttcttggcgtccttcttggccgcgaaggaggaagaagacgagaggagaacgacaagaacagctgttaaaagccatcgatcaagagaatgttttctcattgaactctcttctttttcttttttgaattaatttttggtgtcgtacgtagaacaagaagctaagttctcttggaacctcgtccttgtcggaggaataaaaaacaaggagagctcaaataacaagctttcagaaaagaggatgatataagagaatgtttcgcactcaggttttcaggtttccggagaaatttacgcgtctgaaatagaatccaccgttgtaactttgaaactctcttcatttttccttttcgattttttttttttaatttgtttttgctatttttaaatgttggtttcaccctattcttcgcctattatgttggacataacataacaaattagtgaaattaccattcgttttttttgggtccccataacagattctttaacggtcaataagtgtttttaaaattaacggtcaataactagctagacagattcaaaaggtaagcctttataccgtgattggttataaaaatattaaatattgaccttaagttcacgttttttttagtgtctcaacatttatttcttagagaagttgtatgtacatttttaatgtttacttcaacataccgggacaaaaatattatcatttaacatgtaacagaagaatatgtatccaaaggaggctgatcaataaaaattaacactccaatcatattgcattgtaaaaccagctatattttttattgatatttaaaccatagttgtataatcctaatgacacatcggaaaaatcctctaaaccagtcaaaatttagctaaattttttattgatatttaaagatcaatctaaatatgtatagatttaggcatttagtatatgggctgcatagtattagatgaaaacgaagtttaaaaaaaaaaaaaaaaaaaagtacatagaaattattattataattttcatcccataaatttttgtagggtcttatgttgggaaacgcactatctaagaagaaatgctattttataaaattttagtaaaaagaagaaaaaaaaggaagaagaagaccaagaaattgaggtgcatgtgaggatgagtagtaaaaattaggaagactctagtctgggagagactttcagcagctatttctttgtcttctttctctttaaagaacctcactctctctctctttagtcaaaaatccccaattcgtgaacaaattagggtttttgaagtttgaagaaggagagaaagatgagtgcttcaaggtttatcaagtgtgtcactgtcggcgacggtgctgttggaaagacttgtcttctcatctcctacactagcaacactttccccacggttagctttaaagttctcttcttttactttgatttcgtgaaattttagcttggtgaagttggttttgttgttgaagcttatgagttggatttagtcacaagtatttgttaggttttcttaaagtcttcttctttctgctaccttagtgaatgtactgatgtgatctttaggatttgagagactcagagattcatgtaccgtagcaatgttgttgatctgtttaatgatcttagaaagagtgttaggtaactttctgtaaggagattttgtagctgatgttttagtggaattttctatgtgacaggattatgtgccaactgtgttcgataatttcagtgccaatgtgattgttgatggcaacactatcaacttgggattgtgggatactgcaggcaagttgttaccttggatttttttgtcttttgaatttcctcctcttccagagagtcatttgtgtttttgacttggtgaaacagggcaagaggactacaatagactaagacctttgagctatcgcggtgcagatgtcttcttacttgcattctcacttgtcagcaaagctagctatgaaaatgtttctaaaaaggtttgatctgtggtcttctcctgaaacttctttcctgttttattcagtttacattcagtgattctgatagaatacatttggtatcttgcttttgattcttagtgggttcctgaactgagacattatgctcctggtgttcccatcatcctcgttggaacaaagcttggttggttttttcttagctcaactcttaatcgcctgattatcgggggttttctgttttggggaactcttctgatattttgatgactgagtctcgtacagatcttcgagatgataagcaattctttgccgagcaccctggtgctgtgcctatctctaccgctcaggtacctttctcattatctttctaaactgaatcctaggtgttaatattctgcatgtttcatattttgatggtatcaaaacagggtgaagaactaaagaagctgattggggcgcctgcttatatcgaatgcagtgcaaaaactcaacaggtattaacctgagagtcaatatctttatctaatctttacctgtctaaaaccgccaattgaatctgctgatgattcctatatctgttatctgttcaacagaatgtgaaagcagtgtttgatgcggctatcaaggtcgttctccagccaccaaaaaacaagaagaagaagaagagaaaatctcagaaaggttgttctatactctgattcaacaagaagaaaggaatcaacaggagaattagagctataagtatttgttttctcctttttcataacttgtttacccaaggaatcaaaaatctgttgtttgtagtctgaaaatgacaaaagttgaagaactagtaacaagtatttgtattcttgtttgcattttgatctgtaaatataccacgaatccttgatttctctgtttcctagattcacaccaattgtcttaaggattatgttccaaacctaaagacaatgagagcttacacgcgcgaaccaatgagaatgagagagcacttgtctttcttggacaatagtatctaaaccagcttatttgaaaccttctgaatgagccagagtgtcttccatacatatcaattccacatagacctaacctgatctttagactataatcttcaatgatttcagaacctcaaaacttttgattttacatttttaatcaaatttatttgatattcattttgcttattgactagacgttttccccttggagataatagaatgattgattttaactctcaccggaaaagacaaaaaaaaggaaaaataaatcattgattaaataaaatttatggtgaataagcttggcttctctttaccaaacatatatgtttgttgatcaatctctttctttgcgttatctgccccttgatttagacccacgtattattcgattcctaaactaattgaaatgattagatatgtgtcatgacgtttagtgaactaatattcacctaatatgtctttcaatcacttaagaatttgcattattcttgtgaaaaacataaattcacatgctgctagtaaaatatgttaacaaatcaattaaacatcagaaaataataactgagatcttcataaagaaagtggaagtttttttaaatatatgaagaagaaaagtgcgtagtgtgcacgggacttagttcatttaattctcgagccattgccgtacggaggaggctgccttcaaggcttaagtcgaggcgtgttcgttacgtttaacccgcaatagccggtggctacacactcacaaatcccctttgactcaccggatatcgacggtttcccgctattttttcccctaactaactttttttccttttcttgtaaaactcttaaaaacaaaactcggtgttgtctctttgtttgctcactccttttctttctctctctcgccgacactttcattctcacttgtgttcgtacgtaatgttcttgatccggtaggtttttatttgattataaactcatttcatttaacaaattgagtccatctctctatgattcacccataagatgatagaagaagatcaacatttacgtctgagataaatcatgtcctttaatgtatatttgtttattttctggtcaatcatcgatctttcttagtcgtagcagttacacaatgctgatggtacatggcggcagattttcgattcttattatttaaagaccaaatttaataatagatgtatgtacaacgagttttggtatcactatcttgtccggtaatgctcattgtttatcttttaaatctacgtcttcttctgcataattgacacaaatcacttgtttcaatggagtttttgtttgtttgatttcctctgttacttatgcagcaaaagaagaaattgagtttaaaggagaagtgtgagaaggaagtttcaggaagatgggtgaagaaaagaggagaatttcaggaagatcagtttcacttccatcgatagacatattactagacgagaaaccaggttggccatttcttaaaagagcaagtttagggacaccacaacaagttcacaaatggcacacacgaaaagtctcagtggtcaattgggtcatgagcttacctgaacggtttccaaatcatcaacagactctaaactatgagacaagcttgataaagaaacaaatcaaggacatattgagagacaataacaaatggttcaactacaatgttcttaggaaagcaacatcagatttctctcaaggtactctgttttttttttctctgcttctcctgatgagtttgtattgatatttgcttttacatgacagagaatgtgattgggaaaggaggatgcaacgaagtgtaccgagggattcttgaagatggaaaaggcattgcagtgaaaatcttgaagtcatcatctaaagaagcaatgacaaatttcgttcatgaaatcaacattatctcttctttgagtcaccaaaacatctcaccgttacttggtgtttgtgtccaagacaatgaactaatctccgtttacaatctttcaaacacaggaagtttagaagaaacccttcacggtaaacacaacactctcaacttatgtttaagattctgattgatttggtataaagtgtgaaatgtgttatgattgattctgcaggtaagcaaaagggaaagtatgtattatcatgggaagagagattcaagatagctatcgggttggcggaagcattagactatcttcataaccgatgttctaagccagtgattcatagagatgtcaaaacttctaacgtccttctatcacttgagctccaacctcaggtaatgtaagcttctagctttgatttatatgttaattttcataagagaccgagtgtatttcttatgattatgagaatagctgtcagattttggtctgtcgatgtggggaccgacaacatcttctcgatattcgatacaaggtgatgtggtgggaacatttggatatcttgcaccggagtacttcatgtatggaaaagtcagtgataaagttgatgtttacgcctttggagtggttctgcttgaactcatttctggaagaaatcctatttcacctcagaatcctagaggacaagagagtttggtaatgtgggtaagttgttttcttctgcgctggttacttgtagcataagcaacacttcgtgaaacctaagaaaagataccttggaatgcaggcaaagcctttgattgataccggaaatttaaaagtactgttggatccagacgttacagatatattcgacgagtctcagtttcaaagaatggtacttgctgcttcacattgcctcacaagatcagccacacatcgtcccaatataagacaagtaagattttgtttcattccttaagaaagctaagtccctcatgcaagaactaatctttaacgtttcttcagatactgaggctactaagagatgaaaacgaagccgggaaatggattatggaagaagaaggaaatgaagattgcttcgatgacgaggtttacccgaattc

SEQ ID NO: 669 - DNA, 80346 bp, Arabidopsis thaliana
gatccgtgaaaatcgcagtacttaaaccaacgtatcctttaagaatccctgaaacaggaccacgatttcgccggaagtttcttatacaagtaaccagaaccgccgtgttcatccacgtcgtactgtttcctcccatacagagaaacacacacatctacacacaagaaacagtgaccgtcaaaattgaggcaaattagggttttcaatttagaaattagggtttgattaagtacctgccaataaggtataggttgaatcgtgcggctaacgacaagccattgtacaccataaccaagaagaccttcgaaagaaccgatgaggaggatcaccggagttgaaagacggtcggaagcaagtccggcgaggattccgaatgcttttccgacgtctttagcgacggagagactgttgagttctaactgagtgaggttcattaaggatttgagtgcgccggagtaatttgagaaggtgtaattgttgccggagatggattggacccaaacggcagtaacgaaacctagccatttcagagctgaggaagaagatgaagaagaagatgtaccaaaacccattaggagatattgagaagaatgaagaagaaggagaaagaagatatttttagagtgtgtttgggttcgttgagcactctgcgtacggttttaaaggtgaaatgttacgtttattttattttatttttcgcaacttcgatgttataatattttagacttttagtagaaagtatttatttttaatattaatttaataattaaactattgatttttttgtactttataattagaatgacaaatagtgagaaagtacgaaagagacacgtacggtgaaggtgtagaagcggtgatgaatttacgatgtgctccttcttgtttgtgttatataaaagtcgacaaggaattaactttttatataatgcaaaattgttctccatgggatatttttcttgaatgtgatgattacaatatgctcaactaggatgattacttcattagttgtatttagtggatggttttggccagtagtttcttccaggcatgaaagttcatgcttccgttactttttttttttttttttacttattagaatagtatatagacgaccacaaggttttttttaacgaaaaatatgtatttttttagtaaagttatatttttcaactattgcttatgttcgaagatgtaaagagagcgatagccaattagcggccagtagcttatttgtctctcagtgtttggtaatggaatcaggaagagaatagaatagttagaacggaatatctgaaattacatatcttttattttggtcattactttttagtttttgtaatgacgataaatcaaaattgtgatttggaataaatatatataattagcaaaatccagtggaatgaagaaaatattctatcataccatatagtataacctgccgtaattaaagtccaaatattaataaataaacattaaataataatgggaaactggaaactgttgtacgacacatgacaacatgaaatgagtgaaagtatcgtacaaactacggcagtggatattcggatcttcaattgaagtttgaaattcgaaagtgtgacttgtgagttgtgactagtacggctcattatctttgctagaagcttccaactcggtttgattttcggttcagacgaaagaccttttttgacataaaaagggtcagatgaaagtagttgcttgagagttttgttatcatgttatgaagcagtgaccagtgagccaaagttgctatattgtattgatattctgttagaatcatattccaaatctacggcaaaaaaaaaaaaaaaaaaaaattcgaaagagttggaaaaaagttctagttacaaatatttctctaattacatctcgggactgataccgactagtgcataccacaaaagaaaatccaatattgtacttaccaatgaaatggaaagtgatagaatgtttacccgctgagttacttcatcaaaaaatggtcgtatacattgcgcgcgcaattacatgcaacatgtctttgaccgtaaatatcacattaaaatagaatgacagtcactttctgatataatatattaatatacaccaaccagcatgactaggatcaaggtgtacaacaattttttttttgaatttatcaaattcacacaaaacatatcgtgtacaactctaacgtacgtttcacatcggctaagccttgtatttctttatttgtagcttgtacggaacatttatagcttgcaacactgacaattttgcagattagttgctttgttctgataaagatggtttaagaatttagttattccgcggtttactttcgtatggaatacagcagataccacaatttaaggtaccaacttggaaagagtcattcggatcatcggatgagacaactattttcatcgaccaagtaaagaatatttcatcgatcggtttagttttgttaaacataattgcagtatatgtgtgttaaccgtcaaaaattagagtgccaataaatctttttttactctaccaattaaaaaaataaaaaaataactggaagtgaagaaaatatcatttgcaaaataaattaaataaaacgtaacgtacgctaatatggaggaggaatttcggaatttcatcagttctttttttgaagcttatcgacaacgcctgacggctttgctggatgaaaatatagctggataacatttatttttaagaagaacaaaaagtgtaataattatgtgttgtatagcgattgtaattcatgttatccttagccgcctccttattattatgtaagcaatattttctttggcaaaatgaagttctaataatctaatccaagaaaattcgtaagttactctatcctgtgatacaaattcagacacgcatgaataaaggagattaaaggttgcatgtatctttaaaaaaccatcatttctttcaacgggttaaaaatgagttattcacaaataattgttttgcattgcataattagattgagttatatatgttattcgattccgtcaggtttacatgatcagatcagcagacaaaagattaaccaaaaaatgaacgtcggtggattacagattgagaaacaaaaatatgttcaacaaagtcgtgttgtatttgacagcttaaaccacttgccagatgtggttaatgataagagcgatgtatatttgatggggccaatccgggattttatacagtaagtgagtgataaggatatgtttctttctatcagctagtgcataaatattgtgggctaaattatcacaaattgtcgaataagtgatatgatttgtgggcgaggttatcacagattcacaatttgcttatcacaaaagatatttttttgtttgttttagaaaaacaaattatttgtatggtatcacaaaaagacatttgtgtatgttaatgttgtaggattccaaaaacgacttcataataataatataatgatcattaacaaagaaaatgtggcaacggttgagaatgaaggacaaaaatatttaataaaataaaaaagataatagcatgtactagtagcaaacaacataaaagaaatgagtaactatcgctttaattaaaagtgggactaaacatgtctctagactattgaaatattcttattgatttgaattttcttattgtaaagataactttgaaattcactctttaattattttcttaacgagtttttggaatggatccgaatgtatatatatatattgatttgtgtttctatttatctaagcttgtggtaactttattggcgatggttaataaaaaacacgttgggtgcgtatatgcaatattcttgatactcgaattcattcctgaacatgagatattaagataaacgacctactacttcgtgattaaaaaacataagttaaaatttaaatgtccgaaggaatcatagttaagtgacagcatttaagttgtctaaaaattgccatttgccactcgcatcaatttgtaattttgcaaagtgcaattttatgtctcaagatttgtttcgcagtaagtaatgaaataacataatcaatgttctaacaaaatatctcacctaccagccacacgagtgtcaatttagtttacatttgaaccagagacctaaaagtttgaactaccaaaataatgattttgccgacaaaataggaaaactaagaaagtagtaatgaatatcagatatctgtttcttcagatcaaagcctactaaggaacgcaaaaatatataactaaacaaaattgcgtaaatttagaaacagtgattaaaagcccatatttgattcaatagtaattgaaaacagcataagataatggcccattagccgttatttaggcccgttatcatatcacaaaacaaaacacgaatcatctacgacgaagacctgaaaaaacacactgcaattgagatcgatttcgactgtaagtgaactttgattgccgcgaagattactcaaatcgccggacacaagtttttcagtgaattccattggcatagaactcgagagaaagagacacagagagagagagagatctaacaagagtcaaagtttctgactttttcgcattctttttgagatcgagttctgtttttgttggcgtgtgagatgaattcttaagaaggaagaagaagaagaaggaaagatgcgtagagagatctcgtttttgctacagcccaggtgtcttcttcttctcgttgccctaacgattttcctcgtcttcgcgctcttcaacaccggaaaagtaagcttttttctccgacccgttttcatcttatttgtcacattttcatgtggatctcaaattcttgtgtttcttcagaagatctgattctcttgaacccttttgtggagttactttctgagtagtgtttttttggatttggttattagtagtagtttcactttgattcaaatcaacattttatctccaagtacattaaagtgtttaagtgagtatcacacacattataagctccatggcaaatgcttgtcagattcttcttatgatggttttgaactttgggttattgtaccagaataacattgttgaacttgggttagctttctattttccgggtctgacatattattgttaggtttctctttgttgaatttatggttgcttggttagtgagaaggtttaatagaggagcagcagaatgtgatatgccttgtgtatgtttgcgcctgatttacttcctctcttgatacttaggatgaggagaagcaagtaattgaagatcatgaaatcaccaacagggtttttctcgatgttgatattgatggccaacgcttaggtaaatggacttgacatattggctttttaatgtaataaatgtttttggagtcaaactgttctttaattatgtgttctagggatcacttctttgccattagcttccatcaacttctgttgatttcgctttctgtgattgaaatctgcaggcaggattgttatcggactatatggcactgttgtacccaaaactgtaggtatgtctttggcatcttgaatgcaaatctcgggatttggttaattgttttaaatagtttctaatgtaagatttctttactttttgcagaaaatttcagggctttatgcacaggggagaagggtaaaacctcaagcggaaagcctttacattataagggaacaccatttcatcgtataatatctggatttgtaatccaaggaggagacattatccatggtgatggaaaaagtagtgactcaatctatggtggaacctttcctgacgaaaatttcaagatacagcattcacacgcaggtgcgcatatacatactttaccaatttatgaattttgaagaattgttccggaaaatggttttagagcattttgcgcaagcaatttacgtatacttgttgttcataggaaaatgaattttgtatgtgtaggtatggtagcaatggctaatacaggaccggattctaatggctcgcagttctttatcactactgttaaggctagctggtaagctctactctcataataactctcatgcacaatgagtgtaagaactccaaatttaaggcaggcacactcagtttcacttttggtcttgggaaagtcatgtaactatcctctgggatcgaaccttgatgcaccatggacaagattatgcattcgaattgtactctagaataacacgtgaattcaaaacacatgagataatcttgtggatttcagtgttgaatttgtaaaaggtaaattttgatgattgtgaaaactgtgttgcaggttggaaggagaacatgtggtgttgggaaaggtgatacaaggaatggacaatgtattcgccattgaaggtggagctggaacttacagtggcaaacccaggaagaaagttgtgattgctgattctggagagatccctaaagacaaatgggatgaagagagatgacaaagacaaacctaagatacacagcactacgacaaatctggttctgttcctgtgagattctgtctctgtattttctttctatttatagttttgcacatgtgatgatctgaattctgaacgcaatgtcactgtagttagtgtttaaagctgggcctggaagcatctgtagcttttcacttgaggtttttctagactttatttatatgatttttagttcactctacttcagttatgtagatatatttattatgagttgaattattgtatacattctatcattattttcacctcttacgtatgatacaattctgacatacataaacatccaaaagtatcaaaacaatttgccaactagttcttactattcttctactcgcttttccgggagaaaaaaaaaataaaaaaaaattcgttgattaacatttttaataaaaaaaattgttcctgaattatgcctttattagttgggttaaaatataattatattgacatatctaattaaacctctttacactcaaatcaagacctacaatttcacaagtttaaggttgggattactcgatatatagaatgaaactattgcaacaaaaaaaaataaaaaaatgaatgaataggattgatggtgtgataaaagaagagatgaatacaaagaagaaacgaacacaagtattgtgaacaagtcaaagcctaactattgaacaactttagaagacaagccaccaaatgtacaaacaaatcctcccaataacaaactacaaaagagaaattaatcaattagaaatcataagacatatcgacacatgctaatggtattatctacttacacctcatcaaactcgtgcatgggctattgttatccacatatgtatacagtcatggttatgtcccctcaatctcttccagcttgagaactatttgtaaaccactagtcaattatttcatattcagttcatagatagcctataaacattacatattatatctctagagataacaaaggggagcaggaagtgttagtactgtcgaccttatgcgcccatataattcttccatagctttagattttagtgtttgggctattttaattgcacccgaataatgacaggtaggggtccatgcaaactcatattcatgtgcatatcatcataaaatatccaaaaatctatcttatctatataacttcattgaacaaaacatatatatattcatgcagacgtatggcatgatacagttaatggtctgaattgctcaacgtaaaccatacatgcactagacagtttcatgggaagactaagattttgggactgcaaaattcttcttggaattgtgtagcggctttcaacgtatctttaggttatattcggtgaaccctttatttaccggcacagaatattacggttgatattcaattgatcaaacaatgtgaattagacgtctaattattgatggtcgccatatgaatatcttcttcttccttttccaaaccaacaccaacatcttttaatcgatagaagtgtcaattcgagctcgactctcacatctaatgcgtcattataagattgaaaatcagagacttgaagttttcgtttaggaacttaaaatgaagtttataactattgcttaacgtttttgttgttcatcccaagaaataattgacgttttcaagttaggtttttccaacccaatttattttattatccaataatattataaattctctagtgaaatttcattccttagcttccacgcaaagggtcgcttgagttttgagtaacacaagattggagagatcaatgagaatgttggcattggatccaatcctactatttgggaccagcttcactcgattcatcgcgtcctatttttgtccgtttacacatcttcggatcattcaattcttgtttaatcatcttcattagtaataacgttgccactttatttttaagacggatttatcttctgcaactcccaaattcatattcgctaaatcttctctaaactcagcataatagttaacttgaaaaagaaaaaaacgaaaacgataactaagatggtgaccactcgcatggtttagtgatgaatttagttaaaccgtatgttaatttccttggttaggctcttcaaacagaaattcgaaaacgatatcaaatgctccatgataagtttatgatttcttagcattgtctaatctaagagactagtaagaacatgaaaacaatattcgttaaaccaagtggtaaaacaactatatacagtatgtgtttttcgattataatgttgttaacttttaagattattatattttatattatttcttaaaatatgttgaggtttaaaagatttcttttcagaaaaggattaatgtcttcagcaatatatgctagtaatttactaagtgatattttgcaagtttgttggcaatatttaaccttttctgaataaaataaattcaatattaagaaacaaaattatatacatatagtagtatttaattgttatctatttttaaattatatgtgaataaaacaaagcaagtgtaactgtgtaattataacattggtacacgcacgggaaaaaacacagctagcaaattgaaacgttaatttggtaaagaagaaaaatattttatttttaaaaacacttaatatagttttaattggtgattttcccaattctgaacatatatatgatgataagttttccatcccaagttgttttttctcattagtcactggaaacattaattaccagcaatcagtagttactttggtattccccacacaaattcaaatttaaaagaaataattagtagtacttcttatgactgttttttttactgaataaaaaagaactatatataggttgttcttaactataaccactaaaaaaaggttctaaaattaattttaaaaagaaaaatatatgaagttaacttttatatattacacatcaaattccaatttcaggggctggtaatttggtaataattaaagaaactcaatggcaatgatttaagcacttctttatataagtccaccaaactacactgatctcctcaacaccacacacagcaaaacaaaaagctctctacactcaaaatataacgaaagaacaagaagacatcatcttagctcactatggctttgaagacggtaacaatatacaaactttctctattttttccacttttgatttaatgaatctaaaagaaaatattttggatgattggtatataggcgacgagtggtatgtggatgacggatgattgcaagaaatcgttcatggagatgaaatggaagaaagtgcatagatacgtcgtttacaaactcgaggagaagtctcggaaagtcaccgtcgacaaggttggtgccgccggcgagagctacgacgatctcgctgcttctttgccggaggatgactgtcgttacgccgtgtttgatttcgattacgtcaccgtcgataactgtcgtatgagcaagatcttcttcataacttggttagtgtcactatctcttgtcttttcgatttctcgaattgtcgattttacccttttcccaccatatagttctatcgtctcactcgatgatcatcaaaggataaaatggtcatttggatgtcctaagcccaggctttttaacccaaggccggtttgatcaaatataaccgtaccgaataaaaccaatcaagataattgattctgtttggttaaaaaatggtttactttatatcttaagtcgaaaaactagtaaaaccactgaaacttaatcaatccataatgtggttgttattggaataggtcgccggaggcttcaaggataagggagaagatgatgtacgcgacgtcgaagagcggactgagaagagtgttggatggtgttcactacgagcttcaagccaccgacccaaccgagatgggatttgataaaatccaggaccgggccaaatgatcacaacacataactggagttatatcgtcagtaactagctgttcttaacagttatgacttatgagcagcaattaattatctattaatgttatttagtgcttaacctcttccctttggttgtcaaacaaaatgatttacttctattttgttgacaatagtactaaactattattagtgtttcagtttaattgttgttgtttagttttttaaaaactatgttgaatgttattttgtctctttttgtcactaatgctaataaaaagaaaaaagttttaatatgtttgacttgaactgaggcatgaggataaagttttgatttttgtaagacagttcaagcaaggcatcagtaaatttaagtatcaaatcaaatagtaaaagttactaaaagtttttcgggttgggtctagttcttgtgctgaatatcggaattgagaaatagatcttaaacaactcaaattgtattgttcatctacaagcccacgtcccatgatccaaatctttcaattctcaaattgaatttttgtgacgaggcaatgaaacataaaatagttggaccggtctacacatttgtatatgaactacactcacttgagtctaggcccaataattactaaaactaaaacccaactcagcccaaaaaccttttctagtatctatttaattatatagaattctactagctcaacagaaaggctctcgtagctcagttggttagagcacccgtttagtaagcgggaggtcttgagttcaactctcaacgaaagcagaattaattttgcatctcgttttggtgggacccacccacattaacctcgaaatgatgaaattgtacgtttattgatgggagacatttaacttcgaaatctttaaatctcaattcaacatttcatgtgccacttgacgaaaacaaaaaatcaacatttcatgtgccccatcatttacattttttgcaaactttagtagcttccctattttagttgagacacaacttttttgtaaatataatattttataacaagttaaagtttcaatctaattgtacttttagcagatttaattacattgataagcaactattagtagatgcaatgtcgaagaacgaaccccttttataaaagcttacaacttttacggttgaaaagggttacactttatatatcaataataattttgttgataccgctggcctgtcacattggacccatataaggtccacgaaactttcaatcttcgtcccacaaagaacttgatttttgttatcttctataaatccacacttggtcaggtttttcaatttcacaactaggaaaccaccaacccaaattcagactaattttcgtgatttctgaaaatttcatagtactaaattatgcatgggtaactccgcttctgagaaatctgaatatttgtatgaccataaatatcaaatggttagttggatgctcatattggcatgtgaaatttattgaaacgaaatttccatttattgactacagaattaggttccattccgacatgtgtgtgcctttcaacccctctttcacatccctttgtttgctcacgcaaggttaatgaacttcaccaattgttaccatttcttggaccaactttcacatgaaatttacgatatactacttagttactaatgagtaatgaccatgtatagagcatgctaatcactaaatcataatataaacaatgaacttaccaaattcattttccctaactcaaaatatgagttgcttaagtacttgaatcttttacatggtgtagctatatacggcctatcatttttactagacgctacagaatctatttatagatattaatgaacccaagtaaagaaatgggtcctcactgcttattgttttactgcttataatattttttaggtgggaactcaaataaacgtcaaagtatccatggaccatagttatgaatgccactttgctcagatcaatcatctctgtttcccatgtcgaaatcaatcatcttctatcattatgttgtctttatatcatctggggtcttaaatcgttctaatgcaatgattccataaaatttgtacatcattgatctttcaacttctatttttttgccttcataatttcttttttataatgaatacaagtattaaacattgtttcctctcattttgcttaactatagataaaagataggataaaatctcattaggaataagaaaaacacagaacataattaagattataaataaaagccaactaactcaaaattctacagttattgctacaccacataaagggtttacgatcatgagtcatgaccgcatgatcatcccaaacccgacccggaatcacaacgtatccatttgggtcaccacgatggggctccgaaccacgtgtttcccaccatcaaaccacgtgactgacccaaacacagcacctgtttctcccaacacaacattccttgtattaaccgtcactgtaaccgcatagctccgtctcttaacggccgaagtaaacacaagcctaggtggtttcactgtcaccgtcactcctctcggcgactctatcctcgcccgataaaccgcctcagcctgcccgacattcgtcgccgtccttataacagttttactcaccaatcctcttctattagtaggaaacaccgccgtgatcgaaggataattcaaattcccgggagacggtttcctggtcgtcggacatctcaccggtgttcttgttatcacttggatcgtctttggtccgtacccgatggagcaaagaaacgtaatgtaatcatcattagttatatcgtagacaagacccggattcatagcccggcccaaatttaaatgacccgacccgtaatcataaggcgtagccgatttcccggtggattcatcgatcaacgagcggttagagttatcgacgaggttagtcgttgtcatcattgccgatcgtatcacggcagggctccaatctggatgagcggatttgagaagcgccgccgcaccactaacgtgaggacatgccattgaagtaccggagagaatgttgaattccgttttccttggatctgacggcaaacctgtaggtccaacagcgtctgtccatgcggcgaggatgttaactccgggagcaatcaaatccggtttaagaatctccgggcttaaaccgtttggtcctctaccggagaaagaagcaataaccggagccggtttaatcccaactatagttcctctgaaatcaattgaagcaattggattcggatgtgaagaagcatatgctttgattctatctccttcgtttgatccaacggcacaggctggaataagatgagcatctccgactaatccttcaccgttagatgctccattagcgagaatcattccgacaccacctgctttcttcacaaccaatcctttggctacgcgtggactgcttcctctatcgcagattactattttacccctcacttgcttcggatcaagcgtgttctccatacatagagacgctgatgacattcccgatttaccgggataaaccaccggaaacatacgaccgtttaaaggtactccagcgtaaagagacactcctctgagacgatgtccgtcgccgagaatagcatccgctgggaaattccgatcgattgtactagcaccaacggtggttacccacggcgcgaggttcgtaactgacataccgttaggtccttcgtttccggcagaggaagagacgaagattcctttcgacgcggcgccgtacgagcctatagcgattggatcgaggtaatacggcgaagtaatcccgtctccaccaccgattgagatcgatataacgtcgacaccgtctctaacagcggcatcaaaggcggcgagaatatcggaatcgagacaaccggaatctttccaacagactttgtaggcggcgatacgagcttttggagcaacacctttggctacaccggaggcgtaaccggacatactcgctttaaaagcgtgacggccagcggcggttgaggaagtgtgagtaccgtgtccatcggcgtcacgaggagatagaaactcaacggttttgttgattcctccgattacagcggcttgttgtcccttagcgaagaatcttgctccgataattttacggttacagttccgaggactgaatctggctccggattcgcaaacgcctctccacctttttggaattggaccgaggttaagatctgagaaactcctccgctccggccaaattccggtgtcaaaaacgccaatgattacgtctgatccgtaatcagattctgaccatagtcctttttggttttgtaaaccaagaaattgaggagaacgtgtggtgtgaagctctcgacgtcggtcttcgaaaacagcaagaactgctgggtggttacggagattatctgcttcatctggagtaacaacggcggagaaaccatggaagactgtgtggtaaacatggacgattcgagattcttcggcgaactcggtgctataccaatggtagtgcgtcgggaaaatagaaggcatagatccaccatcgatacggaaaatgaaagtcttcgcggcctgagaagctgcgaaagagataaacggaaaagagaggaagagaagaagaacgatggtggaggaagccattgaaggagtggagcgagtgaagtgagtggggggagttttaccgacatgacattggtgctctcataattataaaggaaaatatcattctttacttctttttttcatttttgattaataacttttataattgttagtttactcagataaatcatcaactttggatatttcttctgcgaaaatattcctagtactatgtcgcttgtatgattctgggcaataatatagttgtctgattaacacaagtgagagaaaacaattttgataaatttcatttgtttgtaagataacggaaatttcattagcgaatgagataggtggtctttgtggtcgtggacagtgatattaatgaaacgacagcgttttacggagatactgcaagaatgagtcatcgctttgtaggattcaatgtattttattcatttttatacaattttggttagagaaaagtaaacatcggaactgcggaagttacctttcatcaccaggaaaagtgtgatcgttcacatgcaagtgagatcatcataactatataatacgatccattcataacggtcgattagtttctcttaaaacaatcaacaccctctaatcgtaaactcatcacatcctctgtttactattaacatgttgattttgtcaacacaattactagtaatcaaaaactaatcatatagtagattagtaggctttttaagtattagtaggctttttgtttatctcttttatggtggaggagcggagagttgagcagagaatctgagtcactgcaattggacaataaaagcgacggaacagagacttttagtgattctcaatattactatattcgtccattatatgagcttacaacggctataatttcaacttctgatgaaaatactattttatgtttctcagagattaggataatataggttttacacagatgggcatgccaccaacccagtcgcatatcccaatgttgaaaagcccatttgatgcattgggctactcatactaggccatttattttgataggctgaatttattgttttggacttcaaccaagttttgtatatcatgcagaagtcaacttgtatgatttgttttattcgttttgagttctagcttacttacatcattctgatttgcggttcaaatctatttgaattaatttgatagtcagtaaaagcttacaggtagtttgtgtcgatttatggtgtgtttactgtttagtaggcgtcaccaaaatttaagtacaaactatacattgaaagctaattcggactgtttacagaattcctctccatattttgttgctcatataggttatcctaatcttgagtttacattttgcactttattatatatgaaaatatccatcaagtaggtcaaagcaatataactcatatatctattttgatatcgttcaatctttgatatatgtctcaatatacatttcttgaaatttcgtatctttaacactatcacatgtagaagaacctaattatgcccactagcctgatactaaactaaactccaaagttttaggttgatgtccgttgttttacataaacaaacatttggaaaaaaccaaaccacactagttaagttcttatatgtatatatttgtatagttttggaaataaggtgagtgacttttgtttaatatagtgaacaacacattaatgtgataaagacattttaccaacacagtgaatgctttgaattagtactaaaaataatcaaacgaaatatgccaaaaggttgcaatgaatagaaaacatgtacactttcaatcgttctcacgcttctcatccttacacagcttatccacttcattgatatgtccaatctcttgggaataaccatcgacatacatttgtcaaacattggttggattatcgagtaaaattctagaaatataccaaggatcgaatttgaatgcatatgtcttgtcagcaaagcattacacccatgcgacacttacaaatggcgaacattttcgcatctttttagtagattatcaaatatgacgacagatcctaacaactatgatatgaataaaattactagttattagaaaagttgagaaccatgaacgagtctgttaatagcttttatatcacaattcacagctataaattgattaatatagtatttcatttcatttcatttccaaagtgctaaaatccaaaaccctagtgttgtttagacccaagaagtcataaccaatgctactactaatgtcggttgaagaataactgctgctactactgtcctctgtttgacatttcacattattacagctacactccttgccgttcccgaatccaaaacggcacgcactgcacctatacttcactctcccaaaccttaggttcctctcatcatggagcttgtcttgccatggtggactgatcctaagctcaagattcaagtccagacatctttcttcaacaactgagtactcaactctcttttgaattctctcgtccccgaaatttgctattttctccagctgaggaccaaaagagagaatcttgacaagagggtcctctgttttactagaatcagacgaatcttgagaagttttggtctcgttgataggtcgatgagtcgccggatcaatcccttttcttaatagcttcctcttaacatgtgtgttccagtaattcttaatctcgttatctgttcttcctggtaatctcgtcgcaataagagaccacctgatagaagaaaaaaaaaacagagtttaaaaaacagagctttttaacataacagaggatagtaaaaaaaacagaggagttgttttgtgactcacttgttaccgagaaggctatgtagtttgatgatgagatcatcttcttcgagggtgaagttacccctcttgagatcaggtcggagatagttaatccatcggagacgacagctttttccgcaacgttgaagaccggcggatctaggaagagaacgccaacaaccttcaccgtgagctttgatgtaagagatgagcttatcgtcttcttccttagtccaagctcctttgtttgtgtggtctttctcacagcaaggagaccttcccatctttcttcttctgattcttgtgatgaagaaattagggctttatggagagacggtttgagaaagagagagagagagagaggttggaagaggaaggtgaagcctaatttgtttctagaagagagttggtaagacacgtttgaaggagtggctagtgggctccgttctcttttttctttttaatctaagattaaattgtgtttttgtttgtttgtatcaaaactagaaactgcaacattcacacgatcgtgttcgcagtttcaatgagaaaacgctatatggcttttatggttttttcaaacctgagtctagttgtctacttatttacttattagcctagttgtaggtgtgaaaccataattatgaatggcgacatgcgttttgttggtgattttagcaatagaaactgtgatcaatatttcacatttcctaaagaaacttttcaaactttaccaaatttaatcatattatatttaagtagttagataggtgaaaatttggttcatcttgtttttttctatattttagtttcattaataacgtaagaaaaaaaaaatcatcgagtttgttcgatatgattttatatcgcaaataataaatttgtttgagctagggttgtaaaaacaaaagtagaggatatatttacattaaagtaaatagttataaggattttgtttttggacaaagttggatggtttcgtactgcaacgaatttaattcaaattatggacatttatgttacaatggaaaatagtatatatttgccatagtgagtttggtaaggaggttgtaaagggcatccaaatgaccaaattaagtatattcaaatcagtataaagataaattcgttagaatttctaaagaaaaaaggagaacatgttagtttgataatttttttggttaatcaaaagtttggaggattaatctagaagacacaaacaaggttggttttgagggaaagttaatttcatttttgggtacggtttggtgtagatttggctgcaatatggggagtggttcgtgaccttccactttatcctacttcctttaagaagtgttaaaacatatctcaacaaatcgtttcgtatatataagaactattcagataatgtatcaaccgtttaaattttaatatccattttctcttcaccaaagtagtgagatatagcattatataagtaaaacctacatcctatactaatatttagctacgcgctatatgataattacttgtgagtaattaacacaaaatcaggagttcctacaatcggtgaaacctcacgtggagtttgtaatgtaatgaaaatggagagtgcatttctacctgctttctccttcttccattaatgatttgccctaacacgtgacctttttactttctcaactaccattttaccaatctcttaattaattccttatcttcttttccatcaattcaaggtttcttatttatcgtaacgaccaactaattcttagaaaaaaatcatagtttcttgagaaacgcttttcgtaagctagcttatcatttgaattgatatctatgaatttatccgacgtatctatgttcttgacaagttacaaagaccatggcctacaaaatattcaagaattttgctgtcatcacgagctaattaagctaatatcagtatatatgaaaatacgacgactctaagaaaaacattcgtgaaatgcttttgtaaataggtaaggggatattttgaaataagtatcgataaaaacatatcgaataatgattgtggtttttattcttgtttggagttctttatttggaaaagggaaaaagctttattggtgaaagtttgtttgatacctgaaagacaatcttaaaagagtttggtagatttcatggtgtacatttactctgaactcctaccgacatatttgtatatttaataacgaagaaaatagaaatgggatagaattgacatgtgatttgttatctacacacacaccaaacaaatcttaaaaaaataggtacattatacgacttttagaatgtatacaaagtgcaacatgtaacatatatttcctaattattaaaaatgtatggtttatttatttaaactacttacaagttacaaaaccttcgttcttgccaaatttagaagacatgcgtttctttcttttagtttcttatataagttattgttaggtgatttcacattctgttaaaatacagtacacttcttttacgtaacaacaattcttttatgtcaacttgaataaagctatttgctactttgcgtccattacatgtcatcccgagcctatatttaggtaactggcaaccaacatcatatattatcttctttaatgaaaatacgaaagcaaaaaaaaatttaattttaatttcttagtagaagtttcctacctaactaaacctaccactaccaggttaggtcaagtttcaggttatgtccccactttggtagatatcgaccgatctttgtttctttcttttttctttttctttggtactaattaataagtgaaacgaacattgcaatgaacaaatatcgcaaaaatgaatcacggacccaaaatattgactttttaacttttttactactaaacagtagaatcgtggattcaaagagtttagaatcttgtagcagcaaaatagattcgatagacgattaatagtttctttaatacccaaataagagcatcgttgcttcgtgttttacttcctatttcgtttacttcatcctcttccggatctcgtaaaagtaaccaaatgccacaaccgcagcagcaactgcaaccccgaacgcactctgtgccagaatcgtgctgtctgcaactgctttgcctgctgaggagtttgggttgaaaccaagctcagagagtttcttgtgcgattccgcgtagtctctgaagaatgcatcttcatcctgccaccacaaactgaacttgtcaacacataacaacactttcttatcttattgaaacttaattaagcaaggaaatcataaagaaccataggaatttctgtttacggttctaacaaaaagctaatattacagttctcactgatagtagtaagagtgttcattttatcattttgcaacatcagcaactataaaggcgataaggatccgtggggttctctagaacaaaaccctagataatttggtttgtgattcagtgtgtgtgcttgtggattcagtgaaaatgtgaaaccaataaaggaaatcgagttatgttccaatggttattatagcaacgcaagaaacaaatggcaaagaggcagagaagatctccagtatattatacctttgcataaagctcaacaagacgacggaactccgggtcttccaataaggtcttgtcagttggaagtttcaacaagccctctgattctcctttcagcagttccctggtaccaaaacagtaaataatcatggataaccgatcatgtaaaaaagtatctgtttgctgcttttatttcttggagacacaaacagaaaagattaaaaaaatgcacaaagaaaatctctgaggataaagaaatgaaaattacacgaagtaggagttgtcaaacttcagcggctcttgggtccatggtccatcaaagcctgacctctccgggtgagcccttccctaaacacccaatgtggtcataagcacaacaagcatatttgttcaaaaacaacggaagttaagtaagtgaccaatgaatttaccagagtatgaccccctgagagtgccacaatatccttatcagatagtcccatgcggtagaagacatctctgagatgttggaaacctacagagatataaacaatgtgaattcatagaaaaaatcttccaattccaaaacaagattatcagtagaaaacatgaaaagtttgttataattgatacaagaatttagtgtaccttgtttggcatcaggaagtcttccttccttggggcagacatttgaatcctatcaagaagaaacatacagtaattatgtttgctttagtgttaaactgataagctgttataatgtctcaagagatgagaaagtatacctttctcccgggaacgaacacgatgtcaggtccaccagtaacctcaactgctaccacaccagcaagctgaaacaaaacacttaaaagtaaataattcatacccaaaacttaattgccattaaactggtacacttctattgggaattcataaataaagcctcgaccttgtaagaccaaatataaaatggagaaacggcaatacaaacagtcgtagagacaggttataggtacagacgacagacatgtgacttaggatggaaacagattgacattacattacagtttccttcttggtcgtttgaattcattcagtgtatattttacttgaatttagctattactgcaagagataaaagttctagttgaacaacatagtcaatctatgatttttgtaaaccaaatcacaatcagtaacatctcctgaaacaaattacaactgaaaccatatttacacagctgctcaactatcaactaagtctcctaaacaacaagctcaaacctgggacgaggtaatgacacaagccgaatacagttccagcgaactttgaaaaacaaatgtgcagaaaaagcaacaaggacatcaaaaagatttctctcacagccttaactcacctgatacaggtctgcgtatgtgattttgggatgcttagctttcacgccctctgaaacatcaaagataggatctcataattaagcgatacaaagtccatttccaaaagcataatgtaattattttgaacagtgttcttaaaccacaacataaaacggatacatcgcatgaaattatccagaaagtgaatctacaaaaactaaatcaaaatcctaccacagagatcgagagcgatcttcaaaccactgttggcaccatgagtgtgctcttcttcgttcctgatagagccattaggtccaccggtcttcgattgagcatcataggttccagcatcgtgccatcttcataaaaaccagatgatacaaacatttcaacattcaaaaacaaacaaaatcgattctacagcctaactacaatcgaacgatctccacatgaataaacgaaatctgtaacagtcaactcgacgaaaaaccaaggaaatcgaaaacttacgccaatcggagcatgataggagcacagttcttgttcgcgatgagagaacggagctcacggcgagccttagtgatctctttcaagtactccgcatcaacaatcggtgcagccatagctcctactcgtttaggatttgtgaagaagaaagagagcgatgaacaagaaaatggtcaaggatgtgtgtgaagattttttttggttacaccgaaatttgggccaaagagataaaaccacccaatgagaaacgggatttgaatgggcggtgtcagttatctcctgttttcctcagccacatctttcggtggacctcattggctttttagatacgattgttggcacgtgacttgcatgtcattttgttacacaaaaaacggcacacgagtttgctagttatttgttaaacagcgtgcatgttcattccttaaattttgtaaaatggaaacattgaataaaaatggacataaaccattattttttccggtgatttatgttttctggatcatattcgaatatattactcgtgtattagagttaaattgaagaaatcaaatacaaacagaacgacaaaaatcgatgtcacaacactttgaaattggtctactaaacacaatacatgaaccatatgtaatgtgatgatatacactcttcagttcttcttcccacgaccacacttgacttgcacggcaagcatcttcacaacgttcttacatgaatccttcttgtcttgttgaaacgtgctcttgttcaccggaatcacacattcagctttccccaaacagtgctgcaatagattttttttattggttactcctatcataaggtacaaactatatagcaagaagaaacaagatataatattttaccttctcgatgacttgctttgaaacaggagcattacaagtaccaagtgtgaagtttccacaaacaccaatagggtttccgaagctagcgaactcaactgctgcgatcttcttagtgcctgagcatttaagagtagccgtgagactcacgttatctgtgatggcttgaacttgatctttcttcctagtccagtgtctaacacttggagtgtagttttctccaacgtaagaacaaacagtgtctctgttaacgatggcaaagtccataagctcaggcttcacattaggctcttcctcaaagataacaagaaggttcttcttgggctttaagaaagatctagggatgtgatactctatttgtgtaggttgacctaatggagacaagaacgattgccaatatcttccaacgccttctccgttcacccaaatcaacccttttcccattccatgcatgcgaatcgttgctgcgcttacgctctctggtgcatcaaagtatgtctgcaatgtttcacattccttagaaaacttctacatatcataccaatcatactctgtatagtttgatttttgtttttgtctcttacctggtaccatgtaagtcctggtgcttttccggtgaattttttccattcgaccttctttaaaccttcctcagtgtggattccaagtttttcaccttccataccgatctaatgatcgaaaaaaacggatcagaagaaggaaatgcatactcaatgttgaaatacaataacggagaaattgtttataaaccttgtttccccatttgctgctctcagtgagatcaagtgttccagaagtcaatcctaagatggaaataccacgaggaccggtgtatctatgctccatgtaagatccactgtcctgtaagaaccaaaaatcccaaacattaacgaaacaaatcttcatctatagatattgaattatgtttgttaattacttactgggaatcctgtgagaacaccaagcattacaagatgattctctcctgcttttagtgtaacctgtttttggaaaacaaaactcttctcttcgtggcttccatgtccacttcctgttaagaagatatcattattatagctcattgttgtagtacttgtagatcattcttgcacaaattcttaccaaggtattctccgttaagccaagcgtgcaacgcgtgtccaagactagcaatcctcacaaaagtcttaactcctttcttggtaggtaagtgattcttgtgaaccttgaagctgcaaagcaaaattcaacttcaaaattctcttcttttatatattcaataaacaatcacataaaagtaaattctttaccttgttgtgtaccatccatagtctgtcttgtctttagtcaaaccataaagctcaacgggtatgtatgagttaccttcgagtttactaggcaatgtctctgtgaaaactttgaaatcaaacttcttgtttgcctttttagacttcataaagttccttgaagtgtgttgagaaacaatctggtccaataacaaacaagaacttgttaaaactctgttttttttgctcaaataaaccggtatttaatgttttcttcacctgtgcagtgttgtaaacaacagttttacaatcgggaagaatactaatagaacgaggcgcgatcacgtattctctgcccttgaatttgatggtttctgcagcttcagtattgttgttagccaagaaagcagcacaagttttggttccaggttgttcgtagtatctaatctgttattacacaccaaaaagttgaatcctttaagcattttgaaaaaacaaatcagagtctgtttgtatgtgtacatgcatatatgctaatacctctgtatcttttccaggtttctcggttttaggctgaccccaaagaagtggcttcttgcagaggttaagagcgttgtgaagatgcttaagatgaccatacttaggctctttctctaaaccatattcatcaagaggtgcatcatcgtagtatctagtggtcacataatgtgcagaggttcttccaaagttagtccctccgtggtactacaagattaaagaaccattttgagaattttgacaatcatttttgcatatatggttaactcgaatggatcataatttttaccatgtagtagttgacatgggttccgttcttggagaagaatcgagcaactgaatacgcgatatcttctactgatctttgagttggcggatcaccaaacacgcggaacctattgaagaaattggcaagatattcaacacttatatgaatgaacctaaggtttttacatgtttaattcaagagtaagaaaaacaaactcactgagtagtccaattctcagtccataaagatggtttgttttctctgtttggaccggggaaagtatcaccgcaatgtcttccattacaagcattgatctgtttccacagtgttttcaaatattttaaaactttcttcctcattcggataaaacacaatcatgtaaaaatgaactttaccataggatcaggagcgtcgttctgcttgcacataacccatgggatcccgagtttcattgagtccaccaaattagatgcccatttaatgtagtttaacccgtcttgtttatatgcacgttgaaccgcgctatattcgttttctatctgcaattcatattcattccaaaactcatcattttataacatttttcaaatcatatataaatatataggtttctcttttctttgttgtcacctgtcctaatataatggggcctccttgtgacgcaaacaatctttcctccttcattttgtcgagtatcatccgtacatacctttctgtatgctcctgcaatatttttatggtcatatcttgtaatatatctaattgtaacaaaacacacattgacatatatatagtaattctatgtataataccttgaattgtttattgtctgtacggaagaaaattccaggaacttctctaagccaataaggaagtcctctgatcatcacaaagagatcatataaaatgttaaaatgaagatcttgagaacgccgaaaaagaagaagaagcaatgcattattacccatgagtccattcagcttggatgaacggtccaagccttaaggtcacatacattccattcttttgaatcaactttatgaacttcaccaaatcagctcgtcccgaaaagttgaactgatgaacgcaacacaaaatacattatgaatcctaaagattcatgcatgcgtgttttatatgttctatatatagatcagtttttggttatgaattacctttccttgttgaggctcatgtacattccagaaaacgtatgtctgaatcgtgttcaaaccgccttgcttggctctcttgatgatacttggccacatctaaaccaaacccaaatgacacaataatctcaatatacaaaaaaaaaaaaaaaacgttttagaaaaacagagattatgtgattcaataaatacttccggagtgcttctcgggtaatgaatagagccagaataaagaagctctcttttgccatcgatgatcaaagaggttccatcatatgtcacctccttattactcttcttcttcttcttggcgtccttcttggccgcgaaggaggaagaagacgagaggagaacgacaagaacagctgttaaaagccatcgatcaagagaatgttttctcattgaactctcttctttttcttttttgaattaatttttggtgtcgtacgtagaacaagaagctaagttctcttggaacctcgtccttgtcggaggaataaaaaacaaggagagctcaaataacaagctttcagaaaagaggatgatataagagaatgtttcgcactcaggttttcaggtttccggagaaatttacgcgtctgaaatagaatccaccgttgtaactttgaaactctcttcatttttccttttcgattttttttttttaatttgtttttgctatttttaaatgttggtttcaccctattcttcgcctattatgttggacataacataacaaattagtgaaattaccattcgttttttttgggtccccataacagattctttaacggtcaataagtgtttttaaaattaacggtcaataactagctagacagattcaaaaggtaagcctttataccgtgattggttataaaaatattaaatattgaccttaagttcacgttttttttagtgtctcaacatttatttcttagagaagttgtatgtacatttttaatgtttacttcaacataccgggacaaaaatattatcatttaacatgtaacagaagaatatgtatccaaaggaggctgatcaataaaaattaacactccaatcatattgcattgtaaaaccagctatattttttattgatatttaaaccatagttgtataatcctaatgacacatcggaaaaatcctctaaaccagtcaaaatttagctaaattttttattgatatttaaagatcaatctaaatatgtatagatttaggcatttagtatatgggctgcatagtattagatgaaaacgaagtttaaaaaaaaaaaaaaaaaaaagtacatagaaattattattataattttcatcccataaatttttgtagggtcttatgttgggaaacgcactatctaagaagaaatgctattttataaaattttagtaaaaagaagaaaaaaaaggaagaagaagaccaagaaattgaggtgcatgtgaggatgagtagtaaaaattaggaagactctagtctgggagagactttcagcagctatttctttgtcttctttctctttaaagaacctcactctctctctctttagtcaaaaatccccaattcgtgaacaaattagggtttttgaagtttgaagaaggagagaaagatgagtgcttcaaggtttatcaagtgtgtcactgtcggcgacggtgctgttggaaagacttgtcttctcatctcctacactagcaacactttccccacggttagctttaaagttctcttcttttactttgatttcgtgaaattttagcttggtgaagttggttttgttgttgaagcttatgagttggatttagtcacaagtatttgttaggttttcttaaagtcttcttctttctgctaccttagtgaatgtactgatgtgatctttaggatttgagagactcagagattcatgtaccgtagcaatgttgttgatctgtttaatgatcttagaaagagtgttaggtaactttctgtaaggagattttgtagctgatgttttagtggaattttctatgtgacaggattatgtgccaactgtgttcgataatttcagtgccaatgtgattgttgatggcaacactatcaacttgggattgtgggatactgcaggcaagttgttaccttggatttttttgtcttttgaatttcctcctcttccagagagtcatttgtgtttttgacttggtgaaacagggcaagaggactacaatagactaagacctttgagctatcgcggtgcagatgtcttcttacttgcattctcacttgtcagcaaagctagctatgaaaatgtttctaaaaaggtttgatctgtggtcttctcctgaaacttctttcctgttttattcagtttacattcagtgattctgatagaatacatttggtatcttgcttttgattcttagtgggttcctgaactgagacattatgctcctggtgttcccatcatcctcgttggaacaaagcttggttggttttttcttagctcaactcttaatcgcctgattatcgggggttttctgttttggggaactcttctgatattttgatgactgagtctcgtacagatcttcgagatgataagcaattctttgccgagcaccctggtgctgtgcctatctctaccgctcaggtacctttctcattatctttctaaactgaatcctaggtgttaatattctgcatgtttcatattttgatggtatcaaaacagggtgaagaactaaagaagctgattggggcgcctgcttatatcgaatgcagtgcaaaaactcaacaggtattaacctgagagtcaatatctttatctaatctttacctgtctaaaaccgccaattgaatctgctgatgattcctatatctgttatctgttcaacagaatgtgaaagcagtgtttgatgcggctatcaaggtcgttctccagccaccaaaaaacaagaagaagaagaagagaaaatctcagaaaggttgttctatactctgattcaacaagaagaaaggaatcaacaggagaattagagctataagtatttgttttctcctttttcataacttgtttacccaaggaatcaaaaatctgttgtttgtagtctgaaaatgacaaaagttgaagaactagtaacaagtatttgtattcttgtttgcattttgatctgtaaatataccacgaatccttgatttctctgtttcctagattcacaccaattgtcttaaggattatgttccaaacctaaagacaatgagagcttacacgcgcgaaccaatgagaatgagagagcacttgtctttcttggacaatagtatctaaaccagcttatttgaaaccttctgaatgagccagagtgtcttccatacatatcaattccacatagacctaacctgatctttagactataatcttcaatgatttcagaacctcaaaacttttgattttacatttttaatcaaatttatttgatattcattttgcttattgactagacgttttccccttggagataatagaatgattgattttaactctcaccggaaaagacaaaaaaaaggaaaaataaatcattgattaaataaaatttatggtgaataagcttggcttctctttaccaaacatatatgtttgttgatcaatctctttctttgcgttatctgccccttgatttagacccacgtattattcgattcctaaactaattgaaatgattagatatgtgtcatgacgtttagtgaactaatattcacctaatatgtctttcaatcacttaagaatttgcattattcttgtgaaaaacataaattcacatgctgctagtaaaatatgttaacaaatcaattaaacatcagaaaataataactgagatcttcataaagaaagtggaagtttttttaaatatatgaagaagaaaagtgcgtagtgtgcacgggacttagttcatttaattctcgagccattgccgtacggaggaggctgccttcaaggcttaagtcgaggcgtgttcgttacgtttaacccgcaatagccggtggctacacactcacaaatcccctttgactcaccggatatcgacggtttcccgctattttttcccctaactaactttttttccttttcttgtaaaactcttaaaaacaaaactcggtgttgtctctttgtttgctcactccttttctttctctctctcgccgacactttcattctcacttgtgttcgtacgtaatgttcttgatccggtaggtttttatttgattataaactcatttcatttaacaaattgagtccatctctctatgattcacccataagatgatagaagaagatcaacatttacgtctgagataaatcatgtcctttaatgtatatttgtttattttctggtcaatcatcgatctttcttagtcgtagcagttacacaatgctgatggtacatggcggcagattttcgattcttattatttaaagaccaaatttaataatagatgtatgtacaacgagttttggtatcactatcttgtccggtaatgctcattgtttatcttttaaatctacgtcttcttctgcataattgacacaaatcacttgtttcaatggagtttttgtttgtttgatttcctctgttacttatgcagcaaaagaagaaattgagtttaaaggagaagtgtgagaaggaagtttcaggaagatgggtgaagaaaagaggagaatttcaggaagatcagtttcacttccatcgatagacatattactagacgagaaaccaggttggccatttcttaaaagagcaagtttagggacaccacaacaagttcacaaatggcacacacgaaaagtctcagtggtcaattgggtcatgagcttacctgaacggtttccaaatcatcaacagactctaaactatgagacaagcttgataaagaaacaaatcaaggacatattgagagacaataacaaatggttcaactacaatgttcttaggaaagcaacatcagatttctctcaaggtactctgttttttttttctctgcttctcctgatgagtttgtattgatatttgcttttacatgacagagaatgtgattgggaaaggaggatgcaacgaagtgtaccgagggattcttgaagatggaaaaggcattgcagtgaaaatcttgaagtcatcatctaaagaagcaatgacaaatttcgttcatgaaatcaacattatctcttctttgagtcaccaaaacatctcaccgttacttggtgtttgtgtccaagacaatgaactaatctccgtttacaatctttcaaacacaggaagtttagaagaaacccttcacggtaaacacaacactctcaacttatgtttaagattctgattgatttggtataaagtgtgaaatgtgttatgattgattctgcaggtaagcaaaagggaaagtatgtattatcatgggaagagagattcaagatagctatcgggttggcggaagcattagactatcttcataaccgatgttctaagccagtgattcatagagatgtcaaaacttctaacgtccttctatcacttgagctccaacctcaggtaatgtaagcttctagctttgatttatatgttaattttcataagagaccgagtgtatttcttatgattatgagaatagctgtcagattttggtctgtcgatgtggggaccgacaacatcttctcgatattcgatacaaggtgatgtggtgggaacatttggatatcttgcaccggagtacttcatgtatggaaaagtcagtgataaagttgatgtttacgcctttggagtggttctgcttgaactcatttctggaagaaatcctatttcacctcagaatcctagaggacaagagagtttggtaatgtgggtaagttgttttcttctgcgctggttacttgtagcataagcaacacttcgtgaaacctaagaaaagataccttggaatgcaggcaaagcctttgattgataccggaaatttaaaagtactgttggatccagacgttacagatatattcgacgagtctcagtttcaaagaatggtacttgctgcttcacattgcctcacaagatcagccacacatcgtcccaatataagacaagtaagattttgtttcattccttaagaaagctaagtccctcatgcaagaactaatctttaacgtttcttcagatactgaggctactaagagatgaaaacgaagccgggaaatggattatggaagaagaaggaaatgaagattgcttcgatgacgaggtttacccgaattccagcacagaattacacttaaaccttgcgatgcttgaggtggaagacgatgaaactgcatcaatcagcagcatggagagaagtaacaacagccttttttcttctacttgttcatctagggagcttcaaacataaggaattatgcttttagctaatagagaggttaggtacttaggttagaggtttgtttcttagtgtatggagtttacttgataactttatgttagacctgagctccctgctgttatctggaccagaaaattcattcccaagacgaatcattctcaatatcaactatgcctatctttattaggcatttcctcaaagtgccatatcttatgttttcgtttttctgaattaatcaaaatcgaaaaattctctaaaaacctactttagatctagggaatgttactaagttttcggatgaaatactaactttttaaggaagcactcacaaacttgaagtaactacatatatgtttaatttcatcgaagtgcgtaattttgtttaactcttatcgaagcaaatttatgtaagaagtctggttagaataaattgatggcttgagacatgccacattatttttcgtatatatatttgtccgtatgtattcgggttgcttgagatctttaaaatctgactatttcttttttttgttaaacggttttcttaaataaatgaaagaaaagtttacaaagaaaaaatacgaaactgttacaaccagaaagataagaaagaggactagcagactatttcatggtgtatataatcattttttattttgtcaaacataatcatatatattatatatataacatgagggattatattattgcttggacgactttcgtaacatataatagtaactatatatattattcattattacatgtatacgtcaatgggttatgctaatttatttggcgtttacgggtcggcataatttttttttttgttctaatggtaatgttggctctaatgttctgagtattgtttaatttgttatcaattaaaatattttatattttaagctaaataggagtacaggactatagaaggcgaatggtctacaaatgtgaaattgacacgttaactaagacctaattcgatttgagcatcttggtattttctttaatattcgtagacctccgcaatgcctgaaattagagcatcttactgtcgcctaacatttatgcgtcttctatattagtgttcatatgttcaagaggagatctacgttgtacgagttgtttttttgtaatggttaaaatgagtatatcttcacacatctacaaatctagagcttaaacaggcttaaaatcagatctcaataaatcatcatgtatccaaagccaaaggtaagctgatttcaaaggtgtcggaggaagaaccaaaaacatagagaatatcgaatacataaataaatgaattaagtacccccacttgccacaagaatataaatttgcatcaaactttctcttattttacaaaccctaaaagagctacatctttcgcgatcactaatgtttacatcaatcaactatttaagtaatagaagctttccaaaaagaaaaataacaagttgaagatagtcgatagtgattatgattaagtctcactttttttaatacaaaagataaagtaggtctggtgataaacaatccatttgatttttaaatcacaaaagatatatttgtttttttataacaacggaacctacttgtgttataaatatatgaattacaacaatacatattgggaattttacaacacttggatataatcttactaacaaaagctatattcaagttcttcttgtgaatctttgttatttggtttttgaaaaacattatagattataatagaattttatgcgctacatgataaaaaattgtcaacgggtatatgagtaaacacatatcacatatatatatgatatgaacgtcgaagctgtctttctactttttgtggtcttcaacattttcgggtcgatgtctcaaatgttgtttgttttttactaaacaaaagaaaaagaaatcatagaacttattagtaaggactataactttttaaaagattttggttgtagaaattaggctgatatttattttgtaaaaactataagattttgaatttttgactttgacatgaatattagtagggtattacgtaaaatttgcaagaaatgagaattcaaaaagagccaacaaaaccaagtcctgaaaatggacatgactaattaaagaaagaaaatgaaaaaacaaataaacttccttactatagaaattattgtttctttttaagtcaatggtttgtttttttttggtttttttttcatgttacttgtttgtacatccatattagtcttctattatcatcatgataatacaaagttttgactctaccaaattataaaaatcataaaagacgaggagctccaatcacgttcaagtaatagtatagatatatggaaaggaaataattaaaagaccctaattaaaatttagttcaagacctactttaaagccttttacaaaaaaagaaaagaattctctaagtcgaaatcgttatcgtagtacgttcatgtcttttctccggccaccgaaacgatgccatctgtttagtgcgcctttataattcaacgaccctttgtacttttccgattcctctttctctataacttcatctctcccattctcttcactcttctcaaaaattcgatctttagggtttttcttttatcctcttatcgctaatctggagctctatagagactataaaggtatgtttttttttcctcaattacaggctcggatgctcaaattttgtaaaaaatgactattttctattgctgaattgctcgaattgttgtgaatttagggtttttgattgattcgggagctcgagatttgacttcttttagctgattcggcaagtttgtatctagaaaggatcgattggtgaggtcaatagtggttggtgggttttagtaatggaagacggtgagcttgatttctccaatcaggaagtgttttcgagttcggagatgggtgaattaccacctagcaattgttcgatggatagtttctttgatgggcttttaatggatactaatgctgcttgtacccacactcacacctgtaaccccactggaccagagaacactcatactcacacgtgcttccatgtccacaccaagattctcccggatgagagcgatgaaaaagtttctactgatgatacagctgagtcttgtgggaagaagggtgaaaagagacctttgggaaaccgggaagcggttagaaagtatagagagaagaagaaggctaaagctgcttctttggaggatgaggttgcaaggcttagggcggtgaatcagcagctggtgaagaggttgcaaaatcaggctaccttggaagctgaggtttcgaggcttaagtgtttgcttgtggatttgagaggaagaatagatggagagattggatcttttccttatcagaaacctatggctgcaaatattccttctttctcgcacatgatgaatccttgtaatgtacaatgtgatgatgaagtttattgccctcagaatgtgtttggagtgaatagccaagaaggtgcctcgatcaatgaccaagggttaagtggttgtgattttgatcagctacaatgcatggctaatcagaacttaaatggaaatggaaacggatcattcagcaacgtcaatacatctgtctcgaataagagaaaaggtgacacttttattctgtaccttagagttttctctgtaaatcgttctggtttagaaccggaggttgtttactcactctgattattggtcaactcttgccttagtatgtcttataatgtgaagcaaattcgtgacgttctcatttagtttgcctcatagaatttgtatgaactcacttatgtttttgactcatcgcttaggtgggcatcgtgcatcaagagcagtttgaagcatcatcaagcttgtactatctatttccaccagcatagatattgtattccaaataagttgtagagttcagctgcaggatcagcttcgctcaggttcctttgtatcctcatttttgttttttgttttctgactctctttcccttccattgtatttccttgttgagcttgacaaactagaaggatgatatattgttaatacaacaaactcaaatgttctgtgtgttcttgccatttgttttcatacttgagctgcttcttcttaagtttatgtcgaagaagttgattgaatattgtctctatgcatgacaagtaggaattgatttgactacaaaagttattgataagatgcatgaaatttttgtacctgctgaattacagctttgaggggttggtggtgtggtctttctttgtggcacgagtgagatctctggacaggtgagttttaaaagattcacttcctgagatctcctaccttatatgcactaaaaaaacaactatatttaaggattcttgaatcttgttgattagaacccagatttagtagtagtagaggcaggatttcgacttccactaaccatcatgttgcttggtgaagaacaaggtatgcccatgaagcacactgttttgtacattgagcttgaggggctgtctctgatctagccttactgtaacattgcaacgttctcacaattgtgatcccaagttgctttgttgacttaaatgtgataatatagcttaacttttacttgaaccaatctcatgatcaggctttgcaatagggtttactgaactattattaaactcaagaatcataacagacgtcctggaataaacgagcgtttcatacttagggtagcacatacaccaaacttgtttattatatattggctcaaacacgttaacaacaacaattgtaagtcatcatcatccgccaaagacttgaatcatttctggttttcattggaatgttgtgcattttggttgccttcatcatcatcatcctcatcctcgtcatcttcgcggtagatgctttccgccatttgccagacttgaagactgttgtcttcagctacacttgagatgacccaaggctcgtccttgttccaggcaaagtctgatatcttggccttgtggcctccatgagagaagagcagctcaggtggaccatcttctgcatccaactctatttcaagctgctcatccccaaccctgaacgatccaccaaattgaaactaactaatccaatttcaattttgaatcaaatgaaaagggaaatatcgactatggtacctgttgatatcccagaccatgagtcttctgtcctcgccagaagatgcaagcactgtttcatggttgggatcccactccacttggaaaacttctcccctgtaacaaagccctcccagtcctcagttatcacttatcatcaacatttgatcaaataattttaaatagaaactatgagagaggcatactcgtgtttgctcaggacatgtaatggcgcagtcagcttacgaaggtcaaacaaggcgacagttgagtctgaggaagctgtggctagtacccattcattgaagggattgaaagaaagatagtttatctgcaaaacagaagatagtgttgtagaatggtcacttgagggtttaccaagcaaagctggcatgtctgagaaattatctgctcataacttcgaattatctattcaaacgagacattaatcttgggtatatagtaattatcctctaattcgtagattagatataagagggaggtagaaagttaagagatggtttatacctctctctcgtgaactttgacttggtgttgcatttggttagtccgtaagtcccatatcaccaattgacaatcatcacccgcagacccgaatatgttttcattcttcatgtgccatgctacatcttcgatgatactttgatgtccctaaaaccatgtctcagggatcaaatcagatgcaacaagcccaaatcttctgtgattcatgaaaaagataaacaaagttactcccaagttacctcatacacatgcattgggttcaaaactttatcagtggcagtcgctgagacatcccaaaggcagattctctgatcttgtgagccactcaaaagataaccctccttaaaggaactccaagccaatccataaccttcttgttcatgtcccattagcctcagatcaggatcacactcacttgtttggggctttccagagagtctggcgtaatcaaacagaaacacctcagagccacttgttttagcacccacaagagttggcttttgtggcatacacctcgctctgttcacttctccatcaacacgtatcttctgcttaatctccacctgcaaatgatagagttttcagaaactcagtctccaataagttttcacatattttcaagtgcctaagaaattgtccgaatttatataaaagctgaattcatgaatattttcgataaggaaaaggctagtccttttgtagaacactcaagacagttgttgattccgtcctcactcaaagctagaactttcgtcgaacacatggtgtgcacagaacacaacttataaaaaatccgcagaaagtgaagaaatctccaggagtaaattaccttagggacgataggttcctgatctcttccacctaatcctggttcagcgtcgggtgtcggaataacgacatcggcgaccattagaaaatcttgggcaccaccggaggtatgagtcccaaggataagcttatggacggcaaagtaaggatctttcgagtacggaatcggcgtcgaaggaacccagtggagagtaagagaaggccattctagtgggtgagagatcataagatcgtagagaaaaggtgtgttccttttccaaatagagaactcttcttccacctgatccaatcccgcctcatctttaccctcttctgccgccatcactctctctctcgctctcgatcgttcttcttctcagttctcactcttgaggtttttttctggtacagtttcccgcccaaaaagagagaggaggaatgaagcgggtaacaatgctgttttcgatgttctatacgaaaacgccatgacgtttatttatatgaaaaaccgcatacattgtgtttcagtaatgtcaggacgacctgttgttacgaaagttatagctgaaaggctggaaattgaaatagtattggactattagctgggaggcccactaaggatccacttcatttaatttcctaaaattattctatttaaaaccaattatcctcctagacgatttttttcttttctttttcataataagttgggttagtttttactaaaagtaaaaacctctttgatctagtagtttagtggtttcacattaaaatttaggattcaatttcgttaaaaagtacgaatttttgcatattaatgaggacaaaaatctcgaacgtaatgcgaccaatcctatccacatttgaggacaaaatactttagagaaaatcctctgctagcttgtcacattgataaagttaaggaccgaacacgctatcgatgtctaaaccaaccctttgtgacaattagtgacaactaaactaataagtaataattcaactttatcatgcatggctaatgatcacaatttgcattatcttttcgttattagtcaattccaccgaactagctccaagggctaacaaactgtgaactttgttaattcttatagtacgacaaaattacttttcttctaagcacaattatttgggcagcttataccgtatcattttatagttttgatttcttttcctaatgttataaagtaataattaattctgattttgttgtacactattatgtcgaatattaaatcccttgctcgcattatttggtcaccggattattaattatcatatttttttgacaactttgttttaaccaccaattcatcaccatgcaatttacatttttttcactcgttcttatcttaaatacattcgtgatggaaacataaacaaacatcaacatccaaacacaaaaaataatcccagtaaaaaaaaattaaaccaaaaaaaaaaaacatcacataacaacacaagcggaggcgttctcgtcgctaaacgccgtagtataacgaacctcagtggagctagcacgtgcgagacgtgacacatgtggatcatactcggtgttcctaacgtacccagtcggggctctgttatcgtaaacaccagacgcgtaaggatgagccacaacgtcgtaaggaacgaaaggatatagctctgctcttttaccggttcggtgaatgatacgagccaccactttgtttggttcaacgtacccaaccactgtcactttctgagcatttggctcgatggttacatctcttattcctctcattccttctaaagctctccttactttcctctcgcatccttcacaatctatcaaaaccctcacatccaccgtctagtattttccaaccacaacatattataataaggatttgattataaataaacgtaattatgaatggatgcagaatttaattacctgtagacttttgtgtctcttggagcttccatgagaacaatcgaaatattcagagacgtgatcaagaacacccatttttcttgtttcttggtttcttctttcttttggtttggcgaaaaaagttagactctatatgttgagatatatgatatgattttctttttttgttattgtcaacataaaaattgagtttaaaatgttgaaaatacgacctaccaaactctataagtagttttcgaccatatatttagttattatatgctgatattttgtatcaaccttcagtgagtcgtgtatgagtttgactctcaaacggcaataatatatatatgtacgtgtatgtgtattggtggttactgggtgtatatgaacctgttataaaaggactttaatctatataggtcgcttttgttatatatgcatcaccagtgtggcaataattaaacattgacagatagatgaaatagacatttgttatacaattcatgtttgctattgaatgaagtttttaagatatctctattcgcaattatttcaaatctgactaaacaattacagaattgatgaatattttgggattggaagttggaatctcttaagacggactgttcatgttacgtattggtggaccacccttgacatgtttaattgtttatgcaacaaatataaatgtttcaagtttcaacatcatttttttatggtttcaaaattaataaataataactcaatgaaaaccacatctcattttcaatcttctttttaaataacttctatagtttaacaattttaattagtatatgtcatgagataaccattagtccatattaaattacaaaacgatattattttgcggggcaaccatccataactaattcactagtctctgggagagctttcatatcaccttaaaatagcaaaggagtataatctatatgggtatactagaaaacaaatcacatttacttgtaaaataaaaactgcatggttagttgtaacttaatacaacgtgaatgatgtaacgattttgtcatcacaaagattcatattacttgggaaatcggaaatatgtgtttgtatatctactatctactagtcactcataattggttatgtttgcttcatccatgtgttccttgtgttgtttgcatttttaattaaaaaggctaaacttccgatttacatttattaaatataccttattaccactgaaaatcatctagaggtaaattatatacaatggtacatgataattcggattaaacatcacaatcctcgtcttcgcatcattttgctcacaaattaggcctggaatattgatatatctgacgacgataagcatattttgatcatgttttctgtgtagaaattttgtgagagtcaaccacaccatcaaatttaatggccaaaatccaagttcatgtaatttgctcgaatattgttatgtttagaaagagtgtcggtcctctgaaaccccaaacaaacgtgatttactgattttcatgcacttttctcttttgaaacctaacattagttggaaataaaaagcccaacattcggtagaattcactattcagacgagtaagccttgataatgggcccatattagtgaaatcaaggactgctaggcccaatgtatacaaggttatagctttacaaccttgaattctcaatttttgggctttaaccagtgtatagacttaatattgatatgaaccaaacctcttctgaatcatattctacaaattatattggaacatcatggtcgtatgtggcagctattgaatatatatatagtttgttgtactgaaaatgatagttagaggaatatgatgaaattcatttcttaagtaaatggtgaccatttgaagcaactaagaactatgggaatattttaaataaataatagaaaaaataggatgtattttatagagaattgtatgagtttataatttttagttaactgtggacgatttattaaaacgattttaatgttgtaaagaaaatggaaaaatcagccagtatatgcagtggattccactccaaaatccaaaagaaagagaatctgttgttttacgctggtccaaaaaaaacgaaatgaaaaagcaattcttttcccttaagaaaattcaacttcaatggttaacttttaaaagaactaaatatatccctttgaaattcttgctttaaaaatcactactagtcacagccgtggtagtgcacgttggatgaaaaatgatatactatggatttaattttctaaatatttttcctcataaggttcgtttttaaataaataaaattttaagaagaaaggaagaactaatggagtgggacaaagaaatgagggagtaggaactaggaagataagtaaaataaatagccaaaaaaaaaagagaaagattacgtaattgatgcagaagtatggaatattgtgttgtgtgtgacaggtcgtggcctcgatactttaagcctcttggaaacaagaattagtccagagaaaaagatatatacgttaccaacaacttctgctttctaaagattttcaatattaatttatttcaacaccgaaagaaactaaaccgggaaagttgggaatcattcaatgcgtctgtccgatcatccggttattgcaccaaaaaagttcacaaccatcgaagacaactaaaatcattatatctaaagactttaactctttcatgaacaaagtctactaggtcagcttttattatacgttaccaaaatggtccattgatttatactagtcaatttgacgaagaaaacaaatcaatcaattctcgtatatatataatgtacttgatttgtcaaatttttgttactcgtgccaagtctatgtcgtatcaaaacggtcttcacgtaatactcggccgacttttgtaaacaattcataagtttttaagacaatcaaaaagtcatttggtcttcaaagaaatgtgacaaccgaagacatcgaattttgtatcatataaagaaaggtacatacagttaatatgtgaagaaaaaaagaaaggtgaagatgaatcctgttttctagtcaaagttgcacgagaaactgttggaaattattttaaatatatttgtttgctgtttttttggtccaaggtgaaaatctttatctgttaaatgaatctctttgtccttttctctatttttcttttatgaagaaaccagaataattatgtttactgtgtaaaaaagaggaaataacaatgctttgcctttgtccattttggttcatttttctcgagaacagaagagaaagtgaaaagaaaagaaagagaaaaataaagagaaagaacagttcacatgagtttcgtgtgtcggtgtccatcgtagactgtgacacgaagctgacacctttgcatggccacgggaaaccacccccactctcttaactcttaaccctaatttcttttttcccttttcgtatcactttttatctcaattgtcatgatgaatttttttttttttgggtttagataatgaaatttaaattgtcttacaaaaagatacatttaaaaaaaatgttagatttattgacttttaagcattctatatgttttattggatatttttgtttcgtgagctttcatttttatagatatgatttctaaaacaattgtactatattttgggcatttatcgacgtggacaatatagacagatttcggatatcatttaatcagttgggacgatggaccatgtgtttgcaacatatgcgacaatgcaggatctgtaatgcagtcaatgataccttacatatgtaggcatcggtgaaatttatagtattattttgttgtccatcattaaacctgggaactcgaacccgaaaattgtatattgtataaacagtataatgtacataaaatcataaatatatacacgtaatctctaacgtacgtctaaacgtatattgtacatattataggccataacgtaatattgtatggctttgaatgcgtttggtgatgtccgaacataccgaacgccgatggcaaacgactattcgcgacagtgagggccaaggcttctattatcgcatgcatgtggactttttttgtgtgtggcatgcatgtggacgttataggctaatatacaattttttatgaactatttctttaaaacgtatactatcaacaaaaatgggtatgaaaattgcttgctactgatgactgaaatccgagaaaaaataacaaaaaaattttaaaaaattatgttgttccatggacttttccaaggaaaatgactagtgacgaaataaaatgctatttttggctcttttaaagtatttctatataactcttttaattgagactagttagctacattttttgtaatctatcagtaatatgtaattttatcatactctttacatttatgcaaaaacaaaatctgatattaaagaaatccaaaaaagataaccgtatttgctgtgaatgtactcttggtcttggaaactaaatatacaataatgaagggaaaaataacatagagtaatggaggaaagtgatgtagcgcgcagttgtacggggtaagagtaagacaagctaagcaaacaggcaaatgcaaaacctttgcttcttggtgtttctagtcctttaatagactaataattttaattttgaagtatataatattctttatatgtaattattgtactttgtttatatatttcaaaatatgtaatatgttctcggtttataataattctgaactacggctacgttaatacgtaacatgttctcagtttatatgcttgagatttagataattaaatggtgtgaagctggaccaatcggcaaaaacgggatttgggtgaagatgagagtggtgtgtcacgatgcgtatgtgaagatttgatcgaacgcttcaatacacgcatgtttttacattatgcaacagcaacacgtacatttagtgtaaatttcgtagtaatcacggattgagtaaaaacgacgagtttagatatataaatatcttttaggacgaaacaaaaaagttgtcggggttggtgtcgttttgtgcaaagatttcaaaagtaaattaggttaatgtctgttttcaccaaaaaatacacgaaatgttcgatcgagaccttttttttgctacgattgaatagtgagaccccctattttacagtgatttatgaccactttgtttaatttcctaacgtctttacatcactaaactaatcaaagctacataagaaaatattaaattatataatgatgtggtcattcgtgtaattagcattcaaagatggttggtacgaatcgatgatgtttgataaagtgtatattagcaataactaatggtggctaaaaactcgtattaatactaagtttgtagaccgtatctcacaaaaatgtgaacttagctaggtctaatcagaatattaatgcacaattgttttttttttccttcgcagacaatatgcatgaagatatgtttaaacaggtagttttcatttagttcacaccacaccaccacaacaatgatctgttctagctagcgttggagatatgtgcaaactgaaagtttttaatttaagggttgattttttttatattttttttctttctatccatccgcgaagattcgaaagataccccgacctattggtgcttggagaactagcggcgtccatatatcgtccaaagagtcttgcatcacgtgtacttagtaatcagtattccctaatgtaatgaaagtgagataagtatgaaacaattcgtgactattgctaagtaagcattgggttatggatatgtggaagatgcaatgcatcgaaaacgtgtcggtagatacgaaaggtgtgtcaaatttatttattttttgcgggggaaacatagtagcacatccacctcccaagaaacaagcgacacacactcggatgataacaataatagccaacaagtgtctctaagtcatcatccattatatatccaaagcatataaaatacttgttagatagagacatataatagttgaaggatatcacatggtttgcaccattcctctagcatgaattatgacattattcataaatatggacccttctctccatgttttcttttcttaccgcccaaaagccaacccattaaattaacaaatagaaatacaaccatataataaaccgttgcactttccttctgtactatgatgattgatgaaggtgctaaaaacaaccatattatattaatacgtacggtccaacgattttcattaaacttcttgctttagcaccgtttcctcctttttctttgatccaaatcataatgcacaactaacgacacacacaatcataatggtaaattggtaagttaagtgtgtatgactattagaatgaagcgtaaccacaagaatgagtatcgcgcggaatatcgttgtagactaaaaccctacgcgtgacccaaagttctaaatctcactaaatattgactaagagataactaattcttattaaaaaaaaaaaaaaaaaaaaaaaaaaaaaaaaaatcttataaacgttattgtcaacataacgttatcattaatcctttttgaaacaattggaatctagacatttttagaaaaagtcctaaattaaatcataattttttgtgaaaaaagaaaaaataaataaacccgatttattcatacatatcgttacaagatagtttgacgtttttttctctctaaagtaatatgatggtataaaattaggtttttaacagttgtactaaaaataggaaaaatccattttctgtttaatttgccacaaactcacaataggagaacatcttataatataaattacttaagccatatttgaccagaaattttcagtggtcaactaaagcgttttggagtagtatatgatttcattgaataacaatgaacttaaatctggtgcgttttaattcattccagttcaccagacattttataaaagtcaatgtttctgaaatttgccatattgattatacacactttcttgaaaaatgcaaagaagaatccagataaaataaaagttacactgtaatatcctaattttattaatataacagcaagcaatatatactttttaaaaatatacatgtctatgtttgtctaaatgtattaatttcaaaggcagtatgatgagctgtaaattaaaatagtaatacaacttttgtttttttcccagttttgtttcttgtgcacatctaaaattatgcctatggttgtggataacaacaaaaaaaaaagctttaacgtcaataatttgtaacaatggtgttatatggctgttttcgtttccttataatggcgtaaccttttgtagaacaaaataataggtaaactaagccattgtttgactaagaaaattacaattacttttcataattagaaaaagaacaaaaaaagtggtaaaaaatagaaccaaaaatcaaataattcaggcgttccagatgacccaactgaccaattcagtaaacaataaatttcaaatcagagaaaatagaagtaaataaccaaaaaataggaaaaagaaaagaaaaaatctgtgccctgccataattccacttggacttgtataatttttacacattaccgaaaaagccgaaaagaaataattaaataaaataaaaactagtactactaataaaagacaaaacggctctggcaaaatctctgaccttggaaagataaaagatagttcagtcacataatcagcatgtgtacgtcgtttctttagtgcttaatattataaattaagaatacttaaaaccaaatctttatataatattgattgtcagataaacattaacccaacaaagtctctctccctctcctattcaactttttcagttactttactccgttcatcttttatttttcttttcgtcgattctcatcaatactacaaaaatatatacttctatatatcgtgcagaggttacatgcattgtacaattttgttgtcccgagaaacaagcggatcagagacaaaatcagagtcggtttcctgctttttgattcctctttattaatcagcaaagatcgattccacttctcctctctctctctctctctgttctttaatttagagagaaaaaataagcattcttccttctctgttttcgagcgggaaattctggagatggctatacaagcgcagttgaattacaacgctccgaatgcgaatcaaatcggttttggtgggtccgagttttctttgatcaacaacaatggcgttatcggaatcggtaacgatcagtcttatcttgtcaataatctccagttgcagaaagatttcaaccaacatgctctgtttcatcatcagcatcatcaacaacaacagtctccttctcaaagctttttagctgctcagatggagaaacagaagcaagagatcgatcagttcatcaaaatacaggttcgttatttcgtaatccaaaccaatttttcatcgaaagtttcggtttttaagacgtgggtactgataaagattcaaccttttttgctttgttgataacagaacgagaggttgagatatgtgttgcaagaacagaggaagcgagaaatggagatgattttacggaaaatggagagtaaagctttgcttttgatgagtcagaaggaagaagaaatgtcgaaagcattgaacaagaacatggaactcgaagatctgttgagaaaaatggaaatggagaatcagacgtggcagagaatggctcgtgagaacgaagcaattgtgcaaacgcttaacacaacgctcgaacaggttcgcgagagagccgccacgtgttacgacgctggtgaggcagaggtggaggacgaagggtcgttttgcggcggagaaggagacgggaatagtttgccggcgaagaagatgaagatgagtagttgttgctgcaattgtgggtctaacggagtaacgagagttctgtttctgccgtgtaggcatctctgttgctgcatggattgcgaggaagggcttcttctttgtccgatctgtaatacccccaagaaaagcagaatcgaggccctcattttctagggaaaatcctttcttttctctcaccggaaaaatgcttgcctttgtgttccggtgaacggagagtttttactccgggtagatgacgtggcagggtaatttggtaaaaataggggaggaaaggaaagtgagaatagggaaaggttagaaatagtaaaaggttatctcaagaagtaaattctgattagggttttcattttccctttttgttttttggttctttttccattcaatggagaaaaaaaaggaacccagctggatttgatgaacataattcatattttccttctatctaatgaattttcggatataaagtttgaatgccattctttctatttcaatgataattaacttcttaggatttttaaacacattagtattaaatatcttaatatacattttcctaatgattatatgtataagattttcctatattaaacacttcctaataagcaaaaaactagaaacttttgaccgaaagaataataattctaaactaatatgaaatccaatttaaacatatcttttaaaaaatttcatttataaaaaaatcaattaaatcaaatttaaacatatgtcttttaatttacatagaaagcaaaacaaaaaaagttatattcttttgaacaaaaaaaagaaagcaatgaaaaagtaaaaaaaaagaaaggaagcattatatattaatgggtttgttttgatgtaggaagatggtgaaaagaggtggtagtagaggccgtagacacgcgtattggaggaagctgtaagtattattgggttgctcaacaatcaatatagtacagtgacatgagagcacaatagtaagtaataattccacattaaaaaaatagaaattgaaagagaatcagagtttggcctgccataggatttgagttctcgcactttcctaaacagaaacatgtttcattgaacacttgggcctttcttcttccttcattaaggattctcgatctctgtttcgacagatctgtgctacctaggttttctagatactccctaatacctataaataaacaataagtataaccttattatgtaattagatcgtactactatcaataaacaagattgtagaaaatagtgaaaaaggcaacgcataaagattaattaaatcttatttaagtttcatttgggacaatttaagattattgtcttgttcataggatttatttcatctattagtattacaaacttttttacgcaaacattattatctctatgtatagaatgatttaaacttttaacgtaaacacaaataaacagtcagtcctatgtgctatggatgaggtgattagcattgtagggtgtttcgtgtcatatagctctactagtagagattttgtgtgtcagtgtgtgtttatttacggctttgagtcttcaagacccaattagccttaagaccttagtgattttagactctttgttgaaaagctagaaattgcaaacccaaaccgcctaatgttgctataggttttgatttccgaagtgggtaattaattatgtggattacgtataaacacatggcccggcccattttaccccccaagtgctcggcccaaattgaaagtgggactcactggattgccaactaattttatttaacacgacgtgaagtttggaactaatacgtcaggtattaaaagtacataaacatcatcattactcaatttgctaatggacgaatagagacggaatcaacaaagtaacaaacgacttcaatattttttttatatgttactatgattcgacaaaggattttttttttgttatgaactgaagattattggatttttaatcacaagatgtcaatatcaaaattcaataccatgtctcgattagggatatcaatatcatgatattttaacaactttaactatgtaatttaattcgattatcgtttttgttttaaccttcgtttgatttgtagatggtagaggtatttagttgttgaactcttctttatacacatgttgtttgttttgcttcttaaaaggataataatttttaaacttattacatgtgcaccactggtcgcattcgtagttttccatattttatgcgaaagaaatgaggatatcttgggaagatacaaattattgggattgttttgcaataactccaaaatgttatgtttaagagttttttgcttacgtatttcatatcaagccacgtagatgcatttgtaatctcataaaacatttcgattattattaacttactgcaccatattaaaaaacaaatttcgatatcgagattgtaaattgggcaattaggaattaggaattgaggtaggtaaagtttataagcagatgaggaaataatagcaaggaagagaaagaaagtggatgcgtcgtggattccatatttatgtgctttacttttccttttggtaggcgaaaattttgacattttccaacaaacatcctcatgtatttcacatattggcctgaccaactattatgcatattttatacatttgatggattaggctataacatggtttttggagtttacttttatacgttcgatcataggataaacatacgtcttttattaaaagctcgatctaactatggcatgttttaaaagttcacatcttttgtctcattgctaattaacgtaagaatattaggcaagtcggctttttatacgcagttgtcgaatccaacttttacctaaacccttgaaaaatcgaaattaagcatttttatttaatagtaaaactcaacaatttttaaggtggtatagtgcaataatttaaagatttatcttaattttttcactgtgatttcaattttgaaatatagtagataaaaaaaaaaaacagaaatattaattcgttaacagtattattattattcttatttatataaaaattcctttttttcaaaaatcgtatatcctttaaacagagcatcgcacgtactctcttctatctcagtttcgagactcattgcctcgccgagagagaaggagacgccatggaaaggcttcttcaaccatcttcttcttcttcctcaatttctccttccaaattcccttcacggacttctcctttccttccccgtctccgctcatcgggtctgagctttgtctcgactcaccggcccgagtcacgccgagtcagctcaatttcctgcaacagttcccagattccgtcactgtatacgcctataggatctaacacaactaacaattccttcaatgggtctcccaaatcggatgaatcgaaacctaatcccggatttctcacacggatcgcgacgtcggcttctgagcagcgaaaggtattcaatttcacgttttgttcagtggtaattagaaatctctggatgcttacgtcgatgcttactaaatgtttcaatttccacattttcgtatagttttggggacgagcttggcttacattagatttggggtttatgggttttaatggggtttgattttattcaggaaacatatgaaaagtttgtatatagtttgctcgagaagaagattccaagaattacaaaaagttccaattttgtagggttacatatgttactatccatcagtctctagaatcatggaatcatgttctctctgttttaggattcgggagctaattcgatattgttgacattgaacttgctttttcatgttagatattgatagtccctaatttcaagctccacacttgttggaacaatagaactcaaatcaatctagtttcttttttgtttgattagtctgtgtgttggaattgtgcttgttcgctgtcctcttatgtagtctcatggatgtttaccagatcaatatatatctgtgtttctttgcagacgttatctactggaaccgttatactaatctctgcagtagctgtgcttttgcttaacccgcttcttgcaccacctgctttcgctagctttcaaactgcagctaaatccggttggctaacaagtgcgtggaccggtttccttgctggttgcttgcacacgctctcaggacctgatcacctcgctgctttagctccgctttcgatcggacgcagcaaaatggaaagtgctgctgttggagctctctggggatgtgggcatgatgctggtcaagtcatctttggtttactgtttctgctacttaaagaccggcttcacattgaagtattacaaacttggggtacaagaattgtgggattgactcttgttattatcggtgctatgggaatcaaggaagcttctgagattccagaaccttgtgtcgctttagaaaccgacatcagcatggtatcaacagagaaagaagccttaccactgcccaaaaagaagaagatcgggtttgctacatttgcaactggagtggttcacgggttgcaaccggatgctctgatgattgttttgcctgcattagctctcccatcacggttagcagggtctgcgtttttgataatgtttctggttgggacagttatagcgatgggaagttacacagcgtttattgggtcttgcagtgaggctttgaaagagaaagttccaaggatcacagagaaactaacttgggtttcgtcacttgtggctattggtcttggattgggaattgtcatcagccctttctttggttttagcctctactgagaaagtaaaagcttcttcaggtaaatgagacaagttgaaatctttgtagttcttatagaagaaagagaggtttttttgggtccatatcactcgtattattgtcacctgtacgaacaaaatctcgtaatcttgcttcagaaactcctctcggagaaaaccatttggtgattctttttattttccttatttttaagagaagtttggttttggttctgaattatcgatcaactgcatgtaaccatactttgtaatattatcaaattttaactaaaaagtcattcttgtttatatcatttgaacagtacttgtcacaaatacaaaccccaaaatgtcaaaaccaagtttattttctaatgtcaggatgtcaaagcagagttcaaatccaaattgtcagattattcacaccaaatctaaagactctcgacaccccacacttgatacaacgacgttatacacaaatgtggccactgttacaacacatattgacaactattgtaaattccctaatacccacacataagaatttatggattttcttgtctttttcgtttcatactttgctattccctttcgtccagaacatgcagactaaaaatcacgtctttgtcgacagctcttacgggattacattcgttaatatatgagaaatatataagaatatgtcacaatctttcaaggaagaaggagctttcatcaagtaacaccacggattataaatcttcaatgtataatgtattattctgataaacgagagacacaacaacacacaaggttcttttggtctttaaacagatactattataacatagcacagaagatccacatgatgaagattgtattatcgcaactttgatctcttcccattttcttttctctgctaattaacaaccacagaaaggccaatcaagaattctttcactcgttttagatgcttggtctcacgttcagacggcttgccagcttctgtcccaaagacttatcagcctgtttcacacatttttaaccaatcagtcaaaaatgtttaaaacttgacaacttttcaactgctgagacttgaagaacgagacaatgaccgttacagagatcaagatttcagacctgagaccagtaagagatccagatactgcggatttcatgcgtgatgcgtgggtcggatagggcatcaatccatctctggatgaatcgttcttgcctgaagttgaaaacataccgtaaaacgttaagaacacagatgttccttttatgcattaagcatcattacaaaaataaaacaattagtacctctctggtgtaaaggtacggtatctctctccaggctccttgaagttgttctctttctcaataatgcactgaaaaaaaaacagatttcgaaacttttagatcatatgttcttaagtgaaccaatccatgggaaacagaaacagagaggaaaacagagttgattactgaccctctcacgttttccagaacagacagcaggcggagttggatacttctcagcatgacgaacctggtcatacctcgacgggaagtagttaacctgtaacaacagcttcttgtaagactatggtattctagcttcaagttcgatataaagatattgatagtgtactattaagtacctcctcgtccctgtgcatgaaattcatgaatccctcatggtggttgttgtggtgagcacattttggagcattgactggcagctgaaggtagtttggtccaagacggtgtctctgagtatcggcataggagaagacacgggtttgaagcagcttatcatctgagtaatgtatccctgggacaataattgcaggacagaaagcaagttgctcattctctgcaaagaagttgtcaatgttcttgttcaacaccatacgtccaacaggttgaagaggcaagatatcctcaggccaggtcttggtcacatcgagcgggtcaaagtcgaacttgtcttcatcagcaggatcaatgatttggataaagagcttccattcagggtagtttccagcagctatagagtcatacaagtcttgagtcgcatgactgtggttggttcctccaacacgaattgcatcttcttccaaaagagacttgactccacaagttggtttccaatggaacttcacgtagtgagctttgccagctttgttgatcaacatgtatgtattgacacctgaaccatccatgtgcctgtaatcttgtgggataccgatatcatcgaagaggaaagtgaacatgttcaaactttcagggtggtgggagaagaagtcaaggattctccagttctcttggatgtgagattttgggttcggcttaagagcgtggaccatgtcagggaacttcatcccatcgcggatgaagaaaacaggaaagttgtttccaacaagatcaaagttcccctgcatacaaagaatgatcatttgcttagtatataagtaattgctagcattcttaaatgttacaaactactaactgacctctctggtgtagaacttgactgcaaaaccacgagggtctctcaaggtctcgggacttccacgctcatggataacggtggagaaccggacaatgacaggagtctgaacaccgggagctcggagaaagtcagcacaagtgaggttagagatatcatgagtgacctcaaagaaacctttagcactggctcctctggcatgaaccacacgctctggaatccgttccctgtcgaaattggcaagcttctcaacgagatggtaatcctcaagaaggataggacctgcccaaaaaaacaatcagaaatgcaacaataacattgaggagaacagacttattcatgggagaagaagaggtacctctgggtccaacggtcatggaggagttgttgttccatacaggagcaccagagttggtggtgaagaagggagagttgtaagaactagctggacgatactgcatcatcatcatcaattgcaaaggaaattaaaattaacatcagagaaaaaccacaatgattcgaaagaatcacaagtcaaaaggcacatgatcttagagcaatggaaagacttaattgtatatttgcagattcgagtagaaaaaaaggtcaaaactttgggtgcaattccataagctaataacaacgtttcaatccagtttatacggagaaattacaaaagacgaaaaggttagagagaaaagaaagaagggtttaccttgtaaggatccatggtttgatgagaagagagcttggagagattcagagatttttatcaaaacgaggagatggtactgatgatgatgaggcactattttatattcacttgccttatttataaatggcgtgtgtattactgcctttttagctttttatttttttctttattttgaggggggaatttttaaaggttatcgttttttctttattttagttttttcatgtgataaatactggaaagaaaaaaacaaatgttatatattgtggcgagaaattcaggaacgtcaagtattatttatgatcacagtaccacgaattgtttcatatatatttttcttaatccaaccaccggttacctactatttattcaaattcagaaaaagtagttttaatttgttttattcgctcatttttattttgttaattggattataaactaatctaaatgaattagtgcgactatcttttaatctcagacactcatagcaaataactgtacttttgatttacatcacattaacaagtttaacaaaatctattattattagagaatgtagaataatgattaaaacaaagtcaacccttacagaattgaatctattctatgatgtaatagaagatgaaatccatggcattggtttttatttggtcctgccaaattatatcgttttacgtttttctaaaaattcgttgaacaaagccaacttacatgtagtttttgataaacgattaattttgaaccttataaactaactggctgtggtttgatagatcaacatcgtcaatgcgatccgaatttaggttcccgagaacttaagataagctgaacccacgattgcgatattgtcatatatatattctgtacttaaaaaaaaagttttttttatatggtaacaaaagcaaggaagaaggacgacaaaagaaataaatattaggcaattcaatgaaaataaaataaatgaggacgtcattgggctgtggttccttatccggtttttttggccttttagcaaaacctttttaagtggtttagtatggtcttgggtgacgtggctgctttgttggattccacgtgtgatgagatagtgtgaacgccccaagcgggaagaatatgccttttgaattgattatttcttaagtttttgttttgccccttgggagatgtgacgagatgagatttatcaagttcccaatggcccaccttggaaccctctggctcgctcagaagttcatctgatcaagctgttgattttggacaatagaagaaatttttaacacacatatttcttcatccaccacctatggctatgagtgcttgtatttcttttaagagatggcatgtgaattatggaatatatggtcggttaagaaaaacatatacatggtactgaattgccgaattctattggttataaagaaaccaacaagtagtgaacgtacaagtacaaccacacaggttacatgcaacaaaacaaaactaatgtatcgtacgttattaagaccttaaagccaacggattgaaacatgtcgaccatacataattaaacatgtgatcttgttccatacgttctgaaaaaaaataagcaggctcaaaaatgtgctgaagaaacaatgagatgattgaaacccattacgaatagacttagcccaaaaatgctatcaaaagaattgtcgctaatacatcaaaatgggctgaattatctggtctagcccaactcttaaagatatacaacgattaagtagctagctactacttccatttccaatgtcaaggatcaagaacatatttttctcagcacgtgtcgtctttttgaaaatttcaactaatcttgatgtaagttccttcttggttaaaaataagaaggatacacaaaacaaactcaccttatggttaatttttgtttttttaataataattagaccaaaatccataaacgaatatagctggtgtttgcaaccagctaaaatatgaatattagggaacaccaaacttaaggatgatcgattacttgttttatacatacttttaaaaagtgctaatctaagacagcattaatattgaatcttttcaaagttattgtatgtactattttctgaactgaaaagttcaaaaatgaaatatgaaggtacaatatagcctaaaaacaatgaatagaaaggagtatgttctatgttttctttagtgtaaataatattaagatattttaagaataattaagctaatccctttattattaaaagagaagtacaaattgaaattttgtataatttggtctcaattttgattttaattttggattttattctttgctattcaaaattattaagggtagtttggtcttaacaattttctaagctttatatgatccaattcaatctaaaccgtttaataaaattaattctctttaatctaagctattcaacaaaaataaggaatctatatcgtttttgaaatcaaaatataatcacatttcatctctaaaaacagtatattcaatcacgaaatcaataatcaataatatccaaatcatttattacgattcttcactaatcactagaaatttatatttataagtttaaaatatcaaatttcttcaaatatttagtataagaaccaaataaattgattgtctgcggtaaaccgcgggttaaaacctagttaagtacataaacatgcttagtttaccatatgtgtactaaatgacaagataactaattaaaaaacaatccacaaaaataaacgcattcactactaattaaacaaatatactgctaatcaaaatcaaaagcacattctcaaggcataattgaaccataaaattgatgtaaaaaaaaaaaaaaaaccgtaaagcatacggtaatcaaatgtagtgaccgttggagggggaatcggaaaaaggaattgcgagaaacgaggaccattatttaaaaggatggaaaaagacagatgtttatggatcgttctagccgttaccagatacgatacacgtgggatgatctgtatggattaacgaagagatctgacctgtcttttgccaaactgatgtggaaattgtgacctggatgttttagagataaagattggctgccccttgtggtaggtcagtccctttctctgaactatataatatactcaatttaatttaactagactagttgaaattgttgaagttcgctaaccataatgtacaaaaatccttcatgttccgggaaaataaatcataattaacgataggtatagtagcagcaaagataagatggtgatccattctcacatgcaatgattcggatgaagtttagccaaatattattattatccaacctcttctgcaccacgaagagactttatttacgtaatatatttgatggtccagtactactatccagacattattgttttcgtttccaaatcataaaacttgaaatcttattgattactactagggtcgatatctcactatttggaaaccgcaggctccctatttattagtttcaaactcaattgaaatgaaaatgtgtattggtggttttaatgtttgcactgcgtaatgttgcctgaactgtatatttaataaatttaccacaacttagcagatataattttgttatacgaaatcgtatagtcttcttcatggacaaagaggaaggcaatcatcattttctatgattgctcatcgacctggcatttccattaccaaaggcagcataatatcaaatcaaatatttctttgtcgtactttacttgaattaatgatattatcgtgggtcgacttaggaagtaaagttacttccatttcatatatctaaatcacatttgcgtaaaatttaagtattacacaaagtgataaagtaaattaagtaataattggctagggatattaacaaaataaataattttgattagggctacgaggataaggacaaacgtcgtattaacgtataaaaaatgtgaaaggaaaagagtaaactaagctttagatattaacactcattacgggattcctaaattgccagcacttcggattatccgtcagtccactatttatgctagtttttcttttccttgtgagcttgcactatggatttttctttatgcaattctcaatctaaatgaccattaaactttagaaaaaaatgaccattaagttttaatgtacatttgtatcaactttctaatatgccacgtccgtattgctatatacaaacataaccattcaaattaatatggctctctcaaaggaaaaaaataaaaggaatagcaaatgagtagataaattttttgatcaaaaagaataagatgcactagtattagtatatactcccatacatcatttaaccaaattttaaaattgattataatccataaatagtcttcaaatttcaacgacaaacacattaatgtgagtataaattagcatagactactatatagtttatatgcggggtgaatgtttgtctatacaagtttcgtcaaaaaaacggcaccaaccataattaatagactcttatcttttgctggtatatgaactctttttaaaaattgccgcgaatataccttcttcgtagattattaatctttttcatgtacagttgcctttagcagattatcatatgttacaaacatttgacctaatttgaaaaaatgttaccaaaaaagatttggaaaaaaagacaaagatattgagataaccgttgaagagagtttgggatgacaggctgacgagaaaaccatacacctcatttctatcattaaccctcacatggcttatctgtacatctggaccccaccaccttctacttttatctcccattttttttttcaaattattactacccaaaaaaatattcaacaaacctacaaaaacacatgtcttatttttatttatttaaacatttgtgtatttatcccattgttccatatttattagtaggaaaaatattcacattttacagaactgcaaaagatttggccatgcaaattataccccactttgattgctattttatacactatatcatacagtacaagaacaaaaatttgattgggccagtaataatgcatataactattgatgttagcaagagaaaaaaatgcattaaaacacaaatttgactattattttgcaggaacattcgtgataattttgactattattttgtcagtaataatgcatattaatcgtatgtgattttaactaaaactggaaagttccaaggaacatttagtagtttatatttttagtactaagttagtttagagggttattaactatttaatcgtactaataatgattataagcagaattatgtagactatacaaatagtacgtaataccgaaagtacccttggtttatccctggcattacaagggtttcctttttcccctttaaaatggcagaagagatacactgtcgtcgtcacacagcaccacaaactccatagctagctagagagtaaaaagaacaaagatgtcgaaagaagtgagcgaagaaggcaaaacccaccatggaaaagactacgtggatcctccaccagctcctcttctcgacatgggtgagctcaaatcctggtctttctacagagctctcatcgctgagttcatcgctacactcctcttcctctacgtcaccgtcgctactgtcatcggccacaagaagcaaaccggtccttgtgacggcgttggtttacttggtatcgcttgggctttcggtggtatgatcttcgtcctcgtctactgcaccgccggtatctctggtaagtttgaatcccaccaaaaaccctaacttttacttgtttggttcgttggttttattgttaatctcgttcttgttctcgtcttctcgtaggtggtcacattaacccagctgtgactttcggtctgttcttggcccgtaaggtctctttggtgcgagctcttggttacatgatagctcagtgtcttggagccatttgtggtgtgggtttcgtgaaagctttcatgaaaactccttacaacactcttggtggaggagctaacaccgtagctgacggttacagcaaaggaactgctctcggagctgagattattggaactttcgtccttgtttacaccgttttctctgcaactgaccctaagagaagcgctcgtgactctcacatccccgtaagtctcaaaaagcttgaatctttaattgagttttttgacaaagttactatgaatctgattgggtctttgtagattatgataaaggttgaatctttttaggatttaatgataaagttagtatgaatataaaatgggtctttgtagattctgatgaagtttgaatctttttatggtgtaatgacaaagtatgtatgaatctctaaggatctttactttgtagattctgataaagtgtggtgggttttcttgtgattaggttttggctccacttccaattggatttgctgtgttcatggtgcatttggctactatccccattactggaactggtatcaacccagctagaagctttggtgctgctgttatctacaacaacgagaaggcgtgggatgaccaagtaagtgtttagttattatctggattaggtattcactaatcattcatgacttcatgtcctaatgttggttctgtgttggttttggttttgcagtggatcttttgggttggtccgttcttgggagcactagctgcagcagcttaccaccaatacatattgagagcttcagcaattaaggccttgggctcgttccgaagcaacgcaaccaattaatgaaggctttttttaagataatgtcaagaaacaactttaagatttatatgctttaattattatttgttgttcttttgtgtgtaatgagagagatggtggattgatgttaattatgaaatggctcagtgacttctatttccttctttagtttttgattgtctttgttaatcgtttgcctttggtttctcttagtagttacaaattcatgttttctcttcatgtcagttcgtaaatatcgaacaatccaagttggaatttattattcacaacatcacaagatccttcaatgtacattattacagctagcgtccaattaagatacaaatttcggctgaacatggtgtgtgggtcttttggttattatcctcgtgtcgactctaaaccatcgggtcatatgtaaaccattcattaattgacacgtgttgagaaggaaatattggattccatttgctatgtggttacattttcgttagttgacaagaaaacaactattttcgctccatttgctttagtcttttttttcgatgttacttgttagaattagtattgtttttaaaagaaaaagaactcgtgcgagtaccttttgttgtttttgtgaaaggataaaaaggagtggagccaatagagttgtaacaaccagacaagaaacgagacattaaacccattttttccaccgcactctaacttttcttaggccgcgtgtcgcgtagctcatgtgtttatcacatgggtaacttttctgcgtctagttaccgtattgttattgttattgttatatagtagactccttttggctaagagtctttagacccacccaaacgcatatgtgtttggatgtattaggaaattatttgtataaaagactttaccaacttaattgaataatgcatttgattaaagagagaaaaaaaaaagaaaatgctcatggaagcaataagcactaaatttgtctatgggatgtaaattgcgacagtgagagttggctttaaaatagtatgaatacaaatacgaatttgtctacatggaatagtagtaataattcacgtctcgtcttttcagaaaagtgaatgcagaggagacagagagagagagaaggaccacaacgatggccttcacgcttttactggttaatacgcctagtgtctcagttttaattttaaatacttagccgttatgatcgattcttcgttatctcttcttagcttcaatatggtccactcattttgaactttgtaaaccctagcagcttatgaagtatgaaccatcatatagttgggccttaaattttgttttataatagctattgctttattggttctggataatagcaattttgcaagttgcaaaataccttatgtgaccggccggttcacccctctgcttatccctaaaccgatttactttaaccgatctgatgctgtatagctaaaaacataaacttgaaacagacagcagctgagtgtgaaacttagttgtctgtccatttttttgaaagaaatgatgtcataatatgttgacaaaaaacatcttcaactttggatataaatcactaattcagactttttaaaagttgcgaacttttttaatcattccatgttacggattattttttatgtgtctggaaaaattggctgtcaaggtgatttcacgtgataactaatttgtttttttgaggtcatttgccatcttgtgaaagcctttggagcctacttaaagattttattttattttttctagtaaagacgattgaagtaactgctgtctattagttaagatctgaatctccaatgaggttatttataattacttactcacattgtgcaacaaaaccaagcacaatttgtggtccacaaacctttatctggaggtttctggttcaacttctccggtttacacttaaatcttcgtttcgtgagcaaacccaacggggagcttcccgttgggccatgtttcagtgggctcggtgtaaagccgacatgagtaactgaagcccagtagcattgtcgcaaataacagattgatttgtccgttgcaaacggtttaaaagcagagtacgatactttgttacttttaaaaatatcaaatctaacaattatgtaacaaaatcaactagtgaataacataaaaacataagatatatttggctttaaaatcccctaaaaatcatcgttatggaataacatctacttttcgacaaaaacaaagtaacaaaaaaatcgaagagtagagctcaaattgagtgtaataaagaatgaactcaacaaaattattcattcctttattttgcaaaagtgttgttttgacattttctatacacatatttaaaagaactatactatacaatattcaacaagttctgctataactaacacaataaatatagttgtgaatttaatttttaataaacaatctttcgttttccaaactcgaaggcaacttgtaatctttcccattatagaaaacgaaagaaaccaaaaaaaaaaaaacataaccaaagaaaaatgcatcacacaaatcaaaacgtatttattagcaacaaccaaatatcttaatattttttataagttaccaataaataccagctttcccataatacttaaaaaccctaaccttaaaaactcatttattagagcatttttgattttgtgctattacctactacccttggcttactactaacaacatcacacacaactcaaactcacagaagctcatctataaacgatttccctttaaatttctccattttgaatcccattttctccatcctcaaccgttctgcttcgatctcaaccatctgagcccgcgtctcctcaatccgccgcttcacttccaccacttccttctccatcctaaccaaatccgtttcttgagcctcaagctcttctctcttagccttcactaaaccatcatgcctctctttctcattttctacatcttcttgagactgcgcaaactcttcaagaacagaacgtagccaagctacttcaatgttcacagactccaagtctttgagaaccgcaagcatctctttgaccttgactttgctcaactgccctaccggggttgacctaagttcctgcatcagtgagcataaacactcgaggtaacgtgatcgcattgaatccgattccagcttacagttttgagcaatgtctccgtgcttttcgatgacagcacttagtatagtggatgaacccgatctgactcggtatttcccgacagagacaaaagtgtcagacattactgattcgagatcgagctctacaccaatctcattgttgttttcgtcatcatcatcagaaaaatcatcattgctctcttttccaggcgatcttggaaggcttaggaaactaaagagtctagtttcgccgccttctccaatcttcccattgtgttcttgtattcccggtttaggtgataccactttgctttgatcaaccttcataagatacaagaatcttgatgtttacaaatatggtaaagatatggtggtcgaaatcatggaagagagtaaaggatgagataccaaattgtttgatgaaaggggaatggtttgagaaggtttcttctctggtttatggttgaagaaatcatccggatcaccggatgatgaagaagtgaaagaatttttcgtttcagaaacaatcttcttcttcacggaagcaggtggagctacagaatgatgaacctttggggaattaccatttgcaaaaccgcctctgccgttttgataaggccttgcggatagcggtgtaggcggttgtgaattcgactccttctttttcctaccgaaactccctgagaagctaagaagccttgaacctgtaacataacagaacaagaatcagaatccataaaggaaaagtttttaaaatggcaaaatcaaaagcagaaaaaagtactttgcttcttagtgttcttcttgacatggccttgagcaattttctctaaacaagctgaagcacattcatggaaaggattatccgcatatacgcaatctggatgagcttttctattgaaatccatagctttttgatgaatggaacaactgcaacaaaatcaagataactaatcagctcaaagaagacaaactcaaagaacaacacaagaacttcaaatttgtggtgtcaaaggactgaacatatcacattaagggtaagtaagtggtcaaacctttacaccttaatttcaacaaatagttcaaaaagattagacactaaaaacttataatatacaacaacctcccaacgaaattggattccattcatatttcaccaaccctttatatgatgaaagaaaaaaagtaaagagggagattgtgagaagcagagagagattcaccaaaacatatccataaagaaatttcttacgagtaatagtgaaattgatccccacaaaaccaatcaaatcataaaatgtataggtatagagagatacaaaaagacgacttttggtttgtttcttctccttaatactttcatggaccgaccatgcaatttccaagtacaattttccagtgagatactaaatttcaacggtggaagcactcagttattgacttagaccagagttaaaaggtagattattttgaccggcttgttttcttgaacagacaaaaacttccaaggcccacccttgtggataatatttttttaataggttgaaatttcgttttccatgattgtcgtttgtcacaaaatttccttagaacagagcaaagaaacagagcatatgacaataaaacagtatcaatcagtttcatcatcgatcattgaattaattcttaaaacaaaagcaaacccacgattctgatcgagatcaagaatctatttgtggatcaaagaaccaaacttttaattcacacaaaaatgcaatcaatcaacaaacagagaaataaagagaaagagagagagagatataccaggagaatcggaagagggagagaaatgtgatgagcggagaaaaatgaataaaatgttgatttttatttttgtttataaggtataacagttgtgtatattataaggttcatgtgacattgtctttggtataataataatatgatgatgatgatgaattgaccaaagccaatattaccaattgaagatagagagaagcatttaattgaaaagaggttggaaacggcaatcaatcacacacctcacttatcttccagaagtggacaacaacgtgggacggttatacaaatacgagtgagatttttagagtcgacgagaatcgaaagtagaaatctgtaaccacttaaaggaaaagaaatttaagagacaaaaataaagaaagaaagttgtcagttaaaacgcgttattgcgtgtcattgtttgcatcacacgtgaggttcttaagaatctcaagttcttaaccatattgctatatctcttgtctaattttatgcatagaagttatctttttttttgctgtccattattacttaaccaataaaacttagacatctttcaattaataaatatagataatataaagttatgtttacattggatctcttagtattttttctaattgttgttgcagataagtataaatcaaatcaaatatataaatatcattacttgcgaataagtgttgataccaaattttctgataatattatggagattgcttaggtaaaacatatttttatgattcaatccgaaggaaggaaattttctacccgatttgtcaaagtgcatgcatgttgatccgataggaaacaacatttattatagaatctgataaaagcatctttttgttattaattgtgtcatctttcgtaagtcgtaattttagtattagtacaatatagtttcgaaatgcgagtagcttatccagaagcgataaatgaccatttccccaaaaatactttcatccttttttgttgggggtcagacttcatatcatgaagaagaagaagaagaaatacatagagtcaactctagagcgttggcttttaaaaagacatgaaaagattttgttaatactataatgcacattctttaaataaatcatttagcaaactactctaatacgaccattctttttcattcatgcaacatgtctttttctttccctgttgttctctaattttattttactcttcattcatttgtcttcgttggtgtttcttttttctcttttttttttccagaaaattagatatttatgaccaaatccatatttttctaataaaaaatagaaatattgtcagtatacctgcacaatcgtgtgaacgagtcacctgaaacatgataaattcttctttcccctaaagcttactcgtgtctccatcaagaaatcttccaagaaagagactagtttagtgcattgttagagaagtctcaaatcctatgactatgaatcatcaagcaagttacattgtgtaagtgtatctttctgtctttcattttttttttgtgtatacatgtacatttgaaggtataccaaaatcaagggagggatcttaaaaaaagtttgaaagcagcatagaaaagttctttatacgataaatccatagattttcttatacgaatttggtgagttcggtttaaaaaactgaacaccgaaattccagtaacacaacataatgtatatataacgatgtgttgttaattgttatcgtttttaatattactttagttttcaaaccggttttaacagggttcaatactgaaatctgttttaaaaacgggcgatttggtattttattttaattcaggggacttgttcattaattttaactaaggagaaaatatttcctttttactattgtcttatataagacctaatttgagacctaaaacctgagcttagtaaacacggtatcgttgctatggacaccgccaaagtagaaccacctcaggaaacgaagaagacgattctcacagctcaaactccattatctatgtcgatttcatcacttccagatgaaatcgttttaagtttcttagccctgatctctaaatcgtactaccgttccctctctttagtctccaaaagcttttactctcttctctcttctacagagatctacgcggcccgatcccacatcggagcgacagagccttgcccgtacgtgtgcctgtggttacccaaaaaacatcgctggttcaccctagccgagattgagggtaaactaagtttagaaccggtaaggctctcttcctcttatcctcgtactcgagtaaactcaaccactgtagctgctggtaccgaaatctacaaaatcggcggaactgtcaagggcaagcgatccagagctgtttttgtacttgattgttggactcacaggtggcgtcgtgctcctaacatgagagtgtcaagggtaggcgccaagtcttgttttttagacggaaatatatatgtaataggaggatgcagaaagagtgaggaagaatccatgaattgtggtgaagttttcgacctaaagactcagacttggaatccgctgcctagccctagtgttaattatgccgtccattcgaatcacaaagttgcagtttctggagaaaggctatacgtaatcaccaagcgtaacaactatgcatatgatccgaatgaaggaagatggctaccagacgtggggtctgtggatttacaacccataactggaccttggtccggcggtatagaaaaagttatgaaacctataactggacgaccttggtgcgttataggaaatataatgtttgctgatcatgtgtgcaggaagtacacgtggtatagctcaagtcatcgagcgtggcaaagagttatgggtttggatgttctatacgataagcgtggttgtggctaccgtacgattcagttagttaactatggtgggaaactgttaattatatggagcgagtggatcatgattctagacgggtattcccttattcgcagccaagagaaggaaatttggtgtgctgtgattaggttggaggagcgtatgtcttatttcggaccccagatttggggggaggttgagagctgcaatgttgttgtgcctagcgtccccaagtcttatcagctctcaagttgccaatgtgtttcggtctgaaactcatctttgctttcaacacattatttgtggttttgtttctaagattgctcactgcagtttttgttttgttttgatttcttgctatttcctttaaatcagagacaagctggcaagctgtttcataagatttttaatatcgttttctaggtgtttgatcttgctaattaagtaattttttaaagatcttttagaactttttttagttagttgtttagagatggacctcattagattgtgcttttggggttagttgactatctctgtattgatctgaatgccaacaccaaatccagctccatcctcttttctcttcccatttaaaccactctttcaaaaccacttctcttcgcattagcaagttttatctatctctatctatctctctatctatctatctccttcttaagattttttgcgattctctcttcttcattgtaagctctagccaaaaagctctcggaatttttcgtctttgaaaaaatccagagatattctttgattctctcttgtagctctaaaagcttatcaatcctcggctcctcgctataactgttagcttaaccgaatggtccggatttaaaatttctaatttagtaacagaaccatccagtcaaaccggttaaacccaaattttttaaaacagggtatactatatactattttattgttttgatcaggtctttctttttgaacaagataggttaaaaaggtctttctttttgaacaaggaaaacaatcttcatttctttacatgtatgttttgaagacctaaaaaacctagtaattactatatctcgttgctatggacgccaaagtagaaccgcagcagaaaaaggaaactatgatatctccgtcatctccatcgttttcattacttccaaattaactcattctaaaatgcctaccccgaatgtcgaaaagttactaccgttccctctctttagtctccaagagcttctactatctcctcacttctccggacatttacgcttttccaccccaaatcagaaccacataggtttgactctacatatgccttaaatcacccacttgtcaccatagttggatcactcttgatcaaaccctaatcagtaacggcgacgaaattaaggatgagttaagtttagaaaccgtaaagcttatgtacattttcgataaatgtaaaacaagtgttaaaaaaataaattatgtttaaaccatattaaataagtgtcaaataaaggatgggtttggatgatgtaaatagtttacacaaaatttaaaaatttaacacttatctaaaaaaacctttaaaattttaatagtaatataaaaatataagttttaaaacattttctaatccaagaaacaagtgttaaaaatttaaataatgtgtaaaccatattaaacctagaacacttcttgttgtttggatgatgtatccaattagtttacacaaaatttaaaaatttatctcttatctaagaaaaccttcaaagtttaatggtaatataaaaataaaagttttaaaccctttaaaaacaaaaaaaacaagtgttaaaaatttaaataatgtgtaagccatatattgaacctagaaaacgtcttaggggtttggatgatgtattcaattagtttacacaaaatttaaaaatttaactcttatccaaaaaaaaccttcaaagtttaatagtaatataaaaataaaagttttaaaccctttaaaaaagaaaaaaagaaatgttaaaaatttaaataatgtgtaaaccatatattgaacctagaacacttcttagaggtttggatgatgtatccaattagtttacacaaaatttaaaaatttaacttttgtccaaaaaaaacctttcaaagtttaatagtaatataaaaataaaacttttaatcccttaaaaaaaagaaaaccaaagtgttaaaaactaaaataatgtaaacctaaaaataaaaagtttctccaaaatagtatttgaaaataataataaaaacctaaaaatttaaatagtaatattaatataaattttgttttaaaaaaaattaggaaaacacaaacctagggttgtggtgatgatgatcgatgaaacacaaattcgtcttcttcctccggaggcgactcgtactctaaaaccatcaaacaacgaatctgctaactgatcgtcaatttcaccatcagtctcttcgccatcgtcttcctcgcatccttctccgtgatcgccgtcgaagaatcctccggtgaaagcgtttcggtggcaagatcttggatcgtgtgaaataagggagacataacttgaactcgattgatagaagatgttgtcacgagagatcgaaagcacatctgtgatctgtcgcaaagctttgatcgagacgagaaatatttgcaggtcttcaaaaggaaagaaggagacaaagatgaaagatgtttttttttttggtttttgattgatatcgaagaaacgaaatttataagcaacggctccattgaaaataaggaaattttgctcttgttacattaccgttacaacgtatcatatctttcttactgcgtaacaatatttaccaagggtaatttatttgatttttttttttttttaatgttatgcgaagaaaagaaaattgatgagggtatattataaccgttacaagaatcggattgatcagtctctcttaaaagaaaggatggtcaagatcaacttcgttagcatgagacgctccacatggatcatatttcagtaaacgatacaacaaaccatctgcaaatcttttttttacagccttaaaatactctctccaaggttgcctccttcaggccaaagaagcctatacccttttctggatgagaaaattgccggtgaagctaccaaggattgcaatacaagactgaaattttctacattctcagcttttttttttttttttttgttctgtttttataaatattgttactctgcttttcctctgtttttctttgagggttttagcattaataactttagttgctaaaacatgttttcttctttttacattagtctgacaacatacatatacctactttagccacaatctgtgttttcaccagtaatttccacacgagcagcgaccattggagaagtgatgaaaaatcttggaatctcccacaacgatctctcttctcgtcaatctcgaagctttttccaagaactcgtgacattttctgcagattctcgtgttattcctcaccgtaactcttcttcccgtttccgtagagatcaatccaaaacacgtggcgagccttaccgaatgtcttcttggtgaattgcttctgctcttaactagagtctctggtctcaacctcgagacacagtgaacataaatgtcttcttctccaaccatcctcgagacgacatctaagacttcatagatcttgttcgtcgccacgtgggatctgtctccatttgtgaacacatgacttttgcccttcgcctcaacagtactgcgacttgatgttctggatatgcctttgctctccatgagaagcttaatcctatttacatcttcccatcttccagcttctgcatacatgttcaaaagcaagacataacatcccgtgttatcgtgttccatcttaaatatctgttctgccgcaaattcagctatggttatgtccttgtggtttctgcttgcgtttaacaacgatccccaaatcctagctgttggcacaaatggcatttcttcaaggaatctcttggctgcgctgaagtttcctgtacggccaatgagatccagcatgcacccataatgctctattccaggatctatcccgtattctcttttcatcgactcgaaatattcccatccttcatcaaccataccagaaatgctacatgctgctaatagtgaagcaaaggtgctcttgtttggatttactctagaagcaatcatctcagagaataaccaaaccgaaattctcccaaaaccatgtactgcatatgccatgatgatgctgttccatgaaacaacatcctttaacaagatgtggttgaaacattttcttgcatcctcaaggtcaccacacatggcatacatgtgaacaagtgaattcaagatgatggtgtttgaccagtatctagacttaacaatataagcatggatttctctaccttcactcaaggatagagattctgcataagctggtagaatactagcaattgttgtggaatcaggtacaagcgatgaatcccagagctcttgaaatagctccaaggctgaatagttcttcccgttctgcacataggcagcaataatcgagttccatgagatcacattcttttcagccattcgatcaaatataacctcagctgattttaactgcccacattctccatacatatcaatcagagcagtttccaataccatatggggaagaaagcctctcctcatagcatacccgtgaatcgttctaccctctaagatcgcagaagcaggaagcagattaatcgatgtgataacatctggctgcaacccattttgctctgacattttctgaaagcagaggaaagcatcagtgactcggccatttctagcataacaccctatcataacgttccaagctacgatgttcctctggatcataccgttaaatatcctctccgcataactcacttcaccatatttactgtacatgtcaagaattgatgtcattaccataacatcaccagtttcaatcctacttcgaacagcgtggcaatgtatctcttttcccatttttggactatacacatgagaacaagcaccaagagcactcatggtactgaacctgtccggtttaaacccacatttcagcatttctttaaacagcatcaacgagctaaagccatctccaagcgcaagatatccagaaatcatggaattccacgaaacaatgtctctctcaggcatttcttcgaacactttctctgcatcccaagcacacccaagcttcatgtataaagatataagagaattacagacgtaaacatctgaaacaaacccaagcttaatcaccatcgcatgaatcttcttcccttcttccaatgaggaaattcccgcaaccgatttaatcacgaaaggataagtaaaggtatcagctttgacccctgcaaacaccattctgctataaaattgaactgcttcaatgtacaacccacagctagtgaaacctttaatcatcacattccacagaaaagcatcagctttgttcatttcatcgaacagttggagtgcatcctccataagacgggaatcagcgaaaccacgtaaagccctagtcagcgcaggatcattgacctgcttagttaccttgtatcggtctcgaagtactagccgtgctggtttcgaaattcccgagtcgaattcgagatttcgattcccatttcgcttccccgtcgtctggtgattctcagaagaaacacacttgcacgcatcggaattgtagatacggtagcattgagacagcagagtcgcagccatggattccggcgaattttcaccggaaaactgaaagaattcaagcaaatttgtctttcgtcgtcgtcttttgcatcttcattttcccgcggaaaattgtctacaatgacgtaattaaccctattatttttctctgtgttcttaaaagaagataaattccgaattactacaaattcgccatttttaatgtctatgaaccttaaaagtatatgatttatgcaacgaattatgatgatgaacgtgtatgtataattacaagaacatataatgttgagactttattgaacaatgaaaaaccatgtggtaaatcaaaatacaaaaaaggttttaaagggactgaaaaatatttacaaattcttccagatgagtgttttctcttaagagaagaagtcttcatggctattaccatcatcatcatcagttgcattttcatcgtcgctctgatcattgaaggtgaggataagatcaagaagttctcttccagtggctgaagaagattctccttctctctctggactactactgcttcggttttgcagcgagaagagttgcgccaatagttcatgcggtgaagagacacgatacatccatcccctaggcgttcgcttgcgctggaacacacaaatttcaaacaatattcaatcatcatcatcaacatcatcatcttgatgactgccactaatactatcaacattcgtctcactaccaccatcaccattattatccatattgttgttatcaatttcaataaaacattcatcatcactatccatgtcatcaacatcatcatcatcactatccatgtcatcatcagaatcattatcatctagatctactccactgctataatctgaatcatcatcattatcctcagcatcatcatcaattgattcatcttccccctcgttcccatcaataccaatatccataccattaccaaataattcgtcgtcataatcatggaagctaagaaacgataaccaaggaatgcgaaaccgactcggtaactggaaatattttcaaacaaagcagcagatc

SEQ ID NO: 670 - DNA, 84499 bp, Arabidopsis thaliana
aagcttggcttctctttaccaaacatatatgtttgttgatcaatctctttctttgcgttatctgccccttgatttagacccacgtattattcgattcctaaactaattgaaatgattagatatgtgtcatgacgtttagtgaactaatattcacctaatatgtctttcaatcacttaagaatttgcattattcttgtgaaaaacataaattcacatgctgctagtaaaatatgttaacaaatcaattaaacatcagaaaataataactgagatcttcataaagaaagtggaagtttttttaaatatatgaagaagaaaagtgcgtagtgtgcacgggacttagttcatttaattctcgagccattgccgtacggaggaggctgccttcaaggcttaagtcgaggcgtgttcgttacgtttaacccgcaatagccggtggctacacactcacaaatcccctttgactcaccggatatcgacggtttcccgctattttttcccctaactaactttttttccttttcttgtaaaactcttaaaaacaaaactcggtgttgtctctttgtttgctcactccttttctttctctctctcgccgacactttcattctcacttgtgttcgtacgtaatgttcttgatccggtaggtttttatttgattataaactcatttcatttaacaaattgagtccatctctctatgattcacccataagatgatagaagaagatcaacatttacgtctgagataaatcatgtcctttaatgtatatttgtttattttctggtcaatcatcgatctttcttagtcgtagcagttacacaatgctgatggtacatggcggcagattttcgattcttattatttaaagaccaaatttaataatagatgtatgtacaacgagttttggtatcactatcttgtccggtaatgctcattgtttatcttttaaatctacgtcttcttctgcataattgacacaaatcacttgtttcaatggagtttttgtttgtttgatttcctctgttacttatgcagcaaaagaagaaattgagtttaaaggagaagtgtgagaaggaagtttcaggaagatgggtgaagaaaagaggagaatttcaggaagatcagtttcacttccatcgatagacatattactagacgagaaaccaggttggccatttcttaaaagagcaagtttagggacaccacaacaagttcacaaatggcacacacgaaaagtctcagtggtcaattgggtcatgagcttacctgaacggtttccaaatcatcaacagactctaaactatgagacaagcttgataaagaaacaaatcaaggacatattgagagacaataacaaatggttcaactacaatgttcttaggaaagcaacatcagatttctctcaaggtactctgttttttttttctctgcttctcctgatgagtttgtattgatatttgcttttacatgacagagaatgtgattgggaaaggaggatgcaacgaagtgtaccgagggattcttgaagatggaaaaggcattgcagtgaaaatcttgaagtcatcatctaaagaagcaatgacaaatttcgttcatgaaatcaacattatctcttctttgagtcaccaaaacatctcaccgttacttggtgtttgtgtccaagacaatgaactaatctccgtttacaatctttcaaacacaggaagtttagaagaaacccttcacggtaaacacaacactctcaacttatgtttaagattctgattgatttggtataaagtgtgaaatgtgttatgattgattctgcaggtaagcaaaagggaaagtatgtattatcatgggaagagagattcaagatagctatcgggttggcggaagcattagactatcttcataaccgatgttctaagccagtgattcatagagatgtcaaaacttctaacgtccttctatcacttgagctccaacctcaggtaatgtaagcttctagctttgatttatatgttaattttcataagagaccgagtgtatttcttatgattatgagaatagctgtcagattttggtctgtcgatgtggggaccgacaacatcttctcgatattcgatacaaggtgatgtggtgggaacatttggatatcttgcaccggagtacttcatgtatggaaaagtcagtgataaagttgatgtttacgcctttggagtggttctgcttgaactcatttctggaagaaatcctatttcacctcagaatcctagaggacaagagagtttggtaatgtgggtaagttgttttcttctgcgctggttacttgtagcataagcaacacttcgtgaaacctaagaaaagataccttggaatgcaggcaaagcctttgattgataccggaaatttaaaagtactgttggatccagacgttacagatatattcgacgagtctcagtttcaaagaatggtacttgctgcttcacattgcctcacaagatcagccacacatcgtcccaatataagacaagtaagattttgtttcattccttaagaaagctaagtccctcatgcaagaactaatctttaacgtttcttcagatactgaggctactaagagatgaaaacgaagccgggaaatggattatggaagaagaaggaaatgaagattgcttcgatgacgaggtttacccgaattccagcacagaattacacttaaaccttgcgatgcttgaggtggaagacgatgaaactgcatcaatcagcagcatggagagaagtaacaacagccttttttcttctacttgttcatctagggagcttcaaacataaggaattatgcttttagctaatagagaggttaggtacttaggttagaggtttgtttcttagtgtatggagtttacttgataactttatgttagacctgagctccctgctgttatctggaccagaaaattcattcccaagacgaatcattctcaatatcaactatgcctatctttattaggcatttcctcaaagtgccatatcttatgttttcgtttttctgaattaatcaaaatcgaaaaattctctaaaaacctactttagatctagggaatgttactaagttttcggatgaaatactaactttttaaggaagcactcacaaacttgaagtaactacatatatgtttaatttcatcgaagtgcgtaattttgtttaactcttatcgaagcaaatttatgtaagaagtctggttagaataaattgatggcttgagacatgccacattatttttcgtatatatatttgtccgtatgtattcgggttgcttgagatctttaaaatctgactatttcttttttttgttaaacggttttcttaaataaatgaaagaaaagtttacaaagaaaaaatacgaaactgttacaaccagaaagataagaaagaggactagcagactatttcatggtgtatataatcattttttattttgtcaaacataatcatatatattatatatataacatgagggattatattattgcttggacgactttcgtaacatataatagtaactatatatattattcattattacatgtatacgtcaatgggttatgctaatttatttggcgtttacgggtcggcataatttttttttttgttctaatggtaatgttggctctaatgttctgagtattgtttaatttgttatcaattaaaatattttatattttaagctaaataggagtacaggactatagaaggcgaatggtctacaaatgtgaaattgacacgttaactaagacctaattcgatttgagcatcttggtattttctttaatattcgtagacctccgcaatgcctgaaattagagcatcttactgtcgcctaacatttatgcgtcttctatattagtgttcatatgttcaagaggagatctacgttgtacgagttgtttttttgtaatggttaaaatgagtatatcttcacacatctacaaatctagagcttaaacaggcttaaaatcagatctcaataaatcatcatgtatccaaagccaaaggtaagctgatttcaaaggtgtcggaggaagaaccaaaaacatagagaatatcgaatacataaataaatgaattaagtacccccacttgccacaagaatataaatttgcatcaaactttctcttattttacaaaccctaaaagagctacatctttcgcgatcactaatgtttacatcaatcaactatttaagtaatagaagctttccaaaaagaaaaataacaagttgaagatagtcgatagtgattatgattaagtctcactttttttaatacaaaagataaagtaggtctggtgataaacaatccatttgatttttaaatcacaaaagatatatttgtttttttataacaacggaacctacttgtgttataaatatatgaattacaacaatacatattgggaattttacaacacttggatataatcttactaacaaaagctatattcaagttcttcttgtgaatctttgttatttggtttttgaaaaacattatagattataatagaattttatgcgctacatgataaaaaattgtcaacgggtatatgagtaaacacatatcacatatatatatgatatgaacgtcgaagctgtctttctactttttgtggtcttcaacattttcgggtcgatgtctcaaatgttgtttgttttttactaaacaaaagaaaaagaaatcatagaacttattagtaaggactataactttttaaaagattttggttgtagaaattaggctgatatttattttgtaaaaactataagattttgaatttttgactttgacatgaatattagtagggtattacgtaaaatttgcaagaaatgagaattcaaaaagagccaacaaaaccaagtcctgaaaatggacatgactaattaaagaaagaaaatgaaaaaacaaataaacttccttactatagaaattattgtttctttttaagtcaatggtttgtttttttttggtttttttttcatgttacttgtttgtacatccatattagtcttctattatcatcatgataatacaaagttttgactctaccaaattataaaaatcataaaagacgaggagctccaatcacgttcaagtaatagtatagatatatggaaaggaaataattaaaagaccctaattaaaatttagttcaagacctactttaaagccttttacaaaaaaagaaaagaattctctaagtcgaaatcgttatcgtagtacgttcatgtcttttctccggccaccgaaacgatgccatctgtttagtgcgcctttataattcaacgaccctttgtacttttccgattcctctttctctataacttcatctctcccattctcttcactcttctcaaaaattcgatctttagggtttttcttttatcctcttatcgctaatctggagctctatagagactataaaggtatgtttttttttcctcaattacaggctcggatgctcaaattttgtaaaaaatgactattttctattgctgaattgctcgaattgttgtgaatttagggtttttgattgattcgggagctcgagatttgacttcttttagctgattcggcaagtttgtatctagaaaggatcgattggtgaggtcaatagtggttggtgggttttagtaatggaagacggtgagcttgatttctccaatcaggaagtgttttcgagttcggagatgggtgaattaccacctagcaattgttcgatggatagtttctttgatgggcttttaatggatactaatgctgcttgtacccacactcacacctgtaaccccactggaccagagaacactcatactcacacgtgcttccatgtccacaccaagattctcccggatgagagcgatgaaaaagtttctactgatgatacagctgagtcttgtgggaagaagggtgaaaagagacctttgggaaaccgggaagcggttagaaagtatagagagaagaagaaggctaaagctgcttctttggaggatgaggttgcaaggcttagggcggtgaatcagcagctggtgaagaggttgcaaaatcaggctaccttggaagctgaggtttcgaggcttaagtgtttgcttgtggatttgagaggaagaatagatggagagattggatcttttccttatcagaaacctatggctgcaaatattccttctttctcgcacatgatgaatccttgtaatgtacaatgtgatgatgaagtttattgccctcagaatgtgtttggagtgaatagccaagaaggtgcctcgatcaatgaccaagggttaagtggttgtgattttgatcagctacaatgcatggctaatcagaacttaaatggaaatggaaacggatcattcagcaacgtcaatacatctgtctcgaataagagaaaaggtgacacttttattctgtaccttagagttttctctgtaaatcgttctggtttagaaccggaggttgtttactcactctgattattggtcaactcttgccttagtatgtcttataatgtgaagcaaattcgtgacgttctcatttagtttgcctcatagaatttgtatgaactcacttatgtttttgactcatcgcttaggtgggcatcgtgcatcaagagcagtttgaagcatcatcaagcttgtactatctatttccaccagcatagatattgtattccaaataagttgtagagttcagctgcaggatcagcttcgctcaggttcctttgtatcctcatttttgttttttgttttctgactctctttcccttccattgtatttccttgttgagcttgacaaactagaaggatgatatattgttaatacaacaaactcaaatgttctgtgtgttcttgccatttgttttcatacttgagctgcttcttcttaagtttatgtcgaagaagttgattgaatattgtctctatgcatgacaagtaggaattgatttgactacaaaagttattgataagatgcatgaaatttttgtacctgctgaattacagctttgaggggttggtggtgtggtctttctttgtggcacgagtgagatctctggacaggtgagttttaaaagattcacttcctgagatctcctaccttatatgcactaaaaaaacaactatatttaaggattcttgaatcttgttgattagaacccagatttagtagtagtagaggcaggatttcgacttccactaaccatcatgttgcttggtgaagaacaaggtatgcccatgaagcacactgttttgtacattgagcttgaggggctgtctctgatctagccttactgtaacattgcaacgttctcacaattgtgatcccaagttgctttgttgacttaaatgtgataatatagcttaacttttacttgaaccaatctcatgatcaggctttgcaatagggtttactgaactattattaaactcaagaatcataacagacgtcctggaataaacgagcgtttcatacttagggtagcacatacaccaaacttgtttattatatattggctcaaacacgttaacaacaacaattgtaagtcatcatcatccgccaaagacttgaatcatttctggttttcattggaatgttgtgcattttggttgccttcatcatcatcatcctcatcctcgtcatcttcgcggtagatgctttccgccatttgccagacttgaagactgttgtcttcagctacacttgagatgacccaaggctcgtccttgttccaggcaaagtctgatatcttggccttgtggcctccatgagagaagagcagctcaggtggaccatcttctgcatccaactctatttcaagctgctcatccccaaccctgaacgatccaccaaattgaaactaactaatccaatttcaattttgaatcaaatgaaaagggaaatatcgactatggtacctgttgatatcccagaccatgagtcttctgtcctcgccagaagatgcaagcactgtttcatggttgggatcccactccacttggaaaacttctcccctgtaacaaagccctcccagtcctcagttatcacttatcatcaacatttgatcaaataattttaaatagaaactatgagagaggcatactcgtgtttgctcaggacatgtaatggcgcagtcagcttacgaaggtcaaacaaggcgacagttgagtctgaggaagctgtggctagtacccattcattgaagggattgaaagaaagatagtttatctgcaaaacagaagatagtgttgtagaatggtcacttgagggtttaccaagcaaagctggcatgtctgagaaattatctgctcataacttcgaattatctattcaaacgagacattaatcttgggtatatagtaattatcctctaattcgtagattagatataagagggaggtagaaagttaagagatggtttatacctctctctcgtgaactttgacttggtgttgcatttggttagtccgtaagtcccatatcaccaattgacaatcatcacccgcagacccgaatatgttttcattcttcatgtgccatgctacatcttcgatgatactttgatgtccctaaaaccatgtctcagggatcaaatcagatgcaacaagcccaaatcttctgtgattcatgaaaaagataaacaaagttactcccaagttacctcatacacatgcattgggttcaaaactttatcagtggcagtcgctgagacatcccaaaggcagattctctgatcttgtgagccactcaaaagataaccctccttaaaggaactccaagccaatccataaccttcttgttcatgtcccattagcctcagatcaggatcacactcacttgtttggggctttccagagagtctggcgtaatcaaacagaaacacctcagagccacttgttttagcacccacaagagttggcttttgtggcatacacctcgctctgttcacttctccatcaacacgtatcttctgcttaatctccacctgcaaatgatagagttttcagaaactcagtctccaataagttttcacatattttcaagtgcctaagaaattgtccgaatttatataaaagctgaattcatgaatattttcgataaggaaaaggctagtccttttgtagaacactcaagacagttgttgattccgtcctcactcaaagctagaactttcgtcgaacacatggtgtgcacagaacacaacttataaaaaatccgcagaaagtgaagaaatctccaggagtaaattaccttagggacgataggttcctgatctcttccacctaatcctggttcagcgtcgggtgtcggaataacgacatcggcgaccattagaaaatcttgggcaccaccggaggtatgagtcccaaggataagcttatggacggcaaagtaaggatctttcgagtacggaatcggcgtcgaaggaacccagtggagagtaagagaaggccattctagtgggtgagagatcataagatcgtagagaaaaggtgtgttccttttccaaatagagaactcttcttccacctgatccaatcccgcctcatctttaccctcttctgccgccatcactctctctctcgctctcgatcgttcttcttctcagttctcactcttgaggtttttttctggtacagtttcccgcccaaaaagagagaggaggaatgaagcgggtaacaatgctgttttcgatgttctatacgaaaacgccatgacgtttatttatatgaaaaaccgcatacattgtgtttcagtaatgtcaggacgacctgttgttacgaaagttatagctgaaaggctggaaattgaaatagtattggactattagctgggaggcccactaaggatccacttcatttaatttcctaaaattattctatttaaaaccaattatcctcctagacgatttttttcttttctttttcataataagttgggttagtttttactaaaagtaaaaacctctttgatctagtagtttagtggtttcacattaaaatttaggattcaatttcgttaaaaagtacgaatttttgcatattaatgaggacaaaaatctcgaacgtaatgcgaccaatcctatccacatttgaggacaaaatactttagagaaaatcctctgctagcttgtcacattgataaagttaaggaccgaacacgctatcgatgtctaaaccaaccctttgtgacaattagtgacaactaaactaataagtaataattcaactttatcatgcatggctaatgatcacaatttgcattatcttttcgttattagtcaattccaccgaactagctccaagggctaacaaactgtgaactttgttaattcttatagtacgacaaaattacttttcttctaagcacaattatttgggcagcttataccgtatcattttatagttttgatttcttttcctaatgttataaagtaataattaattctgattttgttgtacactattatgtcgaatattaaatcccttgctcgcattatttggtcaccggattattaattatcatatttttttgacaactttgttttaaccaccaattcatcaccatgcaatttacatttttttcactcgttcttatcttaaatacattcgtgatggaaacataaacaaacatcaacatccaaacacaaaaaataatcccagtaaaaaaaaattaaaccaaaaaaaaaaaacatcacataacaacacaagcggaggcgttctcgtcgctaaacgccgtagtataacgaacctcagtggagctagcacgtgcgagacgtgacacatgtggatcatactcggtgttcctaacgtacccagtcggggctctgttatcgtaaacaccagacgcgtaaggatgagccacaacgtcgtaaggaacgaaaggatatagctctgctcttttaccggttcggtgaatgatacgagccaccactttgtttggttcaacgtacccaaccactgtcactttctgagcatttggctcgatggttacatctcttattcctctcattccttctaaagctctccttactttcctctcgcatccttcacaatctatcaaaaccctcacatccaccgtctagtattttccaaccacaacatattataataaggatttgattataaataaacgtaattatgaatggatgcagaatttaattacctgtagacttttgtgtctcttggagcttccatgagaacaatcgaaatattcagagacgtgatcaagaacacccatttttcttgtttcttggtttcttctttcttttggtttggcgaaaaaagttagactctatatgttgagatatatgatatgattttctttttttgttattgtcaacataaaaattgagtttaaaatgttgaaaatacgacctaccaaactctataagtagttttcgaccatatatttagttattatatgctgatattttgtatcaaccttcagtgagtcgtgtatgagtttgactctcaaacggcaataatatatatatgtacgtgtatgtgtattggtggttactgggtgtatatgaacctgttataaaaggactttaatctatataggtcgcttttgttatatatgcatcaccagtgtggcaataattaaacattgacagatagatgaaatagacatttgttatacaattcatgtttgctattgaatgaagtttttaagatatctctattcgcaattatttcaaatctgactaaacaattacagaattgatgaatattttgggattggaagttggaatctcttaagacggactgttcatgttacgtattggtggaccacccttgacatgtttaattgtttatgcaacaaatataaatgtttcaagtttcaacatcatttttttatggtttcaaaattaataaataataactcaatgaaaaccacatctcattttcaatcttctttttaaataacttctatagtttaacaattttaattagtatatgtcatgagataaccattagtccatattaaattacaaaacgatattattttgcggggcaaccatccataactaattcactagtctctgggagagctttcatatcaccttaaaatagcaaaggagtataatctatatgggtatactagaaaacaaatcacatttacttgtaaaataaaaactgcatggttagttgtaacttaatacaacgtgaatgatgtaacgattttgtcatcacaaagattcatattacttgggaaatcggaaatatgtgtttgtatatctactatctactagtcactcataattggttatgtttgcttcatccatgtgttccttgtgttgtttgcatttttaattaaaaaggctaaacttccgatttacatttattaaatataccttattaccactgaaaatcatctagaggtaaattatatacaatggtacatgataattcggattaaacatcacaatcctcgtcttcgcatcattttgctcacaaattaggcctggaatattgatatatctgacgacgataagcatattttgatcatgttttctgtgtagaaattttgtgagagtcaaccacaccatcaaatttaatggccaaaatccaagttcatgtaatttgctcgaatattgttatgtttagaaagagtgtcggtcctctgaaaccccaaacaaacgtgatttactgattttcatgcacttttctcttttgaaacctaacattagttggaaataaaaagcccaacattcggtagaattcactattcagacgagtaagccttgataatgggcccatattagtgaaatcaaggactgctaggcccaatgtatacaaggttatagctttacaaccttgaattctcaatttttgggctttaaccagtgtatagacttaatattgatatgaaccaaacctcttctgaatcatattctacaaattatattggaacatcatggtcgtatgtggcagctattgaatatatatatagtttgttgtactgaaaatgatagttagaggaatatgatgaaattcatttcttaagtaaatggtgaccatttgaagcaactaagaactatgggaatattttaaataaataatagaaaaaataggatgtattttatagagaattgtatgagtttataatttttagttaactgtggacgatttattaaaacgattttaatgttgtaaagaaaatggaaaaatcagccagtatatgcagtggattccactccaaaatccaaaagaaagagaatctgttgttttacgctggtccaaaaaaaacgaaatgaaaaagcaattcttttcccttaagaaaattcaacttcaatggttaacttttaaaagaactaaatatatccctttgaaattcttgctttaaaaatcactactagtcacagccgtggtagtgcacgttggatgaaaaatgatatactatggatttaattttctaaatatttttcctcataaggttcgtttttaaataaataaaattttaagaagaaaggaagaactaatggagtgggacaaagaaatgagggagtaggaactaggaagataagtaaaataaatagccaaaaaaaaaagagaaagattacgtaattgatgcagaagtatggaatattgtgttgtgtgtgacaggtcgtggcctcgatactttaagcctcttggaaacaagaattagtccagagaaaaagatatatacgttaccaacaacttctgctttctaaagattttcaatattaatttatttcaacaccgaaagaaactaaaccgggaaagttgggaatcattcaatgcgtctgtccgatcatccggttattgcaccaaaaaagttcacaaccatcgaagacaactaaaatcattatatctaaagactttaactctttcatgaacaaagtctactaggtcagcttttattatacgttaccaaaatggtccattgatttatactagtcaatttgacgaagaaaacaaatcaatcaattctcgtatatatataatgtacttgatttgtcaaatttttgttactcgtgccaagtctatgtcgtatcaaaacggtcttcacgtaatactcggccgacttttgtaaacaattcataagtttttaagacaatcaaaaagtcatttggtcttcaaagaaatgtgacaaccgaagacatcgaattttgtatcatataaagaaaggtacatacagttaatatgtgaagaaaaaaagaaaggtgaagatgaatcctgttttctagtcaaagttgcacgagaaactgttggaaattattttaaatatatttgtttgctgtttttttggtccaaggtgaaaatctttatctgttaaatgaatctctttgtccttttctctatttttcttttatgaagaaaccagaataattatgtttactgtgtaaaaaagaggaaataacaatgctttgcctttgtccattttggttcatttttctcgagaacagaagagaaagtgaaaagaaaagaaagagaaaaataaagagaaagaacagttcacatgagtttcgtgtgtcggtgtccatcgtagactgtgacacgaagctgacacctttgcatggccacgggaaaccacccccactctcttaactcttaaccctaatttcttttttcccttttcgtatcactttttatctcaattgtcatgatgaatttttttttttttgggtttagataatgaaatttaaattgtcttacaaaaagatacatttaaaaaaaatgttagatttattgacttttaagcattctatatgttttattggatatttttgtttcgtgagctttcatttttatagatatgatttctaaaacaattgtactatattttgggcatttatcgacgtggacaatatagacagatttcggatatcatttaatcagttgggacgatggaccatgtgtttgcaacatatgcgacaatgcaggatctgtaatgcagtcaatgataccttacatatgtaggcatcggtgaaatttatagtattattttgttgtccatcattaaacctgggaactcgaacccgaaaattgtatattgtataaacagtataatgtacataaaatcataaatatatacacgtaatctctaacgtacgtctaaacgtatattgtacatattataggccataacgtaatattgtatggctttgaatgcgtttggtgatgtccgaacataccgaacgccgatggcaaacgactattcgcgacagtgagggccaaggcttctattatcgcatgcatgtggactttttttgtgtgtggcatgcatgtggacgttataggctaatatacaattttttatgaactatttctttaaaacgtatactatcaacaaaaatgggtatgaaaattgcttgctactgatgactgaaatccgagaaaaaataacaaaaaaattttaaaaaattatgttgttccatggacttttccaaggaaaatgactagtgacgaaataaaatgctatttttggctcttttaaagtatttctatataactcttttaattgagactagttagctacattttttgtaatctatcagtaatatgtaattttatcatactctttacatttatgcaaaaacaaaatctgatattaaagaaatccaaaaaagataaccgtatttgctgtgaatgtactcttggtcttggaaactaaatatacaataatgaagggaaaaataacatagagtaatggaggaaagtgatgtagcgcgcagttgtacggggtaagagtaagacaagctaagcaaacaggcaaatgcaaaacctttgcttcttggtgtttctagtcctttaatagactaataattttaattttgaagtatataatattctttatatgtaattattgtactttgtttatatatttcaaaatatgtaatatgttctcggtttataataattctgaactacggctacgttaatacgtaacatgttctcagtttatatgcttgagatttagataattaaatggtgtgaagctggaccaatcggcaaaaacgggatttgggtgaagatgagagtggtgtgtcacgatgcgtatgtgaagatttgatcgaacgcttcaatacacgcatgtttttacattatgcaacagcaacacgtacatttagtgtaaatttcgtagtaatcacggattgagtaaaaacgacgagtttagatatataaatatcttttaggacgaaacaaaaaagttgtcggggttggtgtcgttttgtgcaaagatttcaaaagtaaattaggttaatgtctgttttcaccaaaaaatacacgaaatgttcgatcgagaccttttttttgctacgattgaatagtgagaccccctattttacagtgatttatgaccactttgtttaatttcctaacgtctttacatcactaaactaatcaaagctacataagaaaatattaaattatataatgatgtggtcattcgtgtaattagcattcaaagatggttggtacgaatcgatgatgtttgataaagtgtatattagcaataactaatggtggctaaaaactcgtattaatactaagtttgtagaccgtatctcacaaaaatgtgaacttagctaggtctaatcagaatattaatgcacaattgttttttttttccttcgcagacaatatgcatgaagatatgtttaaacaggtagttttcatttagttcacaccacaccaccacaacaatgatctgttctagctagcgttggagatatgtgcaaactgaaagtttttaatttaagggttgattttttttatattttttttctttctatccatccgcgaagattcgaaagataccccgacctattggtgcttggagaactagcggcgtccatatatcgtccaaagagtcttgcatcacgtgtacttagtaatcagtattccctaatgtaatgaaagtgagataagtatgaaacaattcgtgactattgctaagtaagcattgggttatggatatgtggaagatgcaatgcatcgaaaacgtgtcggtagatacgaaaggtgtgtcaaatttatttattttttgcgggggaaacatagtagcacatccacctcccaagaaacaagcgacacacactcggatgataacaataatagccaacaagtgtctctaagtcatcatccattatatatccaaagcatataaaatacttgttagatagagacatataatagttgaaggatatcacatggtttgcaccattcctctagcatgaattatgacattattcataaatatggacccttctctccatgttttcttttcttaccgcccaaaagccaacccattaaattaacaaatagaaatacaaccatataataaaccgttgcactttccttctgtactatgatgattgatgaaggtgctaaaaacaaccatattatattaatacgtacggtccaacgattttcattaaacttcttgctttagcaccgtttcctcctttttctttgatccaaatcataatgcacaactaacgacacacacaatcataatggtaaattggtaagttaagtgtgtatgactattagaatgaagcgtaaccacaagaatgagtatcgcgcggaatatcgttgtagactaaaaccctacgcgtgacccaaagttctaaatctcactaaatattgactaagagataactaattcttattaaaaaaaaaaaaaaaaaaaaaaaaaaaaaaaaatcttataaacgttattgtcaacataacgttatcattaatcctttttgaaacaattggaatctagacatttttagaaaaagtcctaaattaaatcataattttttgtgaaaaaagaaaaaataaataaacccgatttattcatacatatcgttacaagatagtttgacgtttttttctctctaaagtaatatgatggtataaaattaggtttttaacagttgtactaaaaataggaaaaatccattttctgtttaatttgccacaaactcacaataggagaacatcttataatataaattacttaagccatatttgaccagaaattttcagtggtcaactaaagcgttttggagtagtatatgatttcattgaataacaatgaacttaaatctggtgcgttttaattcattccagttcaccagacattttataaaagtcaatgtttctgaaatttgccatattgattatacacactttcttgaaaaatgcaaagaagaatccagataaaataaaagttacactgtaatatcctaattttattaatataacagcaagcaatatatactttttaaaaatatacatgtctatgtttgtctaaatgtattaatttcaaaggcagtatgatgagctgtaaattaaaatagtaatacaacttttgtttttttcccagttttgtttcttgtgcacatctaaaattatgcctatggttgtggataacaacaaaaaaaaaagctttaacgtcaataatttgtaacaatggtgttatatggctgttttcgtttccttataatggcgtaaccttttgtagaacaaaataataggtaaactaagccattgtttgactaagaaaattacaattacttttcataattagaaaaagaacaaaaaaagtggtaaaaaatagaaccaaaaatcaaataattcaggcgttccagatgacccaactgaccaattcagtaaacaataaatttcaaatcagagaaaatagaagtaaataaccaaaaaataggaaaaagaaaagaaaaaatctgtgccctgccataattccacttggacttgtataatttttacacattaccgaaaaagccgaaaagaaataattaaataaaataaaaactagtactactaataaaagacaaaacggctctggcaaaatctctgaccttggaaagataaaagatagttcagtcacataatcagcatgtgtacgtcgtttctttagtgcttaatattataaattaagaatacttaaaaccaaatctttatataatattgattgtcagataaacattaacccaacaaagtctctctccctctcctattcaactttttcagttactttactccgttcatcttttatttttcttttcgtcgattctcatcaatactacaaaaatatatacttctatatatcgtgcagaggttacatgcattgtacaattttgttgtcccgagaaacaagcggatcagagacaaaatcagagtcggtttcctgctttttgattcctctttattaatcagcaaagatcgattccacttctcctctctctctctctctctgttctttaatttagagagaaaaaataagcattcttccttctctgttttcgagcgggaaattctggagatggctatacaagcgcagttgaattacaacgctccgaatgcgaatcaaatcggttttggtgggtccgagttttctttgatcaacaacaatggcgttatcggaatcggtaacgatcagtcttatcttgtcaataatctccagttgcagaaagatttcaaccaacatgctctgtttcatcatcagcatcatcaacaacaacagtctccttctcaaagctttttagctgctcagatggagaaacagaagcaagagatcgatcagttcatcaaaatacaggttcgttatttcgtaatccaaaccaatttttcatcgaaagtttcggtttttaagacgtgggtactgataaagattcaaccttttttgctttgttgataacagaacgagaggttgagatatgtgttgcaagaacagaggaagcgagaaatggagatgattttacggaaaatggagagtaaagctttgcttttgatgagtcagaaggaagaagaaatgtcgaaagcattgaacaagaacatggaactcgaagatctgttgagaaaaatggaaatggagaatcagacgtggcagagaatggctcgtgagaacgaagcaattgtgcaaacgcttaacacaacgctcgaacaggttcgcgagagagccgccacgtgttacgacgctggtgaggcagaggtggaggacgaagggtcgttttgcggcggagaaggagacgggaatagtttgccggcgaagaagatgaagatgagtagttgttgctgcaattgtgggtctaacggagtaacgagagttctgtttctgccgtgtaggcatctctgttgctgcatggattgcgaggaagggcttcttctttgtccgatctgtaatacccccaagaaaagcagaatcgaggccctcattttctagggaaaatcctttcttttctctcaccggaaaaatgcttgcctttgtgttccggtgaacggagagtttttactccgggtagatgacgtggcagggtaatttggtaaaaataggggaggaaaggaaagtgagaatagggaaaggttagaaatagtaaaaggttatctcaagaagtaaattctgattagggttttcattttccctttttgttttttggttctttttccattcaatggagaaaaaaaaggaacccagctggatttgatgaacataattcatattttccttctatctaatgaattttcggatataaagtttgaatgccattctttctatttcaatgataattaacttcttaggatttttaaacacattagtattaaatatcttaatatacattttcctaatgattatatgtataagattttcctatattaaacacttcctaataagcaaaaaactagaaacttttgaccgaaagaataataattctaaactaatatgaaatccaatttaaacatatcttttaaaaaatttcatttataaaaaaatcaattaaatcaaatttaaacatatgtcttttaatttacatagaaagcaaaacaaaaaaagttatattcttttgaacaaaaaaaagaaagcaatgaaaaagtaaaaaaaaagaaaggaagcattatatattaatgggtttgttttgatgtaggaagatggtgaaaagaggtggtagtagaggccgtagacacgcgtattggaggaagctgtaagtattattgggttgctcaacaatcaatatagtacagtgacatgagagcacaatagtaagtaataattccacattaaaaaaatagaaattgaaagagaatcagagtttggcctgccataggatttgagttctcgcactttcctaaacagaaacatgtttcattgaacacttgggcctttcttcttccttcattaaggattctcgatctctgtttcgacagatctgtgctacctaggttttctagatactccctaatacctataaataaacaataagtataaccttattatgtaattagatcgtactactatcaataaacaagattgtagaaaatagtgaaaaaggcaacgcataaagattaattaaatcttatttaagtttcatttgggacaatttaagattattgtcttgttcataggatttatttcatctattagtattacaaacttttttacgcaaacattattatctctatgtatagaatgatttaaacttttaacgtaaacacaaataaacagtcagtcctatgtgctatggatgaggtgattagcattgtagggtgtttcgtgtcatatagctctactagtagagattttgtgtgtcagtgtgtgtttatttacggctttgagtcttcaagacccaattagccttaagaccttagtgattttagactctttgttgaaaagctagaaattgcaaacccaaaccgcctaatgttgctataggttttgatttccgaagtgggtaattaattatgtggattacgtataaacacatggcccggcccattttaccccccaagtgctcggcccaaattgaaagtgggactcactggattgccaactaattttatttaacacgacgtgaagtttggaactaatacgtcaggtattaaaagtacataaacatcatcattactcaatttgctaatggacgaatagagacggaatcaacaaagtaacaaacgacttcaatattttttttatatgttactatgattcgacaaaggattttttttttgttatgaactgaagattattggatttttaatcacaagatgtcaatatcaaaattcaataccatgtctcgattagggatatcaatatcatgatattttaacaactttaactatgtaatttaattcgattatcgtttttgttttaaccttcgtttgatttgtagatggtagaggtatttagttgttgaactcttctttatacacatgttgtttgttttgcttcttaaaaggataataatttttaaacttattacatgtgcaccactggtcgcattcgtagttttccatattttatgcgaaagaaatgaggatatcttgggaagatacaaattattgggattgttttgcaataactccaaaatgttatgtttaagagttttttgcttacgtatttcatatcaagccacgtagatgcatttgtaatctcataaaacatttcgattattattaacttactgcaccatattaaaaaacaaatttcgatatcgagattgtaaattgggcaattaggaattaggaattgaggtaggtaaagtttataagcagatgaggaaataatagcaaggaagagaaagaaagtggatgcgtcgtggattccatatttatgtgctttacttttccttttggtaggcgaaaattttgacattttccaacaaacatcctcatgtatttcacatattggcctgaccaactattatgcatattttatacatttgatggattaggctataacatggtttttggagtttacttttatacgttcgatcataggataaacatacgtcttttattaaaagctcgatctaactatggcatgttttaaaagttcacatcttttgtctcattgctaattaacgtaagaatattaggcaagtcggctttttatacgcagttgtcgaatccaacttttacctaaacccttgaaaaatcgaaattaagcatttttatttaatagtaaaactcaacaatttttaaggtggtatagtgcaataatttaaagatttatcttaattttttcactgtgatttcaattttgaaatatagtagataaaaaaaaaaaacagaaatattaattcgttaacagtattattattattcttatttatataaaaattcctttttttcaaaaatcgtatatcctttaaacagagcatcgcacgtactctcttctatctcagtttcgagactcattgcctcgccgagagagaaggagacgccatggaaaggcttcttcaaccatcttcttcttcttcctcaatttctccttccaaattcccttcacggacttctcctttccttccccgtctccgctcatcgggtctgagctttgtctcgactcaccggcccgagtcacgccgagtcagctcaatttcctgcaacagttcccagattccgtcactgtatacgcctataggatctaacacaactaacaattccttcaatgggtctcccaaatcggatgaatcgaaacctaatcccggatttctcacacggatcgcgacgtcggcttctgagcagcgaaaggtattcaatttcacgttttgttcagtggtaattagaaatctctggatgcttacgtcgatgcttactaaatgtttcaatttccacattttcgtatagttttggggacgagcttggcttacattagatttggggtttatgggttttaatggggtttgattttattcaggaaacatatgaaaagtttgtatatagtttgctcgagaagaagattccaagaattacaaaaagttccaattttgtagggttacatatgttactatccatcagtctctagaatcatggaatcatgttctctctgttttaggattcgggagctaattcgatattgttgacattgaacttgctttttcatgttagatattgatagtccctaatttcaagctccacacttgttggaacaatagaactcaaatcaatctagtttcttttttgtttgattagtctgtgtgttggaattgtgcttgttcgctgtcctcttatgtagtctcatggatgtttaccagatcaatatatatctgtgtttctttgcagacgttatctactggaaccgttatactaatctctgcagtagctgtgcttttgcttaacccgcttcttgcaccacctgctttcgctagctttcaaactgcagctaaatccggttggctaacaagtgcgtggaccggtttccttgctggttgcttgcacacgctctcaggacctgatcacctcgctgctttagctccgctttcgatcggacgcagcaaaatggaaagtgctgctgttggagctctctggggatgtgggcatgatgctggtcaagtcatctttggtttactgtttctgctacttaaagaccggcttcacattgaagtattacaaacttggggtacaagaattgtgggattgactcttgttattatcggtgctatgggaatcaaggaagcttctgagattccagaaccttgtgtcgctttagaaaccgacatcagcatggtatcaacagagaaagaagccttaccactgcccaaaaagaagaagatcgggtttgctacatttgcaactggagtggttcacgggttgcaaccggatgctctgatgattgttttgcctgcattagctctcccatcacggttagcagggtctgcgtttttgataatgtttctggttgggacagttatagcgatgggaagttacacagcgtttattgggtcttgcagtgaggctttgaaagagaaagttccaaggatcacagagaaactaacttgggtttcgtcacttgtggctattggtcttggattgggaattgtcatcagccctttctttggttttagcctctactgagaaagtaaaagcttcttcaggtaaatgagacaagttgaaatctttgtagttcttatagaagaaagagaggtttttttgggtccatatcactcgtattattgtcacctgtacgaacaaaatctcgtaatcttgcttcagaaactcctctcggagaaaaccatttggtgattctttttattttccttatttttaagagaagtttggttttggttctgaattatcgatcaactgcatgtaaccatactttgtaatattatcaaattttaactaaaaagtcattcttgtttatatcatttgaacagtacttgtcacaaatacaaaccccaaaatgtcaaaaccaagtttattttctaatgtcaggatgtcaaagcagagttcaaatccaaattgtcagattattcacaccaaatctaaagactctcgacaccccacacttgatacaacgacgttatacacaaatgtggccactgttacaacacatattgacaactattgtaaattccctaatacccacacataagaatttatggattttcttgtctttttcgtttcatactttgctattccctttcgtccagaacatgcagactaaaaatcacgtctttgtcgacagctcttacgggattacattcgttaatatatgagaaatatataagaatatgtcacaatctttcaaggaagaaggagctttcatcaagtaacaccacggattataaatcttcaatgtataatgtattattctgataaacgagagacacaacaacacacaaggttcttttggtctttaaacagatactattataacatagcacagaagatccacatgatgaagattgtattatcgcaactttgatctcttcccattttcttttctctgctaattaacaaccacagaaaggccaatcaagaattctttcactcgttttagatgcttggtctcacgttcagacggcttgccagcttctgtcccaaagacttatcagcctgtttcacacatttttaaccaatcagtcaaaaatgtttaaaacttgacaacttttcaactgctgagacttgaagaacgagacaatgacagtaacagagatcaagatttcagacctgagaccagtaagagatccagatactgcggatttcatgcgtgatgcgtgggtcggatagggcatcaatccatctctggatgaatcgttcttgcctgaagttgaaaacataccgtaaaacgttaagaacacagatgttccttttatgcattaagcatcattacaaaaataaaacaattagtacctctctggtgtaaaggtacggtatctctctccaggctccttgaagttgttctctttctcaataatgcactgaaaaaaaaacagatttcgaaacttttagatcatatgttcttaagtgaaccaatccatgggaaacagaaacagagaggaaaacagagttgattactgaccctctcacgttttccagaacagacagcaggcggagttggatacttctcagcatgacgaacctggtcatacctcgacgggaagtagttaacctgtaacaacagcttcttgtaagactatggtattctagcttcaagttcgatataaagatattgatagtgtactattaagtacctcctcgtccctgtgcatgaaattcatgaatccctcatggtggttgttgtggtgagcacattttggagcattgactggcagctgaaggtagtttggtccaagacggtgtctctgagtatcggcataggagaagacacgggtttgaagcagcttatcatctgagtaatgtatccctgggacaataattgcaggacagaaagcaagttgctcattctctgcaaagaagttgtcaatgttcttgttcaacaccatacgtccaacaggttgaagaggcaagatatcctcaggccaggtcttggtcacatcgagcgggtcaaagtcgaacttgtcttcatcagcaggatcaatgatttggataaagagcttccattcagggtagtttccagcagctatagagtcatacaagtcttgagtcgcatgactgtggttggttcctccaacacgaattgcatcttcttccaaaagagacttgactccacaagttggtttccaatggaacttcacgtagtgagctttgccagctttgttgatcaacatgtatgtattgacacctgaaccatccatgtgcctgtaatcttgtgggataccgatatcatcgaagaggaaagtgaacatgttcaaactttcagggtggtgggagaagaagtcaaggattctccagttctcttggatgtgagattttgggttcggcttaagagcgtggaccatgtcagggaacttcatcccatcgcggatgaagaaaacaggaaagttgtttccaacaagatcaaagttcccctgcatacaaagaatgatcatttgcttagtatataagtaattgctagcattcttaaatgttacaaactactaactgacctctctggtgtagaacttgactgcaaaaccacgagggtctctcaaggtctcgggacttccacgctcatggataacggtggagaaccggacaatgacaggagtctgaacaccgggagctcggagaaagtcagcacaagtgaggttagagatatcatgagtgacctcaaagaaacctttagcactggctcctctggcatgaaccacacgctctggaatccgttccctgtcgaaattggcaagcttctcaacgagatggtaatcctcaagaaggataggacctgcccaaaaaaacaatcagaaatgcaacaataacattgaggagaacagacttattcatgggagaagaagaggtacctctgggtccaacggtcatggaggagttgttgttccatacaggagcaccagagttggtggtgaagaagggagagttgtaagaactagctggacgatactgcatcatcatcatcaattgcaaaggaaattaaaattaacatcagagaaaaaccacaatgattcgaaagaatcacaagtcaaaaggcacatgatcttagagcaatggaaagacttaattgtatatttgcagattcgagtagaaaaaaaggtcaaaactttgggtgcaattccataagctaataacaacgtttcaatccagtttatacggagaaattacaaaagacgaaaaggttagagagaaaagaaagaagggtttaccttgtaaggatccatggtttgatgagaagagagcttggagagattcagagatttttatcaaaacgaggagatggtactgatgatgatgaggcactattttatattcacttgccttatttataaatggcgtgtgtattactgcctttttagctttttatttttttctttattttgaggggggaatttttaaaggttatcgttttttctttattttagttttttcatgtgataaatactggaaagaaaaaaacaaatgttatatattgtggcgagaaattcaggaacgtcaagtattatttatgatcacagtaccacgaattgtttcatatatatttttcttaatccaaccaccggttacctactatttattcaaattcagaaaaagtagttttaatttgttttattcgctcatttttattttgttaattggattataaactaatctaaatgaattagtgcgactatcttttaatctcagacactcatagcaaataactgtacttttgatttacatcacattaacaagtttaacaaaatctattattattagagaatgtagaataatgattaaaacaaagtcaacccttacagaattgaatctattctatgatgtaatagaagatgaaatccatggcattggtttttatttggtcctgccaaattatatcgttttacgtttttctaaaaattcgttgaacaaagccaacttacatgtagtttttgataaacgattaattttgaaccttataaactaactggctgtggtttgatagatcaacatcgtcaatgcgatccgaatttaggttcccgagaacttaagataagctgaacccacgattgcgatattgtcatatatatattctgtacttaaaaaaaaagttttttttatatggtaacaaaagcaaggaagaaggacgacaaaagaaataaatattaggcaattcaatgaaaataaaataaatgaggacgtcattgggctgtggttccttatccggtttttttggccttttagcaaaacctttttaagtggtttagtatggtcttgggtgacgtggctgctttgttggattccacgtgtgatgagatagtgtgaacgccccaagcgggaagaatatgccttttgaattgattatttcttaagtttttgttttgccccttgggagatgtgacgagatgagatttatcaagttcccaatggcccaccttggaaccctctggctcgctcagaagttcatctgatcaagctgttgattttggacaatagaagaaatttttaacacacatatttcttcatccaccacctatggctatgagtgcttgtatttcttttaagagatggcatgtgaattatggaatatatggtcggttaagaaaaacatatacatggtactgaattgccgaattctattggttataaagaaaccaacaagtagtgaacgtacaagtacaaccacacaggttacatgcaacaaaacaaaactaatgtatcgtacgttattaagaccttaaagccaacggattgaaacatgtcgaccatacataattaaacatgtgatcttgttccatacgttctgaaaaaaaataagcaggctcaaaaatgtgctgaagaaacaatgagatgattgaaacccattacgaatagacttagcccaaaaatgctatcaaaagaattgtcgctaatacatcaaaatgggctgaattatctggtctagcccaactcttaaagatatacaacgattaagtagctagctactacttccatttccaatgtcaaggatcaagaacatatttttctcagcacgtgtcgtctttttgaaaatttcaactaatcttgatgtaagttccttcttggttaaaaataagaaggatacacaaaacaaactcaccttatggttaatttttgtttttttaataataattagaccaaaatccataaacgaatatagctggtgtttgcaaccagctaaaatatgaatattagggaacaccaaacttaaggatgatcgattacttgttttatacatacttttaaaaagtgctaatctaagacagcattaatattgaatcttttcaaagttattgtatgtactattttctgaactgaaaagttcaaaaatgaaatatgaaggtacaatatagcctaaaaacaatgaatagaaaggagtatgttctatgttttctttagtgtaaataatattaagatattttaagaataattaagctaatccctttattattaaaagagaagtacaaattgaaattttgtataatttggtctcaattttgattttaattttggattttattctttgctattcaaaattattaagggtagtttggtcttaacaattttctaagctttatatgatccaattcaatctaaaccgtttaataaaattaattctctttaatctaagctattcaacaaaaataaggaatctatatcgtttttgaaatcaaaatataatcacatttcatctctaaaaacagtatattcaatcacgaaatcaataatcaataatatccaaatcatttattacgattcttcactaatcactagaaatttatatttataagtttaaaatatcaaatttcttcaaatatttagtataagaaccaaataaattgattgtctgcggtaaaccgcgggttaaaacctagttaagtacataaacatgcttagtttaccatatgtgtactaaatgacaagataactaattaaaaaacaatccacaaaaataaacgcattcactactaattaaacaaatatactgctaatcaaaatcaaaagcacattctcaaggcataattgaaccataaaattgatgtaaaaaaaaaaaaaaaaccgtaaagcatacggtaatcaaatgtagtgaccgttggagggggaatcggaaaaaggaattgcgagaaacgaggaccattatttaaaaggatggaaaaagacagatgtttatggatcgttctagccgttaccagatacgatacacgtgggatgatctgtatggattaacgaagagatctgacctgtcttttgccaaactgatgtggaaattgtgacctggatgttttagagataaagattggctgccccttgtggtaggtcagtccctttctctgaactatataatatactcaatttaatttaactagactagttgaaattgttgaagttcgctaaccataatgtacaaaaatccttcatgttccgggaaaataaatcataattaacgataggtatagtagcagcaaagataagatggtgatccattctcacatgcaatgattcggatgaagtttagccaaatattattattatccaacctcttctgcaccacgaagagactttatttacgtaatatatttgatggtccagtactactatccagacattattgttttcgtttccaaatcataaaacttgaaatcttattgattactactagggtcgatatctcactatttggaaaccgcaggctccctatttattagtttcaaactcaattgaaatgaaaatgtgtattggtggttttaatgtttgcactgcgtaatgttgcctgaactgtatatttaataaatttaccacaacttagcagatataattttgttatacgaaatcgtatagtcttcttcatggacaaagaggaaggcaatcatcattttctatgattgctcatcgacctggcatttccattaccaaaggcagcataatatcaaatcaaatatttctttgtcgtactttacttgaattaatgatattatcgtgggtcgacttaggaagtaaagttacttccatttcatatatctaaatcacatttgcgtaaaatttaagtattacacaaagtgataaagtaaattaagtaataattggctagggatattaacaaaataaataattttgattagggctacgaggataaggacaaacgtcgtattaacgtataaaaaatgtgaaaggaaaagagtaaactaagctttagatattaacactcattacgggattcctaaattgccagcacttcggattatccgtcagtccactatttatgctagtttttcttttccttgtgagcttgcactatggatttttctttatgcaattctcaatctaaatgaccattaaactttagaaaaaaatgaccattaagttttaatgtacatttgtatcaactttctaatatgccacgtccgtattgctatatacaaacataaccattcaaattaatatggctctctcaaaggaaaaaaataaaaggaatagcaaatgagtagataaattttttgatcaaaaagaataagatgcactagtattagtatatactcccatacatcatttaaccaaattttaaaattgattataatccataaatagtcttcaaatttcaacgacaaacacattaatgtgagtataaattagcatagactactatatagtttatatgcggggtgaatgtttgtctatacaagtttcgtcaaaaaaacggcaccaaccataattaatagactcttatcttttgctggtatatgaactctttttaaaaattgccgcgaatataccttcttcgtagattattaatctttttcatgtacagttgcctttagcagattatcatatgttacaaacatttgacctaatttgaaaaaatgttaccaaaaaagatttggaaaaaaagacaaagatattgagataaccgttgaagagagtttgggatgacaggctgacgagaaaaccatacacctcatttctatcattaaccctcacatggcttatctgtacatctggaccccaccaccttctacttttatctcccattttttttttcaaattattactacccaaaaaaatattcaacaaacctacaaaaacacatgtcttatttttatttatttaaacatttgtgtatttatcccattgttccatatttattagtaggaaaaatattcacattttacagaactgcaaaagatttggccatgcaaattataccccactttgattgctattttatacactatatcatacagtacaagaacaaaaatttgattgggccagtaataatgcatataactattgatgttagcaagagaaaaaaatgcattaaaacacaaatttgactattattttgcaggaacattcgtgataattttgactattattttgtcagtaataatgcatattaatcgtatgtgattttaactaaaactggaaagttccaaggaacatttagtagtttatatttttagtactaagttagtttagagggttattaactatttaatcgtactaataatgattataagcagaattatgtagactatacaaatagtacgtaataccgaaagtacccttggtttatccctggcattacaagggtttcctttttcccctttaaaatggcagaagagatacactgtcgtcgtcacacagcaccacaaactccatagctagctagagagtaaaaagaacaaagatgtcgaaagaagtgagcgaagaaggcaaaacccaccatggaaaagactacgtggatcctccaccagctcctcttctcgacatgggtgagctcaaatcctggtctttctacagagctctcatcgctgagttcatcgctacactcctcttcctctacgtcaccgtcgctactgtcatcggccacaagaagcaaaccggtccttgtgacggcgttggtttacttggtatcgcttgggctttcggtggtatgatcttcgtcctcgtctactgcaccgccggtatctctggtaagtttgaatcccaccaaaaaccctaacttttacttgtttggttcgttggttttattgttaatctcgttcttgttctcgtcttctcgtaggtggtcacattaacccagctgtgactttcggtctgttcttggcccgtaaggtctctttggtgcgagctcttggttacatgatagctcagtgtcttggagccatttgtggtgtgggtttcgtgaaagctttcatgaaaactccttacaacactcttggtggaggagctaacaccgtagctgacggttacagcaaaggaactgctctcggagctgagattattggaactttcgtccttgtttacaccgttttctctgcaactgaccctaagagaagcgctcgtgactctcacatccccgtaagtctcaaaaagcttgaatctttaattgagttttttgacaaagttactatgaatctgattgggtctttgtagattatgataaaggttgaatctttttaggatttaatgataaagttagtatgaatataaaatgggtctttgtagattctgatgaagtttgaatctttttatggtgtaatgacaaagtatgtatgaatctctaaggatctttactttgtagattctgataaagtgtggtgggttttcttgtgattaggttttggctccacttccaattggatttgctgtgttcatggtgcatttggctactatccccattactggaactggtatcaacccagctagaagctttggtgctgctgttatctacaacaacgagaaggcgtgggatgaccaagtaagtgtttagttattatctggattaggtattcactaatcattcatgacttcatgtcctaatgttggttctgtgttggttttggttttgcagtggatcttttgggttggtccgttcttgggagcactagctgcagcagcttaccaccaatacatattgagagcttcagcaattaaggccttgggctcgttccgaagcaacgcaaccaattaatgaaggctttttttaagataatgtcaagaaacaactttaagatttatatgctttaattattatttgttgttcttttgtgtgtaatgagagagatggtggattgatgttaattatgaaatggctcagtgacttctatttccttctttagtttttgattgtctttgttaatcgtttgcctttggtttctcttagtagttacaaattcatgttttctcttcatgtcagttcgtaaatatcgaacaatccaagttggaatttattattcacaacatcacaagatccttcaatgtacattattacagctagcgtccaattaagatacaaatttcggctgaacatggtgtgtgggtcttttggttattatcctcgtgtcgactctaaaccatcgggtcatatgtaaaccattcattaattgacacgtgttgagaaggaaatattggattccatttgctatgtggttacattttcgttagttgacaagaaaacaactattttcgctccatttgctttagtcttttttttcgatgttacttgttagaattagtattgtttttaaaagaaaaagaactcgtgcgagtaccttttgttgtttttgtgaaaggataaaaaggagtggagccaatagagttgtaacaaccagacaagaaacgagacattaaacccattttttccaccgcactctaacttttcttaggccgcgtgtcgcgtagctcatgtgtttatcacatgggtaacttttctgcgtctagttaccgtattgttattgttattgttatatagtagactccttttggctaagagtctttagacccacccaaacgcatatgtgtttggatgtattaggaaattatttgtataaaagactttaccaacttaattgaataatgcatttgattaaagagagaaaaaaaaaagaaaatgctcatggaagcaataagcactaaatttgtctatgggatgtaaattgcgacagtgagagttggctttaaaatagtatgaatacaaatacgaatttgtctacatggaatagtagtaataattcacgtctcgtcttttcagaaaagtgaatgcagaggagacagagagagagagaaggaccacaacgatggccttcacgcttttactggttaatacgcctagtgtctcagttttaattttaaatacttagccgttatgatcgattcttcgttatctcttcttagcttcaatatggtccactcattttgaactttgtaaaccctagcagcttatgaagtatgaaccatcatatagttgggccttaaattttgttttataatagctattgctttattggttctggataatagcaattttgcaagttgcaaaataccttatgtgaccggccggttcacccctctgcttatccctaaaccgatttactttaaccgatctgatgctgtatagctaaaaacataaacttgaaacagacagcagctgagtgtgaaacttagttgtctgtccatttttttgaaagaaatgatgtcataatatgttgacaaaaaacatcttcaactttggatataaatcactaattcagactttttaaaagttgcgaacttttttaatcattccatgttacggattattttttatgtgtctggaaaaattggctgtcaaggtgatttcacgtgataactaatttgtttttttgaggtcatttgccatcttgtgaaagcctttggagcctacttaaagattttattttattttttctagtaaagacgattgaagtaactgctgtctattagttaagatctgaatctccaatgaggttatttataattacttactcacattgtgcaacaaaaccaagcacaatttgtggtccacaaacctttatctggaggtttctggttcaacttctccggtttacacttaaatcttcgtttcgtgagcaaacccaacggggagcttcccgttgggccatgtttcagtgggctcggtgtaaagccgacatgagtaactgaagcccagtagcattgtcgcaaataacagattgatttgtccgttgcaaacggtttaaaagcagagtacgatactttgttacttttaaaaatatcaaatctaacaattatgtaacaaaatcaactagtgaataacataaaaacataagatatatttggctttaaaatcccctaaaaatcatcgttatggaataacatctacttttcgacaaaaacaaagtaacaaaaaaatcgaagagtagagctcaaattgagtgtaataaagaatgaactcaacaaaattattcattcctttattttgcaaaagtgttgttttgacattttctatacacatatttaaaagaactatactatacaatattcaacaagttctgctataactaacacaataaatatagttgtgaatttaatttttaataaacaatctttcgttttccaaactcgaaggcaacttgtaatctttcccattatagaaaacgaaagaaaccaaaaaaaaaaaaacataaccaaagaaaaatgcatcacacaaatcaaaacgtatttattagcaacaaccaaatatcttaatattttttataagttaccaataaataccagctttcccataatacttaaaaaccctaaccttaaaaactcatttattagagcatttttgattttgtgctattacctactacccttggcttactactaacaacatcacacacaactcaaactcacagaagctcatctataaacgatttccctttaaatttctccattttgaatcccattttctccatcctcaaccgttctgcttcgatctcaaccatctgagcccgcgtctcctcaatccgccgcttcacttccaccacttccttctccatcctaaccaaatccgtttcttgagcctcaagctcttctctcttagccttcactaaaccatcatgcctctctttctcattttctacatcttcttgagactgcgcaaactcttcaagaacagaacgtagccaagctacttcaatgttcacagactccaagtctttgagaaccgcaagcatctctttgaccttgactttgctcaactgccctaccggggttgacctaagttcctgcatcagtgagcataaacactcgaggtaacgtgatcgcattgaatccgattccagcttacagttttgagcaatgtctccgtgcttttcgatgacagcacttagtatagtggatgaacccgatctgactcggtatttcccgacagagacaaaagtgtcagacattactgattcgagatcgagctctacaccaatctcattgttgttttcgtcatcatcatcagaaaaatcatcattgctctcttttccaggcgatcttggaaggcttaggaaactaaagagtctagtttcgccgccttctccaatcttcccattgtgttcttgtattcccggtttaggtgataccactttgctttgatcaaccttcataagatacaagaatcttgatgtttacaaatatggtaaagatatggtggtcgaaatcatggaagagagtaaaggatgagataccaaattgtttgatgaaaggggaatggtttgagaaggtttcttctctggtttatggttgaagaaatcatccggatcaccggatgatgaagaagtgaaagaatttttcgtttcagaaacaatcttcttcttcacggaagcaggtggagctacagaatgatgaacctttggggaattaccatttgcaaaaccgcctctgccgttttgataaggccttgcggatagcggtgtaggcggttgtgaattcgactccttctttttcctaccgaaactccctgagaagctaagaagccttgaacctgtaacataacagaacaagaatcagaatccataaaggaaaagtttttaaaatggcaaaatcaaaagcagaaaaaagtactttgcttcttagtgttcttcttgacatggccttgagcaattttctctaaacaagctgaagcacattcatggaaaggattatccgcatatacgcaatctggatgagcttttctattgaaatccatagctttttgatgaatggaacaactgcaacaaaatcaagataactaatcagctcaaagaagacaaactcaaagaacaacacaagaacttcaaatttgtggtgtcaaaggactgaacatatcacattaagggtaagtaagtggtcaaacctttacaccttaatttcaacaaatagttcaaaaagattagacactaaaaacttataatatacaacaacctcccaacgaaattggattccattcatatttcaccaaccctttatatgatgaaagaaaaaaagtaaagagggagattgtgagaagcagagagagattcaccaaaacatatccataaagaaatttcttacgagtaatagtgaaattgatccccacaaaaccaatcaaatcataaaatgtataggtatagagagatacaaaaagacgacttttggtttgtttcttctccttaatactttcatggaccgaccatgcaatttccaagtacaattttccagtgagatactaaatttcaacggtggaagcactcagttattgacttagaccagagttaaaaggtagattattttgaccggcttgttttcttgaacagacaaaaacttccaaggcccacccttgtggataatatttttttaataggttgaaatttcgttttccatgattgtcgtttgtcacaaaatttccttagaacagagcaaagaaacagagcatatgacaataaaacagtatcaatcagtttcatcatcgatcattgaattaattcttaaaacaaaagcaaacccacgattctgatcgagatcaagaatctatttgtggatcaaagaaccaaacttttaattcacacaaaaatgcaatcaatcaacaaacagagaaataaagagaaagagagagagagatataccaggagaatcggaagagggagagaaatgtgatgagcggagaaaaatgaataaaatgttgatttttatttttgtttataaggtataacagttgtgtatattataaggttcatgtgacattgtctttggtataataataatatgatgatgatgatgaattgaccaaagccaatattaccaattgaagatagagagaagcatttaattgaaaagaggttggaaacggcaatcaatcacacacctcacttatcttccagaagtggacaacaacgtgggacggttatacaaatacgagtgagatttttagagtcgacgagaatcgaaagtagaaatctgtaaccacttaaaggaaaagaaatttaagagacaaaaataaagaaagaaagttgtcagttaaaacgcgttattgcgtgtcattgtttgcatcacacgtgaggttcttaagaatctcaagttcttaaccatattgctatatctcttgtctaattttatgcatagaagttatctttttttttgctgtccattattacttaaccaataaaacttagacatctttcaattaataaatatagataatataaagttatgtttacattggatctcttagtattttttctaattgttgttgcagataagtataaatcaaatcaaatatataaatatcattacttgcgaataagtgttgataccaaattttctgataatattatggagattgcttaggtaaaacatatttttatgattcaatccgaaggaaggaaattttctacccgatttgtcaaagtgcatgcatgttgatccgataggaaacaacatttattatagaatctgataaaagcatctttttgttattaattgtgtcatctttcgtaagtcgtaattttagtattagtacaatatagtttcgaaatgcgagtagcttatccagaagcgataaatgaccatttccccaaaaatactttcatccttttttgttgggggtcagacttcatatcatgaagaagaagaagaagaaatacatagagtcaactctagagcgttggcttttaaaaagacatgaaaagattttgttaatactataatgcacattctttaaataaatcatttagcaaactactctaatacgaccattctttttcattcatgcaacatgtctttttctttccctgttgttctctaattttattttactcttcattcatttgtcttcgttggtgtttcttttttctcttttttttttccagaaaattagatatttatgaccaaatccatatttttctaataaaaaatagaaatattgtcagtatacctgcacaatcgtgtgaacgagtcacctgaaacatgataaattcttctttcccctaaagcttactcgtgtctccatcaagaaatcttccaagaaagagactagtttagtgcattgttagagaagtctcaaatcctatgactatgaatcatcaagcaagttacattgtgtaagtgtatctttctgtctttcattttttttttgtgtatacatgtacatttgaaggtataccaaaatcaagggagggatcttaaaaaaagtttgaaagcagcatagaaaagttctttatacgataaatccatagattttcttatacgaatttggtgagttcggtttaaaaaactgaacaccgaaattccagtaacacaacataatgtatatataacgatgtgttgttaattgttatcgtttttaatattactttagttttcaaaccggttttaacagggttcaatactgaaatctgttttaaaaacgggcgatttggtattttattttaattcaggggacttgttcattaattttaactaaggagaaaatatttcctttttactattgtcttatataagacctaatttgagacctaaaacctgagcttagtaaacacggtatcgttgctatggacaccgccaaagtagaaccacctcaggaaacgaagaagacgattctcacagctcaaactccattatctatgtcgatttcatcacttccagatgaaatcgttttaagtttcttagccctgatctctaaatcgtactaccgttccctctctttagtctccaaaagcttttactctcttctctcttctacagagatctacgcggcccgatcccacatcggagcgacagagccttgcccgtacgtgtgcctgtggttacccaaaaaacatcgctggttcaccctagccgagattgagggtaaactaagtttagaaccggtaaggctctcttcctcttatcctcgtactcgagtaaactcaaccactgtagctgctggtaccgaaatctacaaaatcggcggaactgtcaagggcaagcgatccagagctgtttttgtacttgattgttggactcacaggtggcgtcgtgctcctaacatgagagtgtcaagggtaggcgccaagtcttgttttttagacggaaatatatatgtaataggaggatgcagaaagagtgaggaagaatccatgaattgtggtgaagttttcgacctaaagactcagacttggaatccgctgcctagccctagtgttaattatgccgtccattcgaatcacaaagttgcagtttctggagaaaggctatacgtaatcaccaagcgtaacaactatgcatatgatccgaatgaaggaagatggctaccagacgtggggtctgtggatttacaacccataactggaccttggtccggcggtatagaaaaagttatgaaacctataactggacgaccttggtgcgttataggaaatataatgtttgctgatcatgtgtgcaggaagtacacgtggtatagctcaagtcatcgagcgtggcaaagagttatgggtttggatgttctatacgataagcgtggttgtggctaccgtacgattcagttagttaactatggtgggaaactgttaattatatggagcgagtggatcatgattctagacgggtattcccttattcgcagccaagagaaggaaatttggtgtgctgtgattaggttggaggagcgtatgtcttatttcggaccccagatttggggggaggttgagagctgcaatgttgttgtgcctagcgtccccaagtcttatcagctctcaagttgccaatgtgtttcggtctgaaactcatctttgctttcaacacattatttgtggttttgtttctaagattgctcactgcagtttttgttttgttttgatttcttgctatttcctttaaatcagagacaagctggcaagctgtttcataagatttttaatatcgttttctaggtgtttgatcttgctaattaagtaattttttaaagatcttttagaactttttttagttagttgtttagagatggacctcattagattgtgcttttggggttagttgactatctctgtattgatctgaatgccaacaccaaatccagctccatcctcttttctcttcccatttaaaccactctttcaaaaccacttctcttcgcattagcaagttttatctatctctatctatctctctatctatctatctccttcttaagattttttgcgattctctcttcttcattgtaagctctagccaaaaagctctcggaatttttcgtctttgaaaaaatccagagatattctttgattctctcttgtagctctaaaagcttatcaatcctcggctcctcgctataactgttagcttaaccgaatggtccggatttaaaatttctaatttagtaacagaaccatccagtcaaaccggttaaacccaaattttttaaaacagggtatactatatactattttattgttttgatcaggtctttctttttgaacaagataggttaaaaaggtctttctttttgaacaaggaaaacaatcttcatttctttacatgtatgttttgaagacctaaaaaacctagtaattactatatctcgttgctatggacgccaaagtagaaccgcagcagaaaaaggaaactatgatatctccgtcatctccatcgttttcattacttccaaattaactcattctaaaatgcctaccccgaatgtcgaaaagttactaccgttccctctctttagtctccaagagcttctactatctcctcacttctccggacatttacgcttttccaccccaaatcagaaccacataggtttgactctacatatgccttaaatcacccacttgtcaccatagttggatcactcttgatcaaaccctaatcagtaacggcgacgaaattaaggatgagttaagtttagaaaccgtaaagcttatgtacattttcgataaatgtaaaacaagtgttaaaaaaataaattatgtttaaaccatattaaataagtgtcaaataaaggatgggtttggatgatgtaaatagtttacacaaaatttaaaaatttaacacttatctaaaaaaacctttaaaattttaatagtaatataaaaatataagttttaaaacattttctaatccaagaaacaagtgttaaaaatttaaataatgtgtaaaccatattaaacctagaacacttcttgttgtttggatgatgtatccaattagtttacacaaaatttaaaaatttatctcttatctaagaaaaccttcaaagtttaatggtaatataaaaataaaagttttaaaccctttaaaaacaaaaaaaacaagtgttaaaaatttaaataatgtgtaagccatatattgaacctagaaaacgtcttaggggtttggatgatgtattcaattagtttacacaaaatttaaaaatttaactcttatccaaaaaaaaccttcaaagtttaatagtaatataaaaataaaagttttaaaccctttaaaaaagaaaaaaagaaatgttaaaaatttaaataatgtgtaaaccatatattgaacctagaacacttcttagaggtttggatgatgtatccaattagtttacacaaaatttaaaaatttaacttttgtccaaaaaaaacctttcaaagtttaatagtaatataaaaataaaacttttaatcccttaaaaaaaagaaaaccaaagtgttaaaaactaaaataatgtaaacctaaaaataaaaagtttctccaaaatagtatttgaaaataataataaaaacctaaaaatttaaatagtaatattaatataaattttgttttaaaaaaaattaggaaaacacaaacctagggttgtggtgatgatgatcgatgaaacacaaattcgtcttcttcctccggaggcgactcgtactctaaaaccatcaaacaacgaatctgctaactgatcgtcaatttcaccatcagtctcttcgccatcgtcttcctcgcatccttctccgtgatcgccgtcgaagaatcctccggtgaaagcgtttcggtggcaagatcttggatcgtgtgaaataagggagacataacttgaactcgattgatagaagatgttgtcacgagagatcgaaagcacatctgtgatctgtcgcaaagctttgatcgagacgagaaatatttgcaggtcttcaaaaggaaagaaggagacaaagatgaaagatgtttttttttttggtttttgattgatatcgaagaaacgaaatttataagcaacggctccattgaaaataaggaaattttgctcttgttacattaccgttacaacgtatcatatctttcttactgcgtaacaatatttaccaagggtaatttatttgatttttttttttttttaatgttatgcgaagaaaagaaaattgatgagggtatattataaccgttacaagaatcggattgatcagtctctcttaaaagaaaggatggtcaagatcaacttcgttagcatgagacgctccacatggatcatatttcagtaaacgatacaacaaaccatctgcaaatcttttttttacagccttaaaatactctctccaaggttgcctccttcaggccaaagaagcctatacccttttctggatgagaaaattgccggtgaagctaccaaggattgcaatacaagactgaaattttctacattctcagcttttttttttttttttttgttctgtttttataaatattgttactctgcttttcctctgtttttctttgagggttttagcattaataactttagttgctaaaacatgttttcttctttttacattagtctgacaacatacatatacctactttagccacaatctgtgttttcaccagtaatttccacacgagcagcgaccattggagaagtgatgaaaaatcttggaatctcccacaacgatctctcttctcgtcaatctcgaagctttttccaagaactcgtgacattttctgcagattctcgtgttattcctcaccgtaactcttcttcccgtttccgtagagatcaatccaaaacacgtggcgagccttaccgaatgtcttcttggtgaattgcttctgctcttaactagagtctctggtctcaacctcgagacacagtgaacataaatgtcttcttctccaaccatcctcgagacgacatctaagacttcatagatcttgttcgtcgccacgtgggatctgtctccatttgtgaacacatgacttttgcccttcgcctcaacagtactgcgacttgatgttctggatatgcctttgctctccatgagaagcttaatcctatttacatcttcccatcttccagcttctgcatacatgttcaaaagcaagacataacatcccgtgttatcgtgttccatcttaaatatctgttctgccgcaaattcagctatggttatgtccttgtggtttctgcttgcgtttaacaacgatccccaaatcctagctgttggcacaaatggcatttcttcaaggaatctcttggctgcgctgaagtttcctgtacggccaatgagatccagcatgcacccataatgctctattccaggatctatcccgtattctcttttcatcgactcgaaatattcccatccttcatcaaccataccagaaatgctacatgctgctaatagtgaagcaaaggtgctcttgtttggatttactctagaagcaatcatctcagagaataaccaaaccgaaattctcccaaaaccatgtactgcatatgccatgatgatgctgttccatgaaacaacatcctttaacaagatgtggttgaaacattttcttgcatcctcaaggtcaccacacatggcatacatgtgaacaagtgaattcaagatgatggtgtttgaccagtatctagacttaacaatataagcatggatttctctaccttcactcaaggatagagattctgcataagctggtagaatactagcaattgttgtggaatcaggtacaagcgatgaatcccagagctcttgaaatagctccaaggctgaatagttcttcccgttctgcacataggcagcaataatcgagttccatgagatcacattcttttcagccattcgatcaaatataacctcagctgattttaactgcccacattctccatacatatcaatcagagcagtttccaataccatatggggaagaaagcctctcctcatagcatacccgtgaatcgttctaccctctaagatcgcagaagcaggaagcagattaatcgatgtgataacatctggctgcaacccattttgctctgacattttctgaaagcagaggaaagcatcagtgactcggccatttctagcataacaccctatcataacgttccaagctacgatgttcctctggatcataccgttaaatatcctctccgcataactcacttcaccatatttactgtacatgtcaagaattgatgtcattaccataacatcaccagtttcaatcctacttcgaacagcgtggcaatgtatctcttttcccatttttggactatacacatgagaacaagcaccaagagcactcatggtactgaacctgtccggtttaaacccacatttcagcatttctttaaacagcatcaacgagctaaagccatctccaagcgcaagatatccagaaatcatggaattccacgaaacaatgtctctctcaggcatttcttcgaacactttctctgcatcccaagcacacccaagcttcatgtataaagatataagagaattacagacgtaaacatctgaaacaaacccaagcttaatcaccatcgcatgaatcttcttcccttcttccaatgaggaaattcccgcaaccgatttaatcacgaaaggataagtaaaggtatcagctttgacccctgcaaacaccattctgctataaaattgaactgcttcaatgtacaacccacagctagtgaaacctttaatcatcacattccacagaaaagcatcagctttgttcatttcatcgaacagttggagtgcatcctccataagacgggaatcagcgaaaccacgtaaagccctagtcagcgcaggatcattgacctgcttagttaccttgtatcggtctcgaagtactagccgtgctggtttcgaaattcccgagtcgaattcgagatttcgattcccatttcgcttccccgtcgtctggtgattctcagaagaaacacacttgcacgcatcggaattgtagatacggtagcattgagacagcagagtcgcagccatggattccggcgaattttcaccggaaaactgaaagaattcaagcaaatttgtctttcgtcgtcgtcttttgcatcttcattttcccgcggaaaattgtctacaatgacgtaattaaccctattatttttctctgtgttcttaaaagaagataaattccgaattactacaaattcgccatttttaatgtctatgaaccttaaaagtatatgatttatgcaacgaattatgatgatgaacgtgtatgtataattacaagaacatataatgttgagactttattgaacaatgaaaaaccatgtggtaaatcaaaatacaaaaaaggttttaaagggactgaaaaatatttacaaattcttccagatgagtgttttctcttaagagaagaagtcttcatggctattaccatcatcatcatcagttgcattttcatcgtcgctctgatcattgaaggtgaggataagatcaagaagttctcttccagtggctgaagaagattctccttctctctctggactactactgcttcggttttgcagcgagaagagttgcgccaatagttcatgcggtgaagagacacgatacatccatcccctaggcgttcgcttgcgctggaacacacaaatttcaaacaatattcaatcatcatcatcaacatcatcatcttgatgactgccactaatactatcaacattcgtctcactaccaccatcaccattattatccatattgttgttatcaatttcaataaaacattcatcatcactatccatgtcatcaacatcatcatcatcactatccatgtcatcatcagaatcattatcatctagatctactccactgctataatctgaatcatcatcattatcctcagcatcatcatcaattgattcatcttccccctcgttcccatcaataccaatatccataccattaccaaataattcgtcgtcataatcatggaagctaagaaacgataaccaaggaatgcgaaaccgactcggtaactggaaatattttcaaacaaagcagcagatcagtttaacaatccacttctacatgcatgaaaaactctattcagcttaacctatatatagtagaatatgggtctagctttacgctttaatactttaagtgaggtggttctatcaggtcagtgacaagcaatagcatactatggccacttcaaaagtgaaaataaatacaaacttccccagaacaaggagacatgaaatttcctagaaacagatttggttatgcaagtattaaaaagaaatcctatttctcaatcatagagacaaccacagggtactgcaccttattggtttcattaattagagaaggttctagcacgaaggaaaataaactaaaacaatcaaatgctagttaatggaacagttaagcataccagttcgatgttttcaggtaacgtagctctctcagctgcctttgacgtccacaccttaatgtcactttcaattccactgctagcaagcacaggaatatgtggatgaggctcaatacagttaactacatgcctatctgcttccataacacggataagctccccaccctttttcctccaaataaatatcctcccacagtctgacccactaaccacatattcagaccgaggtccaaaaaagttcacacccttaactgtctcacagttcttgtgccccttataaaccaaagaaactgagtgttcgttctcatcttttggggaagaagatgattctgattttgatacaggactcttggatatcggggaggatgggatagggttagaccctaatcccataccgggtgtgaagagatagatgaactcatcattgtatgaaacaagaagctcgctttgctctgagaaagccaaccccgttattccaacatcttcattgccaataagatgtggaggacaaaagtgatctgcagctcgggtaaaaccatttaaaccctcaccctgaaatctacggatatcataaagacgagcgtactcttccattcccccaacagcaaagaggttagaatttctcgggtcgatcgcaatcgcatttagctggatggcgtccatgttcctcctcctaggatcaactgatcggcaagtgaaaagttctgtaggggcttcagtcctcagatcaaactgaaaatgggcaacaatccaatgtctttaatcaaattataaggatactaaagtagatatcaaaacagtgatgcagcttactactcacacgttgtactaatccatcttcaccacatgtgtaaaatatatgtgggtttcctggctctatacatagtttatgagctcgtccttgatgcaatcccaagaaagacgtctccactttatcaccctcaagaatacttgcacgccgaacctaaagatgtttggagatttaatctaagtaaagtgtgacactaacagaaaacaacagagagtttcttaaagcaactcaaaggattttaccattccatcagcagcacaggttactatcgttcgatcatcagagaaaggcataaactttgcttgaaaaacgttattagcgtgtcctgaatggaaggaaagcttcacattcccaagttgccaatcccaaagaacgacacgccgatcatcggaaccagatatcagaacatctccttcggcattgaaactcacggtgtttacacaccctttgtgcttctctagcttcttgtatatctctaaacgcagaaccaaattctacatatacagaaccaatataagaattgtgaatcataacaataattagtcaattgaacgatacgactaaatccaccaatgagactcatagaagaaccacaaatttcgaaactttcgaatccaatagagaaaacacaaacctcggaggcggagaagcgattggagaaattacgagaggagattccaccgacctctcgtcgccaaaaatcaacaacagggtgatgtagtccattaaagtttgatcgacctctcctcgctttctcactcatcttcctatgaaataaaatttataataggagaaagtttttcacggtaatagaccagagagaagattctctaattgctctgtatctcgccgtgaaattactacttcagaagtcccacagagagaagacgaagaagcgtagtgtgtatttgtaatgcgtaactgcgtaagcccatcgccgggagagagaagattgtttggcccatttaaaaggtgacgacgcgtgttaacatctaattagcattgggctttttgggcttcttatgaatcatcatcaccataatgggctaaaagttcatgaagtaaaaatgggaatttatcaaaagaaatgtgaaaattcaaataaacaagccttgatttaatttatcacgtaccattaaaccaagaatcacaaacttattgaggtttttctcaaaggaaaatttggtttagctcttcctcggttatgattcatttttcgtatatatgatccttttaagatcgatatgcgatgataagagactgaacatcatcaaagtctctaacctcatatcgagcaaagccagcttctgtaagaacaaagtcccattctttcaaagttcgttctttgcctgtgcttgtgtgaaccatcatcaccatgtcaagctgcaatctcacgtgctctaacttgtcatctctttcttccgctatcatcgtgtttttcttctctccgataacacactccactatcaacactttgccgatatttggtagaacagcttctttgcaattcttcaatatctttatgcaatctttgtctccccaatcgtgtaacacccactgcacccattcaagtatcacattttacgtattagaccacttacgtcaagtcctgaaatgactttatgagcatttctccatgtttttagtagtggttgctttatttcttgggtacttgatagtggttgtacacattaatttctatcaattgattcgctactttggtgtcgtatctaaattattcatgtttttttttcttgcaagctggtaggaaataaaagagaactgagatttgaacatccaacattttcaatgttttgttatacatccaaatcatttttcgtacgatactttattcatgttttttatgtgtgtgaaatatcataattattttaaagagtaattttatcgagtagagtctcgtatcagtttgtttttgaacactaaatgaaagttgtaaaaaagaaatacgctaaaacaatttcttcttaattttaatagttaaatcaaaagaagataagattatggaaatagatttaaccttgatgataacagcgtcgcttgccggaatagaatcaaacatatcgccctcaacattctcaacaccgtccaagacttgagcaacttcaataacatgaggaaggtcaaagttaaatcctttgatccaaggaaactcctttacaagtattcccatcgtctctccggtacctcctcctacgtcaaccaccgtagccacgccgtcaaacaagccttgacaagctccagctacacgtggcaccacgcgccttgcatcacaagccatggcctcgttgatcagctggctgtggcacagattatcctgtgcgaacgcccacaagtccttaccatgcactgcatcaaacggcggtggagttgaaacattgaccggcgaagaaacgactgagctcagcttcaaccatggagcaagcatctcgggacttgtttccaagagaagcaaaggagcttccgactttcacgttttgtgatcatcatacggcgagagagtggcgtgttagtgtagccagtggctaaaccatcttttgtggggacttctttgaagagtccttggtgcacaagaaaccgcattatacggcggagatgtgaaggagaagcagagacggcagaggagagttcggatagtgtcacgggctgtgacgaaggatggttttcaatggcttctggtattttgagatcaatggcacactttgcagctgcaatatctgcaaacccaaaaacatatctccatatgtctaaagaagctttcgcttcttcatctaataaattccttttactttcttccattttgttaagtaaattaaaaggcaggttatttggggtttgaggaattaggtttcttttatagttatttaaatttgggggcacataagtaatatactaatattgatcttacacagaatagtaattcaagaattcaaacttagttgatcactgtatttctcaagttttttttaaaaaaaatttttgtttggatttgctaaaaacattggtaagttagccattactgaatgattatgagttaaaagtagacctagtcaaattagactttaaaccttgcaacacctcttaataacaatactgcccgcaaccgcaagccattaatctcaagctgtgtcaacaaacgaacacatatcagctacgctgtcaaattgtctcggacacgtttatatatgaactttagagacatgtcatgtgcgcttcaaaagaatcctaatgcagagtgtatagtagcgtagtgtaactgtgtaacagtgtaaggtgtacgcgcgcgccgaaaaagggagaggcgattcttggttcagtaagaaggtaacatgtgtaagttaccctcattagtaatgggcttttgggcttcattatgaactttttgagagattgaatctagttgaaaccaaatcaaaattttgtatcgctgggaaatgtaatgatttggattggagttggacctcttctttacgctattaaggtcctgtttgtttttccatccagatggatcatatagatagagatgaaaaatgatatttgtttttgacaaattaacagctcatttggatgattcatttggatgttccatctgaatgactttgtaaatttaagctaatttgtgaaattcatttggatggacttggtagaaccatttggatggagatgatttagttcaaaaaacaaatgacaaatataccctcttttaataatattatttttaatagatttcttatttaatattttttaaattacctattgtacaaaaaaaactctaaaaattgtaaaatcactaactattattttacgtcaaaattgtaaattcgtttttctcgccaaaactgcaaaatcatgttttccgtcaaagccgcaaaatcatgttttcccgccaaaaccgcaaaaccatattttcctgtcaaaacgttaaaatcatatttcccacaaaaccgcaaaatcatattttcccgccaaaaccgtaaaatcatattttctcgccaaaaccgtaaaatcatattttctcgccaaaaccgtaaaatcatatttttttccgctcaaaccgtaaaatcatattttcccaccaaaaccgtaaaatcatattttcccgccaaaaccgtaaaatcatattttcccgcctaaactgtaaaatcatatttttccgccaaaacgttaaaatcatattttcccgccaaaccgcaaaaccatatttttccgccaaaacgttaaaatcatattttcccgccaaaaccgcaaaataatatttttcctgccaaaaccgtaaaatcatatttttcccgccaaacccgtaaaatcatatttttctgccaaaactacaaagtatattttccaccaaccgcaaatcatattttttatgttaaaataataatttatttcgttgtaaatgtattttacagcaataattaaattaatataactaaaattaaagattaaaaatgatatatttggtaatgatgttaaatatttgtcatttgttaaaattataacatgggtatttttagtcatttttattagaatgagaatgtagataaattaaaaaataatcaagcaaagaaatattcatttaaatacattatttagataaaataccaaatgatcaaacaaacatcattcacatgaatcattcacatgaatcattcaaatagatcatttggatgtaaatgtcaaatgatcaaataaacatggcttagcatgtttttatcaagtctttatctccccaatcgtataaaccccactgccactctcatcgtaaccacgtaatatttgggtctattcgttggaccacttgtttatgtttgaaagtatgattgaagcatttaagactttaagaatatttcttgatatttatagtttctttttatatcaatgattatacctttccactaaatcaagattttacaagcaaatttacataattttgaaaacttagcaagtttatttttaatttgttttcatgttcataatgtaattgtaagatttgacattgtataaggttatctatcttatatagcctataacaattaaaaaagtaaattagaggtgccactcacaaggaaattaatgataaaaaaatgtgaaaaatacaaataaaaaacaactctgctgatactgaaacaagccttacttattatcacacaacacaattattcacccacacgtcgttctgtataaaaacaccaaatcaacaatcactaatttattgagttttcctcaaaggaaagatatatctttcatgtcctcctcttaagaccgatacgcgattataagactctgaacatcatcaatgtccctaacctcatatcgagcaaagccagcttctttaagaacaaagtcccattctttcaaagtccgttctttgcctgtgcttgtgtgagccatcatcaccatatcaagcatcaatctcacgtgctctaacttttcatctcgttcgtccactatcatcgtctttttattctctccgatcaccgattccactatcaacacttttccgatatttggagggaccgcttctttgcaattcttcaatatctttatgcaatctttgtctccccaatcgtgtaacacccactgcgccattcattttttacattttttgtattagcaaaacaaatccttaaagtgagattctgttcaattttccttgtttttaatatattaaagatctctcttatgtgtactgtattggttaataatatctggggaaattagtagtggttgctttatttatttgatacttgatagtgattgttaacttgctctcagttgattcgctcgctactttaatatgtcatatctaaactattcatgtttaatgttttaatggaagagggtagaaaataaatactgaagtcaacatccaaatattttcaattccttttgtctgtacaaaatttttaaaaagtcggattttagaaacagtaattaagctcgacaattattgacaaaaacaaaaatgtttttacggcaacaaatcaacttaattagaattaagaaaaaaaagttagtttataacattaattcatttttttcttgtcttttatgtgaaatttgattttgaacacgaattaaagttgtaagaaagaataaaactagatttttagtgatatttttttaatcttttcatttatgtaaaatttgttttgaacactaaatggaagttgtaagaagaagaaaaaaagtaatcatagtgaatattattattaatcaaaagaaaataagagtatggaaatgaatttaaccttgatgaaaatggcgtcgcaagccggaatagaatcaaacatatcgccctcaacattctcaacaccgtccaagacttcagcaacttcaatgacatgaggaagatcaaagttaaatcctttgatccaaggaaactccttcacaagcatccccatcgtctctcccgtaccacctcctacgtcaaccatcgtagtcacgccatcaaacaagccgtgacaagctccggctacacgtggcaccacgcgccttgcatcacaagccatggcctcattgatcatatcgctgaggaagggattatcctgcgcgaacgaccacacgtccttaccgtgcactgcatcaaacggtggtggagttgaaccgttgaccggcgaagaaacgactgagctaagtctcaaccatggagcgagcatctcgggagttgtttcgaagagaacaaaaggagccagcgattttccatcacgtcttgtgatcatcaaacggcgagagagtggcgtattaacgtagcctgtagctaaaccatcttttgtggggatttctttaaagattccttggtgtacaagaaacctcattatacggcggagatgcgagggagaggcggagacggcggaggagagttcggctagtgttacgggctgtgaagaaggatggttttcaatggcttctggtattttaagatcaatggcacactttgcagctgctatatctgcaaacccaaagacatacttccatatgtctagagaagctttcgcttcttcatctaatacttttcttttattgtcttccattttgtttctatcaaggaatttgcttagttgatctgaagacatggtgaattagagttgaggaattaggttttttttatagcgatcggaaaatgggggcacaatagtaatttggttttataaagacacagtagtaaatttctgaaccggactgaacccaacatgttcaatgaatttagtgtttcaataaaaaaatattgttccgacatcaatatatatgacatttaagaattcgattcaatattttttttcataagatagagttcagaccacctggtattttgttagtttactgtcttttatttttatttttttgtgaaggtttacgactgtcgaccgccgaatactactatagatatatatatatacatatgaattatttgtctttggatttccaaaacagatccattaataaataatattgatttattttgtgtggactccaatcagatttagtctcaagctagtaacaataatactagtcgagacaaaaggcatcgacaagcttgcttcggtgtttttggccaaccaactttgatccatcattccgtcttgtatattacatgaaacttaggagtaatgctttttcaaaaataaaaacaaaaacttaggagtaatgtctatgagttaaattctaccgaatatagacttaaatcttcccttataaaaaaatgcattctcaagctctgtcaaccaaacgaatacatatcaacgtagctgtcaaatgtctcggacatgtgtcatttgtatattaaaaaaaatcatcatgcagaatgacttctagtatacacgtacacatgtacatcatggatgatgtttttattgaaagttgataaactacactgactatgttttcagttcaattagctagccttgcttcgaatatatactttggtgtagtatcatcattaatttgtatatagttttataatttttgattatggagcctgtgcgtgtcttggtttccttcgatatattaatggtagtgccaaaataatgtttaatgtaattttgccaagccagaaaattacagatccacaactagctagtgtggggttgttaataagacaacaaattttttaaccgtgtttactgtcactatagataggcatgtacgctagttaagtgaagtcacactgattacgaaaggatgattagattatactatatgatatatcatgcattaatgtaattaaaaaacttgcgatttcattcacgacgctttgtaagagaggatttctttcaatatattaatagaaagctttaaaaatggaagtaatgaaattgcgttaatctcgtgtgttctgtggacgtcaaagattttttaaaataaagattacactccgtgagtgtcgctaatctcgtgtactattactttttacagtgtctcttttctcacattttatatggtaataacaaaaaaaaggcagtaagatacaagatacaagattatagttgacgtcaatagtaaaacagaaaacataggcaatagttagaaaaaaaattaaaaaaattcaaggaggtttatcagtttgtgagttttaacagatatgtgtcaagttggaaaaacaaaagttcaaatatgagggtgaaaattgttatttcgaacgcatttctaaataatagttaaaatttacatatatcattttaattccatttttttagctttgtaatattcatttttttaataaaaatcgaaaactttcaaggattttccaaatgaccaaatcaatgaaataatacgtagtcaataaattcctctaaacatgaaaagtaaaagaggttgcttattgggatggcctctttgatatatgtaaacacaaaaaatgttgaatcagagcatggacggcataaacacacataacctacacatctgatcacttgaccttgatctgaggtcctattttaaacatgttaaaaacaaggttggatttttcgaaaaactttgcaaagagttacgcacacaaaagttgaaagttctggtgtgacatctattctcggtgggaaatatttccaaaaacaccagtacaatattttgtctgagccattttgtgcagggaccatgatcatactcgattattaattatgtctcttgctttcattgaatatgatattttttctcataaatttgttgttgtcaaccaaactgttcatgtagagtggtttgccctttacaaacacatttaagtcttcacatcttcggacctattcctgaaattgttttccatcaaatattattttcttatatgtctttaatttcaacaccatcacatcttccgttagtcaaaccagataattaaaaggacataagttatttaagaaagctttaaaaattttccgttgcttatatgttataactatttttgataaagacaaaaaatatgttataacttataaacacttaagtactctaattaattacataatttaatacagttttgtttatattttattttatcctataaattctaaactgttttccctacccaaaccatccaaatatcaaagcaaatagaagtcaaagatagatgggaaacaattcaagagctattttctctttattcttggttgtagccttatgtgctgcaattttaatcacccccggaatagctcatgatgaacaaccaccgccccgctcacaatttccaccggattttcctattgatgtggaaaaatgttgggcatcacttttcaatactcagggatgcgtattcgaacttttaaagtcagttttttctggtcagtttggaaatgttggagttgcatgttgcaaagcattgtcgaccatagatgctaactgttggcctcatatgttcccgcttaacccgttctttccacctctgcttaaggacaactgtgcgcacatcgtccccaattctccctcaaagtgaaagcgggaatcaagtgacttgatgctttataatatagtcgagttagtttagtaatctaaagaaattctcctatatatgttccaagtgccttatatatgaataaaggaaattctcctatatatgttccaagtgccttatatatcctttaatttactctattctgtctttgtttacaaatatatatggaaataaaagatataataacttagttagcaacattcaagagagcatacagtaaattagctgaagtatgtagattagttggtggaaatggtgaaataaatgaagatcttttgaaggtctctgtcatacacaatcaagacgatgttttatgatcgcagttgattggaaaaggacttgtaacaaccaaacctatatgtatatccctggacatttcatttgtacacttaccaaaacttgaccaacccactacttgaatccgaatatatccagttggtaaaccgagtccgagaaccggaccagaatcaaaaaccaaaatcttaaaccgaatatatcaaattttaaaaaaacaaaattattttcaaagtgaaacaacgactttaatattagacttgaaggcacgacattaactcgaggttgattttaagaaattaattcgaaaaatattttcttcaaattggaatgcttatttgactttgcattttccctttaagacaaaccaacaaagaaataacgtttccttcaaacaatttataaaaacatagaccgtttcaatcgaacattttgtcacctcccacatttgacctaatatcacaaaacttaaggtatgtaattctgtatgatataatttgcaattgagatatttcataaaaatgatatgttaattatcgcgtattttataatggtaaaaataataataataacaccagtgaatgtgtcatatttcgcgatcatatagcttttaaaattagtgctgagtatatagttacttgtagcttttgatcgattggccatctattcttcagtttatgtttgattgcagttttcttgattacgatattcttttttcttggtcaacatcacccgttactctcaatagtaaattctttcgtttcttgcactgatttcccatttcattttcccaacttctaaaatagagatcataaccaaaacattacaaaatttccaaatcaaaatcaaaagcttaatttattgagaaggagatgatgacgtggccggctagatcatcgccgcaaaacacgaggaagccagtttacgtcgtgcatagcccaccgaacacagacgtagacaagatatcgaccggttcaggttttagcccattcgggtcaccccttaacgatcagggtcaggtcagcaactttcaacatcactcggtggccgagtcatcttcgtatccacgatcgtcaggaccattgagaaacgagtacagcagtgtccaagtgcatgatcttgaccgtcgaactcatgaagatgaagattacgatgaaatggacggtccggatgagaagaggagaaggataacgaggttttactcgtgcttgttgtttacgttggtgttggccttcactctcttctgtctcattttgtggggagtttccaaatctttcgcacctattgccactttgaaggtaattgatagatttgatcgcttggaacgtgaaaattttacatttatttctgttttcaaaatttaatttttatgaagtataaaaagaaaactagtttcagttcagattgtgtgttagctattaaattcataatttaccaaacaagaaacaatatttattggtgacaatgacaaagattatatttagtctaaattcataaatttaattagaatattttgtggagttatgatttttttaagaaaataaaaagtatttgcaagtaaatgatatatatataaacttattgatagaggtattattgttcaacacagacggttgggatatttaagaaataatgttgtgtaaaacacaaattaatcaggaaatggtattggagaacttgaatgtgcagtccgggaacgaccaatcgggagtgctcacagatatgctaactctaaattcaacggtcaggatcttatacagaaaccccgcaactttcttcactgtccacgtcacctccgctcccctccagctcagctattcccagcttatcctcgcatccggtcaggtaaaccatttcacattttattgatttaaccgggccggttcttgattcttgatgaactattttttttaacgtgtgtgactaaaatagatgggagagttctctcaacgaaggaaaagcgagagaatcattgagaccaaagtatttggggatcaaattcctctgtatggaggcgtaccggctctgtttggccaacgagctgaaccggaccaagtcgttttgcctcttaacctgacttttacgttgcgagcacgagcctatgtgctcggacgattggtcaagactacgttccactcgaatatcaaatgcagcatcactttttatggcgataaacttggcaagacacttgatctctccaagtcctgttctgatcattgatcaaaatgaacagcataatgatgatttagagaagattaaattatttcatgacttaatcggtgagatatacatgtaaagagggatggaaatgttttacttttgtatataccacatttttcattattatagtgcgtaaagatattcaatattttggaattaacaagttgaatagtgttgtcatcaactgacgattttctcttttttgagagaagtatacattaaaatatcataattacaaaatttaaatatttcaactgaacatgttagtagtcccaagtttaccacgtgtgccacaaattctaattacattctaacgattgcaaggatgctttagggtctgaagaagttagcatgcaaacccttttgagccaaacgcatagccgaggcaaccagaagcaaaacgctgagagaagcacctaggcaacccaccaaaacgttaaacaaccacattgggcttttcctttggggctttttgatagagatccacatgaaacatggatacgtaaacgtcacaagcaaggctattgctccaataagaaccgctagataaggcaagaacgggaatccaacggctatagtgaaacaaaccaagctcaaaaacacacgcaacatcatccggacaatgatggatgcaggctttttcttcttggttatgtacaccatctctatgttgtcacacgccggcattaagtttatcggatatgaacataagcaagagaagataaacgtgaggtgtatgaaacaggctgctcgcttcgagtgctcttgtgtgtaaagtttcagatagttgcccacgggacctcccgtcgccggaatctatcaaaaaaaaaaaaattctattcaaaatgtaaatgcaaacatatacacctacaaaaaatggaatagtgtttggttttgacatataccttgtctccgtatgcccaatatacagcaaacgttaatggaaacatacaaatcgcgacgagagcatgagagatcatcactgctctccacattgtcttacatgaagggttctttgaatcggaaggaagagtaccctacaaatatcaccccaaagaaaccacattattaatactaaacgaaagaagaaaatatattttgaaaacgtctaaatcatgttttaactgcgagttagtcaaaacctgtatctcaaggacgagattgttcccgcgatatactagagctatcaatccaatagcgttgaaaatgtgaacgaaacttttatccattgtagcgtacgagacactgacttgagtcctttgtgagtcactagctacaggtaaaatccatatcacggtgcaatacgcaattcccataaaagcaccgatcaacgagactccaaagagagaatttagattcggaaactgagacatgatcatcgcaatgcaactaaaaaccaagaagcattgcactgaagtaagtggcgctgtattgtcgtcagacataatttgtaacagttgttgtattgatttccctccggttataaccagaatcgtacaagctcctcctgagagatacatcacagggaatattccgagaagtttcccaagcttcacacctaattatattgtttcattacaacaacatcagaaacggtatcgtttaacgaaactgaagttcttaataaattccaaaactcaaaaaacgacaaatcaagagagaattaggatttttgttaaatagttacataccaaaagaagcaattgcgagtctcacgtatctgctgatacgaattcccggaaccgcttcgtggagttgaacaagaagccacgtcgtgtagagcttccatacaaaccctaccgttaagattatcgttccccataccctagaaaaataaataaataaaataatcaaaacggtactcaaagcagagatttcacaaatcggacaaaataaagaaactaaagagaattatgaatagagttattaccatccgagtgctgcgaaagctgcaggaagaagaatcacttggagaccaattcccgaacagagaagatgaaacgtcgccgtataaacatttccttttcttgattctgtgatcggcagccactcttctaccggaatcctaccaccatcgccgccgtttttttcgccggagattggttgtggatccgtggagggggctggtgacataaataaaggagaaccaccactttcttgtgattccaaatcaaataagtttcccaatgctatagacattgtatacaaaataaactttattttcctctaacgactccaatcgcgttatttacgtcgagccacaaattgtatggctatataaatgtttactctgctttcattggatttatatagagtaatttgttcggtggctgtgtatattgactttgaatctctttttccaaaacaaaaaaaaggaaggtatttttcttagggaattgtttttttctgtttaagtgctcaagagaatctcaatactttaacactaaacaattcatatctctaattaccatataagaaaatatattctgaacggtagaaattattagctatgacgtaagcattaatgacacgagaaagatgacgtaatcggttatgtcactttcaaatactctcgaaagcgagacccatcggtataaatcgaagtcttctaattttgttcggtagcttaaaactcaagccaggctaaaaagtaaaccaaactagtttgtgttagattgtgttcattgttcaattggactttgtttgctcttcggatgttttggtcaacgcaagggtcaactttgagctgatcttccttcatcgtctctttgtatacacgattaataagtattaatcaagtagttaattaaagatgataaacgtgcgagttgtttttgactcgacttttgttatgagcaaaaataattaaaaagtatatagagtaggcatctagtcatctaattttacaactctagttatgtgagaccaaagtttcaaaagtagcttcaagtctagtggtaagtgagaattagcttcaagtttagcttcaagccaaagtttgaaaagtaagtttagtggtaagtaagtatttgtagtttggttttagatcaatactattataaaccgaattaaaggaagaaacttgtatcagtcaagaagccctttgatacaaatctataagacttaagaaacaatctattaactagtactacattgctatctcatttggacatttggtgatttttttttcatttttttctttctaggtctggtaataagaaaaacttaaataagtgaactagtcaacgaacaccagtcaagtagtcaactaaaaatttatgaattcagttttcttaaatcgagttgatgatgaccagctaaaacattaaaatatactccatgagttttgaataatccatttttaaatccttacttcagtactctttatcttccatacaatattatctcatctcattatgcagttgcgagttgtaaatagatttttaacgagtaatggcgcaatagtgaagttaagcaaaccttctatttgaaaattacgttgtcaaaattacccaaatcactatctatgttagaacttacaaaattgaatttgaattccctttacgtattcatcgtgaatcgtgatcacatattgaagtattgaaaagtcttagcatacgattaggaaatcacccagtattgctcctttttgcgtgtttttccttttgaaaggataacgtccgaagttgttgtttggacaggacgataatgtccgaagacactatgcaagtgtttgcttttaagttttaataactaaaaagaaactaaatttattttagaaaaattataaaaagaatgtcgtttcgtcgaacgccacacaaaagctcatcaattcccactaacgaaagaaaacgaatcagacatgaaaaataatcagaagaatttgtaaacatgagtgaattttacgaatttgattgacgcaaaagatgtattcatactatttctcttttatttgtgaaacgatagaaataatgtttctccacgtggattccgtgtcgggttgaaataatgttgtccttatttaggaatgtaaaaaatataacgtaaacagttatgtcattttcaaataccaattactgtcataaccttagctttcgctctcgttgtgatatacaagtggtcatgtgtggctaagctcaagtcaaagacaaggttggtttgagttagattgtgtcaagttgaatatttttgatgaaacaagtcagatttggcattacaagattttttaggtgtcggtcgagctactagttgatggtacttttgactcagcattttctttataaaaaaaaagttgtcaaaataaaaaataataatgtagcagtactctactagaggtcgaagttccaaaagtagcaataggtaaaagtggtgctcaactgaggattggctagtaggttccgtttctttatgtgatgtataggttatatgagaaatatgatagcgaaacaattatacatattagtatcatattgcttttagtaatgtaaaaccgacataattaaagtaaaagaaaaataaatcaatcactttaaaatatacaaaagtgaacctttatattcatggtgttctgatatacacaattgcgacgactgtagtaaacaaaattgactggaatgaagcaattgacttgcaaagaccaaataaaaccgaaccaaaaccaaaacataaaataattccagttacgagcaaccaactttaaaacgtaaactaattcgagagggacatatttgctaagctaaagtgtgcaaaactgcaaatagttacatcagctaggtaacaaagacaattgacttctttaatcttagttttcaagcatgcatcggacccatcggatattcacactagatggctatattttatttcataaatccgtacaccgccaaagcaaacaatttgattttcgatagaaatcgacagcacactaactttattgcaagaaaaaagaaaaaaaaaagctaaaagagagaggttggcgcatattattacagtattatttactttttagtttgtattaattttcataaaaaatatttgtttcaccatgtctataagagctttagcattagagaaacttttagctaaacaagttctcgttcagtcaacaattattgattgtattttgcatcatattttggggaaagtagtaaaaatgggagttcagcatttctgtgatcgagtttaggcattgatccgaaaacacgtaatgaacaagtacgtgctgttctggtttagaaaagtaaactacgacgtcgttttagatacagccctaccaaagttgcaacttgcatgtacatgtaatgtgtaaccaaagttaccaaacaaactaataatggaaagctgtgcaaggagaagaaccctacttgttgacacatatacaccaagagtatgggtcatgatgtgggatccatcaaatttagtcattagtctggatcaacccgaattcgacacgtagagccaaggacgaaacatattgaatggagaaaagtggagaaaaacggttcgatgatgatgaaccattttcctagaaaagaaaagaaagatatactttaacatttttgttgtagctatactagtagctagtgtattcaaagtcacttggctgaacgagtaatcatgccctgcttcctatgctcttagagtaacggcatggtactggttgagaatcattgggactaatttgtttcaaacttacaaaccagaagttttatgtataagtgaactagtttactgtttgagggaaactagttaaaaaaattgcagtgtggatggttatttgacaatggttgtgggaaaaagccgatgaggtcggtaaaatctcgtggcaacgtaccttatatgggtcaaattcaggtaaggatggattcacatggtctattggctactactactactcatgaagccttttcttattcaagaattttgtgttttcatactcgtcgtacattcaaattataccaacgcgttttcctcttttgatagcctgtctgataacagagcaattgatgaaatagttggtcacgatctgaattttgaagttgttctcaaagtgaaagcgaatatcaacatgaaattcaatgaccatatacttacttatatatataagagcgtggcttacaaattcacctcgctaaaagccatcacaagccaagaagttttctgtttgtcccatacacatttcatgatcgagaagggggacggtgatgagatagagatggtgcgaaatcgcgagccgctctgccaacacgtttcgcatcatgttgttcacagaatcgcttaattagggtttctgattccccagcgtctttgaattgataaattagggtttcagcgtccgtataaatttcagtccggtccggtttgggtgtagaagttgtttccaggatgacaaacccttgttggtttaacttcaatttggcttttctacaatttcaatctatttggttgtgatttataatcttatcagagccgattgatttttgtccttaaaccgaataaaccggtgaattcttggtttccacgcgattgttttccattttcatgagattatgccttctaaaggcagaatccgcacgaagattttacgcaagcaatatacatataatcaaaatcagaattttaaaatttaggttagtgtttacatatgtgtgtacgtacgtaaacgtaaaggttttgtcatgagattatgactggattcttcaaataaattgatcgaaaagcaaagacagaaagaaaagttgatgcgaaacgctgttgctaaggagaaaagttgtagtgacttacctacaaaatatcttatagagtcatgcatccaagagctggaaaaagatgggcttgaaacactctcaaacttgtcactgagcctacaaaattttggacagatgtttaaatagattaagagttaatgttggagaaaacactgaaacacagagagtcttgttggtggatcatgttacaatcagcaaggagacacagttgtgaactaattaggggttaaagagtgcatggtgaaattcggaactatcacatccttgatggtgtgtgttctttgatgaataatgaattgatgaccaaatacaagaaaaataaaaatataaagtcattcacaactccaatgtctatatcaactaatattatgatctagctagtcactcgtgcaaataccattgtcttcacatgagacattgaatatattagtaaaagcttgattgactgcattaactagctctctcttaagagcagaacatgaaaagttttgaaggtaaatcttctcgacagttccttgtaacataagcaaggacacactttcatacacaacacaagggattggatctagagaatttccagagcactactgagcgtacttaaagtcattaaaaaatgttttagatatagacaacatcgaagatcaaagcttggagatgttaaactagactgaagccatgaatttagtttcagtcaaaccagagtctggctcaaaaacagagtctctgtcctcaataatgcatgtcacaaagaaacagagcaaaacatagttaaaaggtttaactaatcttcatagttctggaaaaaaggttcactgaatgttcggtaggtgatattgataatgatgagatttggtgcatcatgcttggaaaatgttgttaaagtggagctaacatttctttgacctagtcaaagttaggcattgaccagaaaaaaagaactgtatgctgttcagattttagaaaagtaaactacgtgtcgtctttgatacaatcctaccaaaggtgcaagtacatgtaatgtgtagcaaaacaaactaataatggaatgttgtgtcaggagaagaaccctacttgttgacacatatacaccaagggtatggggcattatgtgggatccatcaaatttagccatttgtgtggatcaacccgaactcgacacgttgaaccaaaggacgaaacattgaatggagaaaagtggagaaaaacggttcgatgatgatgaatgagccatcttcctagaaaaagaaaagaaaaagatatacctaacacacaaaggtcttatgacatcatcacaccaactttgaaaatgaaattaggaacgagagaattggatgttcgtttccaaagatgattaataaatgataacttctttcccctgtttgattattagaacttaagagttatttttggtttttgtcaagtttccctacctctgaatgcttttaagtttcttcttgtagtttcttttgaattttaattgatcctaaagtgttcttttctttttatttaaccataaaagcaaccactctttcaactattaaaaggaaaaggaaaaaagcttacttgataacaattggatatatggaacagtagtgtctttattgctttgttttgtctatataatttgttgtctcattgtctaagctgcatcacaaagtgaaacaagaatgagttagcttgaaccacacgttcatcttccgagaaagaaacctactttctctcaaatccacaaaagagagaaaaaaaagaaagtaaactgatttggctaagaaaatggaaatagtgaagtcgaggttcaagagggtttgtgtgttctgtggtagcagcagcggaaagagagagtgctacagtgatgccgccactgatctagctcaagagctggttcggttatgcttaaatcttaatgagagtcttgaaaacctgaaatgggtcttgatttttatctctgttttctctgttttgtgaaacaggtgacgaggagattgaatcttgtgtatggaggaggaagcattggtctcatgggtttggtctcacaagctgttcatgaagctggaggacatgtactagggtatgctcaaatctatgacctcttcactttagttttttcccctatactgctttatcattgacatagttgtgtgatttacttccattttgctctgcttttatgggctaggatcataccaaggactcttatggacaaagaggtaggcgtaaattacgttttaggtgaaatgattactttgttttcaaaaagagttgtccctgaaaagtgattctataacagataaccggagaaacatatggtgaggtaatagctgtggcggatatgcatgaaagaaaagccgaaatggcacgccactcggattgtttcattgctttaccaggtacaacataataactaactaacttagatactttgtaaagcttgaaaaatgtttgtcattcgttaggtacaaatttgaaactaggtacagtttgatctttcttccaaaacaagactcattttgtaattgactttaaaattgatctgttcttgcaaatggttatcaggtgggtatggaacactggaggagttattggaagtaatagcatgggcacaacttggaattcacgacaagcctgtaagtgaaataaaccggttcactttccactgttggaattgctctctgaatcacacactatagccaaaatataataaagtcttgatcattgtttgtttccactttgggggaaaaaaacctgcaggtgggtttgttaaatgtggatggttattacaattacctcctcactttcattgataaagccgttgatgatggctttatcaaaccatctcagcgtcacatctttgtctcagcccccaatgccaaagagcttgtccaaaaacttgaggtgggtacccaccaaaatattgctttgctttttgtcttgagattctgatgaagataaacaaagacaaaaagtttgattcggcaattgatcttttgttttttgatattcctcaggcatacaagccagtgaatgatggagtcatagctaaatctaggtgggaggttgagaagaaagtgcaacagccgcaacaacagcaacaagtagtgttctgttctaacacaagcatgcagactgagattgccctttagacttttagagggtcttatggttaagaattgatcaatgtttagggatataattatgagaaatattaaagtttgttgttttctggggtttcttttgtccctcttgaagaaaccacctgtatcaaactttcaacaaactgattccaccaaaatgcacaacctgaaaatatcagcactgaatcttggccaattctttgtagaaaatgaacacacaatctcttgtgctgtataccaaagagttcattccctcaattatgaagatcagaaagaacaacacaaaccatcacaatgatattttgtggttgcagcgggatccaactttccccaaatcttacggagcaggaataggctgttccattgggtcggagaaactctctgctctgatgaatttgatatataaatatataattgatactatattttttggtaccgaaagactttttaattgaacccgataaaatcaacttcaaaaactttaattaaaccgaacctgaaccggttttgactatgaaaccgagatatatagtggctttcgggtcccagtttctttgggtcctagtatatgagatcggattggcttccttgcgcttacatcgagtgacaaaaccaagacatattatttcctattgcgtaagaagacatagttattttttttggtatgaggtagatatttcaaatattaaagccagtaattcactttggtttactcaagtcacgtctatgacctgtctgattcacttctgtgccttttttttaatctcgcataccgatcattgttccatatttatgtgctttttgcttgaaagggtcacgaactcttttggacaaatagactactactgtttatcttaaagactgttgtttccattgtacactaccaaagagtttcaacaacttctttcttgttttctgaacttttttttttgttgttcttatatttcgaaagaaagaagaaatgaaagagcatagtcatatgaaagaatcttgtattagtatatgtatgttaacatttatatctcctatttgtacaaaaatttgtgggcacaatgacttattagatgttaaggattgaaactctgtatttgattaatgatttagagagtgactcaattccatcttcaagatcttgaatgcatgactctaagttctgcacatcctccatctgcaacgacttttcggattggaactcagaatcgatccttgtgaattcatttgcttctgcttcacatgtaactttgttttggctcatcatctttgagaccaatgaccatttcccacaagcctttgatccggacatgaagctaaacagagattcaaacagagccattgttacagcttctgctcttccaaatacaaccaaagatgcattggtggaatctttgctttggcacactttcaaactcttgattactttttggagtgatttcttgaggaactttcttgagactaagtatttcttgacctctccggatagatctccaggctttcttcgtagaatagattggatctccatgagaccttctttcatctgtgaaatcgcatccttggctatattgcacaaatctaagatcctgagagatccatcaagaagtttctcaatctgatcttgagataaagctaggttggtgacagacaagcgaatcatcttttcaagagaatcatgtaaatcttgaaggttgctaagtctctggcagatagaagatgaagaggctgaatcagaagatctcaatctggtcaattgctcatcgacatgagcggcttgagggtgttgtctcgaagggtagctgttagatcgaacatggaaggagactgccatttttgttgagcttttcttctttgttttgagaaggcttaaagagctaaaagatgtattgttctgctttcataatctctttggtcatctcatatatacacctttgagtggggagagacaagaggaatctcaaagctggctcagatttaaatcataaaatcctatgtttgtgcaatgtctccctccaaccacttatctcaatgcataaacaataagaaaaaagatatgattaagatatggattctcatataaaatgcaaaataatcttataaagaatgcaaccgcacgagcgactctgcacttacacgtctagttttcattagaaaatgcagaaccagcttggcttttgtctccttggtagcaagatccttattcctcgattttgacatgtgaactatcatactcactacaacttgtgattttgtttttattctatcatatttgttgtttcccaacacaccaacatttttcagacttattattgtaacaacgtgtgtatttcagagatgcctttataaaaatacatataaagttcagtggcctaagctgttaaacacacatagttaaatattgcaaattatgtttatccttgacatttaaacttgtttttgttcataagcttttgaacagagaagaaaacagagcaattgcaagtgcttctgcttctctgtaattacacaaccaagtgattcatcatccatgttctctttattctagaaaaccttaaacgacttgattactttttggatttttttatatatatagaagcctttgtctcttgaatacaagaaaaggccattacaagaaaagacaactacttcttctgcattcatcgcttttgcagtccattcatatatacaatcaaaactggaagacctcatgaaattttttcttattaatgactattagcgatgtttatgaatttcccccctccataaacatatgatgtgattcacattcaaaaacaaaatgcaaaatacgatttgaatataaaacaagaaatgaatgtgcacgacggattctgcaccttattggcatagtttaaggcaaatccagaaaggcttgtctccttggagttgatggtaacaacaccatgatattagtatattacagttcatgacacaactacaagagcctcataaatacttgaaacaaatcaaattttgcagtgtaggaggcagacaatatctaatacattgatgtatccacgagtggtactaatatcatattctttatggagacaagccttgctggtagtgcatgttactacaccaataagatgcagaatcgtagataatccatgtgatcatatatattgcttttgtacgttggatgatgcgttatggtgagtagttggagggagacattgcacaaacatcggtttctattattcagatttgaacaaccataagattccttccttaaacgatgtatatatgtctagaccggagagccattgaagacagaacaaacatctaagcattttcttcatctcaaaaacagagaaagaaagctcaaacaaaaaaaatggcagtctccttccatgttcgatctagcagctacccttcaaggcaacaccctcaagccgctcatgtcgatgagcaattaacccgattgagatcttctgggacagcttcttcatcttctatctgccagagacttagcaaccttcaagacttacatgattctcttgaaaagatgattcgcttatctgtcaccaaccaggctttatctcaagatcagattgagaagcttcttgatggatccatcaaaatcttggacctatgcagcatttctaaggatggtttgtcgcaaatgaaagagagtctcaaggagatccaatcgattgtaagaagaaagcgtggagatctatccgctgaggtcaagaaatacttagcctcaagaaagtttctcaagaaatcattcgaaaaagtactcaagagtttaaaaacaagccaaaacaaaaacgacgctttggctgtgtttggagaagcagaaactgtaacaattgctttgtttgaaagtctatttagcttcatgtccggatcaaaggcttgtggaaaatggtcactggtctcaaagatgatgagccaaagcaaaggtacatgtgaagctgaagcaaatgaattcacaagagtagacatggagttccaatccgaaaagtcgttacaaatggaggatgtgcagaacttagaaatatgcattcaagatcttgaagatgggattgggtcactctctaaatcattgatcaaatacagagtctctattcttaacatctaataaatcattgtacccacaaattttttgtacatatagaatacgtaaatgttaactaacacaaaactaatacaacattctttgaaacatttaagttctaccatttcttctttctttctcaacataagaactcaaaaattccaaggaacaagaattttacaacttttatggttgcaattgttacatattttattatattgataattggaaaaaattactttatggtatgaaattctagtatcgtatgcttcaatgagacaatgggtttgctactttgcttgcatgtgtcaactagtggacttgttactttcgcaccaagaaacgatttgctctgttttaattgtcatgacgatttgggcctataattaattcaggcccataaattaaacaaccccaaaatggtcaaaatcaattcatcttcttcgtgatgatcgtaatcaccaaccagtgacctaacaatggccgttcctccattattcttcctcctcacactcctctctctcccttctcttcttatctccgccggtgcttccaatgcctatccttctattcccggaaccgctcctatcgacggaggtttcaccgatgaacttaaacccattcgccgtgaagtctacgggaatggcaaaatctatgacatcagtcaccgttacactccggagatgccgtcgtgggactcatcggaaggaatcggacggttcctatggttagctgcgagtatgaagaacggatctcttgctaataactctgaaatgaagattcccacgcacactggtactcatgttgattcacctggtcacgtctatgacaagtattacgatgctggctttgatgttgactcgcttgatcttcaagtcctcaatggtatgatctacaaatccatttttttttttttcatttttgtattatctctcaatttggtgaaggatttggattttgcttgtaggtcttgcgttgttggttgatgttccaaaggataagaacattactggtaagttgcgactttgattgattagattgattgacttcatagttttgtgtgaggtagtgattagaagacagtgatgagtgctaataagaagtttgtgtttaggcgatgatcttgttctttgtattgatttgattgtgtagctgaagtgatgaaatctcttcacattccaaaaggagttagtcgtgtgcttttcagaacattgaacactgacaggtagtattgattctagaacttaccagtaataagcttttgagtttctgaaatgagtgaaaacgtttcaggcgtcttatgttcaagaaagaatttgatacaagctatgtcggattcatgaaggatggtgcgcaatggttggtagacaacacagacatcaaacttgttggtaatgaagatttctgttctccttgtttatatgaagatttgattttttgacttagaattgttggttgtgtattggtgaagtgatctctaagctgagttttggtgtatcaatgtcaaaatatagggattgattatctatcagtagctgcatatgatgatcttattccatcccacctagtattcctaaaagaccgggtaagcaagcattattgtccttaagtcttgctaactagatgaatccaaaacagtgtagatttgatattgatggttgagaaaatcataaaaccttgacaggagactatactcgtggaggggttgaagctggatggtgtgaaggcaggactctactctgtccattgcttacctctaagactggttggagcagaagggtctccaattcgttgcatcctcatcgattgattctctcccatcacaaacctgccaaatccgaaattgtccgtaatcaaaagcttgcttagcttatgaactgaatatcagtttgtgctagatttatgcaaccaatatggagattgaagtaggaagaaataagagagatgcagagaagaccaagttgatgataatgaagcaccgaagaaaaaagatttttcatttctatgtatatgtcaataaataaattaaaaattctcttaatctgtcaaggttgtactaattatcaaatagggaaaagttcataacatataaatccttgttgaaataggtttttgttttcctgatcatattcagatttggttttatgtcttcaaccgtctctaatctctataaatacagagggtaatactcgtaaccgaccggaatcttgcttgctgtctcaaccatatatcagtgtttcgagacttgtgacaaggaaaaatccaacgagtgaggctacttcgggctctgcaacatcaaacattcctaaagatgtaactttagtctatttctgtcaacatattcttaagatgtaactgtttttgttctttcaatacaacgtcctatgatttatgtcaataaaataaacaatttctatagactgcaacgagatgaattcccccattaagcttatgtatttgaaattgagctttactagctttgtgtttacttaaaataaaaggctttatattcttaagttgggaattatgatcaataatgttaattgggcttacaaagaatgagagggagaggcccatttaagttattaacaatgacaaccaataaaaagtcccacatcgattacgtgaagagcaaaagctgcgtttataaagcgttggagtgatctaagtcattgtcccttcggagacatccgataaaattggaacgatacagagaagattagcatggccctgcgatgacacgcataaatcgagaaatggtccaaattttttttgcaaaattttccacaacgattcttttggatttcaaaattatccgaaagagaatcagtacaatcttgcttactaatgccatgagtcttaacattgatttggaaagcaaaatcactccacttacaccatgttaagtctgagtttgaagagcagaagaacatgatcgatgaaaagagcaatttgtattttcgaaacatttgaccattaaaacttacaacatgtattgcatacaaacaaacattcaattgttttctctccctatggttacattacatccccaatcaaacaatccagcaacaagtttttaaccgtattttttctttctcttcttcttaaaaagaattcttgaagctcatcaaattttacaacaagatgtaacactttgtgtctcaagaatcaagatcctctgccgcctcgttgtctcttttcttcgagctgagctgcttcgttcaacatatcggctgcgtctgtgttcatgttcagcttcgctaatgccacagactgcatgtagaaagctgttggccaatccggatacacacactgcgcttgcattgcgtcgcgtagtgctgcatctggttgatcgcatagtaagtagcatagacttcgccgaccaaatacagttggagataccattgttccaacgtcaatgaactgtccacagaagcaatgtatgtaaccatatgagttctactatatccagataaacaaaatttttttggcaaatctggctttaaccataaccaaaaatccgatactaatactgagcggaaatgtaagaagaagtagccagaaatcaagacctgtgagtaacagtcgatggctgttttgaaatctttctcgcggaaagattgatcaccgcgtttccgtgcatcaagcatatctttcatttgttgagtccattcttggaatgataactgaaatccatagataaaccccaaaagttagtcaagactctttttaaagcattttagcaattgaaaccaaaactaccatttgattacctcgtttgtgccctcgtcgtctctgtaatgtgtcatgaccaaaatctgatgaatagctgtgagatccattcttgagcaggcctcacctaatggcgaaagtggtctctgtggagtcgaaggtgcctcctcttgcttctttattccaagcatcacataagatggaacctgtacccaaaatatttaacacttaaaagacgaaatttaagaactcggtcaagattgggagtttcaagatgtctagcttacgtctgatttagtttgcaatggtgcaagtgttgcaacaagatcttttgtatttggtctctctcgaggctcatattgtaaacattgagaggcgagttcgaccactacagtagcctcttctgttgagaactttccttcgaggtgtgaatccatcaacagaataatattcttgcctcgtatcatatcgagagcctagagaagaagataataccacaaatcttattcaattgatactatatgacatggacatttatcaagattaaatatgcaagaaccaagaatcactaataccttgcccataatacatattgagagctaaatctgatagacagtggttaaagaacaagagcgtggcacatatcttagctaatttcaagagagatgatgacagagcagtattatacagtttctagaaaccatggtcaatgacctactacgagagcttcacataacttaaaacaaaagcatgaccaatgagaagataatttcaccaaaacacatattagtagtagtacaattcatcctactaaaacataaagataggaacttacatggcttggagggatgtgttttccgctaagcaaatccagaaggacagttccaaagctatacgtaacactttcaggtgtcactcttcctgcaacacaaaatttatcacactgagatccatctttgcttcaagaagtttcagtgcaaaaactataaatttgagttttatgttgattgtataataatctatagagtataaacaagttgctttaccatttcttagatattcaggtggtgtataagctaaatttgtgctataacttttaccatccctactgttcttcatcaagccaaaacatgagagacgaggatcaccatcctaccatattcattccaatatacttgttaggcaccgcaacgagacagggcatctcttaaacacgaaataaataactcttgagaagaaaataataatacctcatcaaagagaaccctataagcattcaaatcatggtacaatggacgaccctcagtactacaataatccaaagcctcagctatgtaatatcctactcgcaacctcatagcccactcaattgtctgattttcccctgtgaataaccaaaacaacaacaagataagaaacaaaaattcaccttttaagacattataattcacctaaagtagtctcttttcatccatctaacataaaccataaatgcaagctcctaatatcagcaaacattactaaagttcccagctttagacaagaggcaataaaagaaggagaaaaagcatacaatggaacaaatgcttagcaagagtatcattaggcatgaactcagcaacaagaagcctctcatctccatcacaacaatatccaatcaaattcgctaatcgattatgcctcaatttccccacaccccatgcttcttcctgaaacaaattgaagaaacaaaacaaaacagatttcagaaaacaaatattcaatcaaattaaaaggttctgtttttttttttagcttaccgcaaattgtttaggctcaggccaagccatcttagtaaacttcttgacagcgatccaacgacggttctgaagtcggcctttgtagacaagatttggggctttctcaccactttctgatacgatgttgtctgagctaaagttgtttgtagctgctttaaggtcagcgaaagagaactcagagaaagatgggattcctcctcctcctcctccgccgcctacaccactagctccgccgcttccgccgttatcagccgtcgtagctccgccgtgattgttttgagatagtggttgcggctgaactccatctttcccaagtgggttatcgccggaaaacaaggattgacaacaacccatcaaactctttttccttacccaagtcggaaagtgtttctctttcgctccttgtaagagagagaaagagttgatagtggtcgaaacaaatataaaaatccaatttttatttcttcttttttcttttcaattcttctgttttgactcctgaggtaagtttctgtgacattgtctccttcttgtcaatatggtaccactaatattagattattaaaattcaaagattaacactttgattataattatgaagtcgaattatgttttattttaaaacaatggatttgaaaactgcagagccaaaaaaaaacagaagaagccaacttcttttgtatactacgatactataatacaataaattgattccgatgtccaatgatttaaaacattgtggtaccaaaagagattttggaaaatcacattattgacagctcaaattgtttgtgaatggagtgacttatcatcaaccattcctacttttgctttctcgatttttttcttatttattcaacgaacattcccatttcaacccaaagttttttgttttgtttttcttataaatattaagtacctagcaacttatttcaaaaggtaattcgtactttgtgtataaatgtaaagagaagcgtgtgaagaaaatatgaagttttagaagttgactttgtaaccttgtgatattttggatttatgtgttcttttgcattatcgcatgcacttggtttatttttctgaattattgacgtgccttctaaatagagtagaagtgaatatcaattttcttaatggatttgacagactgacatatttctttccgtttgagttctgattatcttgtttaccaaaaatgattatttctttgtgttattcctagaaataaactggaatcaaatctcttggaattaaccttattttaagaagtttactctcaaggcagaaatctttctaaaccataaaagacagtttatttgcctttggaactatgtattatttggaacctaagacaaatatggctaaatgttataaattctttaaaatatgattttgctaatttagaacctcatattagagattaccaaatttgaactagatgtagttacgcggtactttttttaataaagacggctagcctagtactacaaaacatggtcaaaatatggattaagcttccaaactttcaacggtttacttgtatatattttattaattatagatagattatgtggatataacaccaaaatcctacagaaaatacaccgtaaaattatcaaacatttgtactttcattttaatttagtttggaaacctagaaatactatttttcaacattaaaatcaattattacattatatacacattactattaaacgataagttgatatttatcttaaaataatttgattgagaaaataatataatagtatcatttaaaaaatgatcaaaggtttggaaaaaaaaaactgcaaaatcttaatgaataaactccaatgaccacccaaaaggacaataattggtatattctcaatttagatgtatggaaatgaaaagtatgcttgctatttgtaatacccatcacatatagctttggggaaaacagagctttaagctt

SEQ ID NO: 671 - DNA, 86710 bp, Arabidopsis thaliana
gaattctctgttcaataaaagtcctcagactggcttctcacttcttgccgctggctcagctgctggcatttcctctggtttgttcatctgatatttgctaatgttgttctctcttgcgtatggaactcttgattgattcgttaagaggactttgttatatgttgttacagggttcaatgcagctgtggctggatgcttctttgcagttgaatccgttttgtggccttcttcatcaactgattcatcaacttcacttccaaacacaacttctatggttattcttagtgctgttactgcttctgtggtttccgaaatcggtctcggctctgaacctgcgtttaaggttcctgactatgacttccgctctcctggaggtaatatgcattgccattcttatgctttttacgcaagggaaccagaaaccaaacttatgagagctggtcactgattttcagaacttccactctatcttttattgggcgctctgtgtggcttggtctcgttggcattatctcgatgtacatcatccatgacatctgctgttgacagtcttaacaaggatgctgggataccaaaggctgtatttcctgtaatgggtggattaagtgttggtatcatagctttggtataccctgaagtattatactggggttttcagaatgtggatattttgttggagaaacgtccatttgtgaagggtctttcagctgatcttttgcttcagctggtagcggtcaagatagctgcaaccgcatggtgtcgggcttctggacttgtcggtggatactatgctccttctctctttattggcggggcagcaggaatggcctatggaaagtttattggacttgctttggctcagaaccctgatttcaatctctctatcttggaagtggcatctccacaagcttatggtctggtactgttcttatgtggtcaatgtttcaaaattgtcttaatttcagactttcttgattggttacctatcaatactttgaacagaatattttttcgggttaactgagaatggatgctagtttttttgtagcttcattgccaatgatcctgtttgtctcattgtttaacaggttggaatggctgctacacttgcgggggtttgtcaagttcctcttacagcagtactactgctatttgaacttacacaggattatcgtatagtgttacctctactgggagctgtaggcatgtcttcatggattacatctggacaatcaaagagacaagaaactagagaaacaaaagaaactaggaaaagaaagagccaagaagctgtacagtctctgacgtcatctgatgatgaatcatcaacgaataacctttgtgaagttgaaagttctctttgccttgatgattctctcaaccaatctgaggagctgccgaagagtatttttgtttcagaagccatgcgaacaagatttgcgacagttatgatgagcacttctttggaagaggcattaactcgtatgctgatagagaaacaatcctgcgccttgattgttgatcctgacaatatctttctcggtatacttacactttcagacattcaggaattcagcaaagcaagaaaagaaggaaataatagacccaaggtacgaaattgaatagtctgaaataactatttctttgatcattaattgaagcatttctttggcttaggatatttttgttaatgacatctgttcgaggagtggaggaaaatgtaaagtgccatggactgttacacctgatatggatcttctcgctgcccaaacaatcatgaacaagcatgaactttctcatgttgcagtcgtttcaggcagcattgatgctcccagaatacaccctgttggggtcctggatagagaatgtatcactctaacacgcaggtaaacctgcatctatttcccctcggtttaactgtttgtcccaagatcaccttttcatatggattgtttttaatgaacctaactgactaacctagtcttccatatgacaagagtgtgtagagagtctgtgtaactataacttgggctgccaggtttcccacattggatgtagtagaagttaaattagttaaaaaaaattacttgcaactttttgtttgctcatcagaggaaaggagtgagtcgcaaagtccagtttgctagatttttaattttagagctttcatctgtattagagttgataccgaaaatattgacccagcaaataaggttcctcaattcatttgaaacttttcggtgtagatgctgcattggagatgatactggtttttcttaaccttttctcttgcttgacctggcagggctctagcaaccagaatgtacctcctaaattcgctgtatctgtaaatggtcttgctttgtaactcttctgagctgaccagggtgatttcaatttgtttcttctgtgaggctccgggccaatttttgttctttgtattaagagatttggggagaatgagttggctggtgcagcgtggatgttttttgtctactccatctgttggtttaaatggtgaagcccccatttctcacttaaggtgctgagcaatccaaagggaatcgaaacatggagcgtggttctgagaaaatcttcagaaattttcctgaaaccaaagatatgtgctcaggtgattcgttaccatttacacttttttcttacagattgttactgtaccttacttagtattgtctattttgtaaagtgctttctgacttatatcatattgagaaagttttgactacttaaagactaacagtgtcaacaattgtaagggtttccttgtccactattttgtatattgaagaacattgaaatatattggaatgcccttatttctggtgtgtgtgtctctctcggtgagccgcaagggcatgttgacatctaattgtatggatatttttctctaagaaaattcctagagaaaacagtagtcaggccattgtgttggttaaacaaccctcctaaaaccttttaggtaaagaagaagcaaccccgcatgggttgaatgacctacctaacctatacttacctccatcatgatatagctagtaccctctgaacatgcatggatacacatgctatataatcattcgggtgtgattccatttataccggaaaatggatcaagcaaagggaaaagtctgtgttactggtgcttcaggcttcttggcttcttggcttgtaaagaggcttctacttgaaggatatgaagttatcggaacagtcagagatccaggtctttctatccttcttgtttcctttgtcttggtccgatttggtgcctgtcagtactcagttagttttcatgttttgacaggaaatgagaagaaacttgcgcacctatggaagttggaaggggcaaaggagagactacggttggtgaaggctgatttaatggaagaaggaagttttgataacgccataatgggatgccaaggagtgttccatactgcttctccggtgcttaaacctacctctaatccagaggcatgccacgacaaacttttttttctggtcacactatgctttgtgtatctgttactagattatctattctctgactttttcttccttataatttgataggaggagattctgagaccagctatagaaggaaccctgaatgtactgcgatcatgcaggaagaatccttccctgaagcgcgtggttctcacctcatcctcttcaacagtcaggatcagagatgattttgatcccaaaatccctcttgacgaatcaatttggacgtctgtggaactctgcaagcgcttccaggtataataatttgaaaatagccttttatgttttacgaaaggacagagatcaaaatgtcttctagcttacccgaatgtgaaagagtagctattttgctaaacacaaaactcatattagctaactgtttgtgtaaatgactttcacaatttgatgcaacaaaaaaggtctggtatgccttatcaaagacattagcggaacaagctgcatggaaattctctgaagaaaatggtattgacctcgtcactgttctaccatccttcctcgttggacccagtctgcctcctgatttatgttctacagcttccgatgtcctcggattactgaaaggtactcactttctcattaatctctaagcaagatcacatgactcgtttttgggtccaatattcatctgttacagttggttataacttgtcatataacacaacaggagaaacagagaagttccaatggcatggacaaatggggtatgttcatatcgatgacgttgcacgaacccacatagtcgttttcgaacacgaagcagctcaaggcagatacatttgtagctctaacgttatcagtctagaggaactcgtttcattcctatctgctcgttacccatcactccctatccccaagaggtttgacactgaccctttaaactaaaccatctctcaaaccttgtaaaattttaaaatcatagatcatgatgatactctgtttgaaaatttcaggtttgagaaactaaataggttgcattacgactttgacacctcgaagatacagagtctcgggctcaagttcaagtcccttgaagagatgttcgatgactgcattgcctcattagtcgagcaaggctatttatctactgttcttccataactcttggactagagaatatgtgcaaataagattggtctgaaatagtagtcatgtggattcacaatgaaagaatgggattggaaaacatgaaatcaaagattacaaacgatataatctttacttgtttatgaaccaaatcataacatatttcttctctccaagttacgctttaagacgaaaatccctccgcaagaaaaatcaaatggataaagatttctcaaaacaattactgtagccagagacagggaacatactttaactgcataagaatgcatagatgatgaataagactacttatcgattagtagcctgagcgattatattacttatcgaactggcctcctcttttgcaacctccaccagttgatcctttgacaacataacagacagagactgtcatttctcaagaaaaaactactacactaatattttcatgtcgatgacttaaacatacaactcagtacctgagcggatataatcctggctactgttttcttgcttgactcttgaagctccccagcaatcaagagctcatccaatatgtaatatgcctaagaaagcaacaagaaatccagaaactgtcagcaagatataaagatgcagaggatagagaatcaagtgacgaatggcagagtccttgagtgtttgcagcatgctattaccttgtggaagttaaaaatcaaatcgagttcacacacctgaaggtcatcagataaaacaattccttatcataatttagaggttccgttaaggtaagagatagtaaaggtggaatctcagcaggtgctggtttttttggtactcacacttccaaaatagcgatcgagaatctcaacatagtgatgaatgatctcaaggacctctaactcgttatcctcctgatcaatgcacatgcagaagtagagacttgcatatcttttgtaaacaactttgtatcctctccattcaacaaaattgcagagctttggacctcgattcagaatcactccactgagttcacgtataacctatatacatagcatgtaagatgagagatgtatgctaaagcataacaaggtgtgaatgaagctcaatacataccttagatctttccttctgtgcataaggagaataccatttggtgagccttacctttccttgccggctaactagaagcacaaaatgtatctgaaaacacacaaatcaaaaacacaccattggtttcttattaggatcatcaactcaccagcttaagaaagagtccaacaaacaaaggtttcaaatttgaagccattgaactgaactaggaggatcgaaactacgaaaaatcaaacccagaagctagcattatcaaactaaagtcaccaaattttctatctgcaaagaataatttgaagagaaatatctgaaaccaccgatcaagagcagatccaagtatcaaactaatgaagaagaagcataagaacgaatcggagatgcgaaattcaaatccagggcagcattcgtaaacacagaatcgaagatcgagcattgttaccatgatttcgtaactcaagacgggacaaatctgtagtagcgaaatccagaaactgataatcgatgatcctcaacaagaaaaaaattctctttgctcaaactgtcaaacatgtcgagtgccaggggtataattgtcatttacataattaaaaacggattgcattccgggtcggatccatgcaaacggattgcattctcagctaattttgttccattattgcaattatcttcttaatcttatcgaatagaccagggcattacacattaaacgtagcaattatgtcaaaagattttgaatgaaaataattcttcaattaatcttatagaattagtttcttaggtatcaaattttttaattgttcttatacttggtgctgggtcaaacaacagaaaagtataagcaatttttttataactaagaatgaaaatataaaatgcaaatgtaaaggtaagtccataatcaaaatagacataaacaacagttttgataagacccaacagaaataactcctgactaacgtgagcagcgactaatggacacaattgtgaagttatgaacatacttaatctctcacataagcttgtttttatttaaccttggagggaaggcatattctcttgcatgcaggctttatttttattttctttgatttttgtttttctcaagtttcaatgtgttttgaagttgacatcatcatagatattagggttttagttgttctcccaaaatattctttcccttctctgcgagacagtggaagttcagttttatcacaaattagaacatgtttatatgacaataatcggaagatttagttagagccttaatgtgtgaacatcaatttacgaatataattaaagtccattttctccgtattactcacctaataattaggggggaaatgttatttaatacctgaacttacaaaaaatggccaaattaaccgtgaattcgtgaaatggccgttttatctctcaacaaaaagttgacttctattttaacctttaagtttgcgttgactcggtttaataaaccaccgttaaaaatccttctaacagcgtaattaacagccgttacagaacatccgttaaggtgatacgatgacgttttgtgctatcaacagacttcaaagtcgacgaaacctctgaaaaatctccaaatcaaaacccaaatcctaaaaatcattctctctcaaattcgatctgcttctccttccggcgttgttttagctgcatcttgtgctccctcttctccgccacaagactcagataccacattcgtttcacccccaacttcttctccaatttcatctctttctcctcgcggtggtgcttcgactccatctcccaccaaattctctgattcgtgaagcattggagatccaatcctcataacgacgccattctttctaactaatggcatttcagaaaacgaattgaagcaattagggtttcgattttgattttgggggcaggattaggtttcgatttgggtttagggtaattgattttgttttgggaatttctattctcgattttgatttctctttagcacaaaacgtcatcgtatcaccttaacggatgttctgtaacggctgttaattacgctgttagaagaatttttaacggtggtttattagcccgagtcaacgcaaacttaaaagttaaaatagaagtcaactttttgttgagagataaaacggccatttcacgagttcacggttaatttggccattttttgtaagtttaggtattaaataacatttttccctaataataacatttttcacgattaatatggtcgatttgacatttttctgtaagtttagatattaaatcacaaattaatactattttttttttatgaaacttaccaattctattcataaaaacaaacagaaaaaggaaatttaagcgttcgttttcttttttcacacaccaagttttaagagaaacaaaaaataaataaataaaacctaatattcgcatttcgcaaccgctatagctagtagcctagtagtttgaggtcaaacacgcaaacgcaacaaaaggtgtcaccaaaacgctaaaactctaaaacgcgggtctagtcgcaccgccaccacctcctccgctaccgccgctcataccgtaaatatctcccccggagaattgaaaattgttcatattcattccaagattgtagaaagcaacacctcctccaccatttccaccttggaggtttgactcacacgcctgggccccactccccgtaacctccgacgactgagacgcctccggctgctgctgctgcaccccggtggttctcggcggtggggtttcttcctcttcaatcggtaacctatcataaactgcgtttgcaaaagaagcagccatcaacactaccggtcccgaagcaattaacgaaccagccacattccctcctacaacttgtccttgacctccggctagatacaccgtcaaacctcctgctcccggtggtgcaggcggtggaagcgcagtaccggtcaaagacaaaatgtcaaaccgaccatgcagggtaatcacacctccaccagccggagccgcaggttgccgtatcgtgacgttagtgaccgcacccgtgccgcttataatgcaaacgccgcagccgcgacgagtggcgtaggtggagactgcctcggatatgtccgaaccggaggtgacttcaagaacgtgtgatctaaggacgttaggactatctctagttataatcgtcggaggtttgggtttgtttttggaacctgcaggacgaccacgtggacgacgtccggaggaagagccagaggctgtggctgagctggtggctccaccggtgggagtggtctcggcctttgcttcgtctgcttcagatctgttaagttccatgttattttgatcaggtggggttctggaatcttcaggtctctgtagatgcagttcttgccctagaagagggtgcatataactagacattgataacaaaaacaagaaactgtggtttgggtttttggatttttttggttatagctagtgagagacaaagacaaaagtcgacagaagtggtttgtcactgagagtatttcagagactgagtttgattattaataatgctacggacaaaacaagaagacgacaagagagaacaaaaccttactgaataattagagagagagaggtctacatatgtgaaagagctgggtcggtgaaatttgtctggacccagatctagatcttcatgtgaaatggaatgaaacaaaggagagaaagaagtaaagcaagagcatcacaaaacacagctctcttctaaactataataaggtacatataaatataaataatacaaatatatttgtgtatccatataataatatgttgggttggtgtagtgacttttcctcgagtgaagcaaaaaaactaaattaagatgttgacgacctaagaagggactgatggattctgcgggagacaaaagaaggattctggagaagtaaatcacggagatagagaagttaaaggagaggccttttgtgacggtgaagggatggttttgtgatggtgatatgatgattgtagatttgttttgttttctaatcttaaagcaaaaaaagaaaacaaagcgaatgtaaattgttattccaaagtcaagttacgctgtttgatttcaagaactataaccgaccaaactatctgttagtgttttttgtcggtaaataacataacgattgtcctctttttatttatttttaagttcaaactattacattttagtatttttacaaaattaagatcggaagttttaaaatactagcatttgctcttaccatgagtctatagatatataaatcatgtgtgtttaattaacatgacaagaaccaattgctgaaaaaaaactaaaaatagttttggtcattcaagatcttttattaaagatcaaaacataggagtagtagttattttcccacctaaaactttgattttagacaatgaactggaaataattttgttctctcctagttaatcatgctgatatataaactcatatggattactttcgaatattttcttttgagtggtgatgaagtgatcggacgagtaaagctcaaaaagaatttgtgtgtgtaatgagtagaggaagacaatgaatggggcttcatggctgttatttgtgaaaagagtggtggatttcacattttcacatgatgagcactttgctttcttcctatttcttttttagtttaaacttttagatttctcgagccactcaagacatggcttggctttttttattttataatgttctaatatcaaaattgctaaaactttacagagggggcgtgttttatgttacaaacaaagtaagctgaattaattttatgcacatgcttgccaataatactaattcgatttcaacgactaatggatggacatgcatcttaatatggcttcttagtttttgttacttagcgtaaagacacatttcaacagttcttagggattttcacgatgtatttaattggtttacataagaatttaaaaatttaacaattatttaaacaaaacatttaagtttttaatagtactataaaaatataagttttcatattttttttcaaaagaaagtgttaaaatttttaattatgtataaaccatattaaacttataaaaaatttaacacttataaaaaaacctttaaagttttaatagtaataataaaatataagttttaaaatattttttaataaaacagaaacaaatgttaaaaattttaaaaatgtgtaagccacctaaaacacctctgaaaagttttgatgatatatatccaactagtgtagacaacattttaaaatctagcatttatccaaaaatattttaaaactttaaaattttaaaaatttaacacttatttttacaaaattaacacttacacaaaatttattaacacttataaaaaaaatcctttaaagttttaatagtaatataaaagtataagttttaaaatattttttattaaaaggaaaacaatggttaaaaattttaataatgcgtaaactatattgaacctagaacacctcttaggggtttggatgatgtatccaattagtttacacaaaatttaaaattttaacttttatccaaaaaaaccttcaaaatttaatagtaatataaaagtataagttttaaaatattttttaataataataaaaaaggttaaaaatttaaataatatgtaaactatatattgaacctagaacacctcttaggggtttggatgatgtatccaattagtttacataaaatttaaaaatttaactcttatccaaaaataccttttaaagtttaatagtaatataaaaataaaagttttattccctttaaaaacaagaaaaatcaaagttgttaaaaattaaatgttgtaaacctgaacctaaaaataaaaagtttatccaaaatattatttgaaaataataataaaaaacttaaaagtttaaatagtaatattaatagaaaatttatttatttaaaaagaaaaaggaaattaggaaaacacaaacctagggttgtggtgatgatgatcgatgaaacacaaattcgtcttcttcctccggaggcgactcgtactctaaaaccatcaaacaacgaatctgctaactgatcgtcaatttcactatcactctcttcgccgtcgaagaatcctccggtacgtgaaagcgtttcggtggcgagatcttggatcgtgtgaaataagggagacataatttgaactcgattgatataagaagatgttgtcacgagagatcgaaagcacatcagtgatcagtcgcaaagctttgatcgagacgagaaatatttgcaggtcttgaaaaggaaagaagaagaaaaagatgaaagatggctttttgttttatgattgatcaacaaagaagaagaagaagaagaagatatgatgagggagcgtatttataagcaacggctccattgaaaataaggaaagttgctcttgttacattacataattaccgttacaacatatcatatctttattactgcgtaacaacaatatacatcaagggtaatttatttgaatctttttttttttttaatgttatgcgaagaaaaggaaattgatcaggttaagaaaaagttatattaccgttacaagaatcggattgatcagtctctcttaaaagaaaggatggtaaagatcaacttcgttagcatgagacgctccacatggatcatatttcagtaaacgataaaacaaaccatctgcaaatcttttttttacagccttaaaatactctctccaaggttgcctccttcaggccaaagaagcctatacccttttctggtaattaccattataattcatctaaaggaaggatcttgtttagttccaacgctcatcaacaaaatcaacatggataactatattatcaaaagtcttttcttttcgtgtcagtaaatttctttaaaattacgcaatgtataaatttcattttaagaaaacaacataaacatctatggccaaaatttattcgggtagacagccaaacccccaaaacaaaatgtggacgacacacagatcagttaattacttaagccacaagcaagcgactaagccaaaataggaccaatgcacgatttcaaaacattgcttaggacgtacggaacttgtggagagcaatgctcagtcctcacaagatccaccaacaaagggaagaagctggacacgtgtttcttcagagactctgcttctaatgagcacaaggcttcgagtgaagaaacaagcagtgaagttctcgccgttgcttcttctacacgatctgattccatcggaagaacccatagcaccggttttctttgttgttgttcttgttgttgtggatctgtgcatttaaggtagatcttcacgatttttgcgcattcagtgactagacgagactcgagatctagttctttggagacgtttggattgcaagtaaccatgtcttggaggaacatcatgtaggatttgtaagcctcgttctcgaagttaagtagttgaggctctgttaggttttggacagagcatgctctcttgaacttccttctaaggactgtgtcggtgtttagttgctgtgcgtgagacgcgatgcacgagaaaatgtctgccagaatatccacgtgtgatgcggacaatgagaactggtttcttctgtataaatcactcacaacctgtaaaagaaacagaggagtcaagaacagagtcattggcttaaaaagagagaaacagagaagtcaaaaacagagtccttggctaaaaagagagaaacagagaaaggagagagaggggacctcaacgatttgagacaggacatcaatgtgtttctttgttctggagacaacatacgacatgatgtgaagactgtcatcatcaagatcacctatgtttacgctttgaccagaaagtgtttcaacatcttcgatatcatccattgttctcaagactttcatgaaaccggcgaaagtcagcgacgctgcttccttgagagccaagaatatctctctccattcatcttcagaggcactacgagccaatccatcagccagatgtagcaaaacagagattccagagcctgtagagccttgaaaaggactctttatgaaccctacgatgattgacacaacgcttggaagctgagatctcacggatctgaaaaatttaacgagtagatcgacgagaagctgcaatgcaagtgttgatgtctcaacgtcccatgtagtttcttcggtgtctagagaagctgaggatggcgaatcaacactttcttcaaatagcatatcggttttacttcgtatgttgttgaaaactgggagaatgatagagctgaagattccagtccaaaagggtcttgtaaaaagatgaccatgatccatcagaatgtggaacaatacttctatggaacgctttcgaattgctggtcttggatccgagacttgcttacataaacctgaacaaataaaaatactcaaattatttaacaaaacagaggatataacttagtgtgtaaagcacataagcaatatcttgttgtaacctgtaagcagaggaatccaataggatacttgttcatcaaggtcagtaaaactctgtgtatcagaaaaatcttcctttaacgctgagatagtattgttcttgagtttctcattcaagacaagtcctccttcttcaagctttaaagcgcagaaacgaagaaattctatggtgttgaagccaatgtcaccttcaaacttgctgtttgtgaaggtgatgagacatctaatgcagtctgcgtataccgttatctctgtctcgattatgcaatgaaaatgatcccgcacaattttctcgattgtctcgaaagctaacagtacaatgttcttcctctcatcaagcgctgcagttgtaaaaacctaaacaaacaagatcattagtaaacatattcaaagatggatattgtattgagaaatgttgtgtgttacttactgtgaagacatttttccaaccagatttcacattactaactcgactaagaaccatttgagaaacacatcggactattagctctctaatctccgcggaactgcttttctgcataacaacgacgaatggtcgaagaaactcatgttggaaatggtagtttgctagctcctcacgctccaagaatttcatggaaagctgacgaagcgagtccatgacaaatattgcaacagagagattctctgacaagccaactgatacgaagaaatcagaaagaacattccatatgcgggaccaaactaatcggatccggttcatgttataatgcctgtcacagagaaagaaaacagttcatttgatcagagaatggcaaagcagagcaatgtaaaattagtataagatcatagaatgagaagttacgctgtttcgactagtttcgtgaggctaaagacacgaggatctgttggtgactgaagttctgacatggagactttacatagcgctttaacaaaagaaactatagcttcactgttcaacctttggctattagcatagacatggttcaactcaaaattgccaatttgatcaagtagattcaaatttgcaatgaaacttttgatctgctccggagtaactagtttgggaacacttttcacaagtgaagtactatcataagaacctcccctaacaacagccataacagatggattctgaaaagatccacgtttctttaaatttggaaaccctaaagctttcttgtcatctacctcagctttttttgtagggacgtaacgtttctctgatggtgatacttctccaaggagttgcaaatgttcaatgcgtgaaagacaagttaaaatatgttcccaagaaccatgtagatggttaccgtcttctatggctattgttattatcgcctgcatacaatgggacatattgtttattccatcagttggtgatatatatagaacatatttttagctaggctgagatataaaacaaaggacttactttaacagcatcaacatttttctgcttcatatctgcagcacaatgaagattagtgaacttggccatggaagttacaaaagcatctctttgagtttgcattcccataactgcagtgacatgaaccgcatatctgaagccttgtaagcaaagagaagttgctagtctatcatcactctggtcaatagtgacactgaatgcagcaagcatcggtccccaagagacctctagtatgaatctcaagatcgaaatatctgtaacagtatgataaactgacctgcagacgaataacatcgcaaaacatatttcagaatcttgcttacaaagtgagacacagagaataatatatatgacacatagaagctggtctagcaataatgcttactctgatttctctggcttagcttggaactgttcctgaatatcccttataagacgtccattggcaccatgaggtttctcatctggttgcatccaagaaaccagattgagaattccgtctaggcccaacagtttattcaagccattcacctgtttgttttgtggggctaaagtgtccgagttcatcctgatttcttctttcacaactcgatcatatagagaacctaaatactcttcaggcaagtcctttccatcgtctatccccctattgttgcggacgaagtcagctttcgtcatctaaacaaacattgaatttgaacacaaacatcagaacgattcagaccatttctgtacatgtatgtacaagatcagaaacagaggaaatgaccagatttgttacacttcatatgtcatcaaacgtgaatttcaaggcaataagttattctactcagtagatatgcttgataaatatcagaagaaaggaagcataccttatccttaaccatgttgttgtgtgcatctgtgttgagcattatcacagagtatgcaagaacataagcagtgtctgcactagtaaaagaaccagggttgcatttccagtaatgttctgcaaacttctccatgattcgatcaatcttctgtgcttctcctggtagcctaaacccacgtagaaagaaccgtattgcttcgacaaaatccttcttttcaaagttaaacgaatcaacatatgcatgcataacttttagtggaagttcatctctttcaccaagataatcaccaatcacagttccatttagccctgcggtcttcatcagaaacgaagcaacttcctcaggggagctacctattttcttggtacttatgagaaattcgacacctttcgacggcttcctattgaacagagagatacctttctgcaaatcaccaagaactatatgtcagtgaacataaaaactgatatatcataaaaaaagatttaaggacttgtaaatactggacctgcaattcaattttgtaagcccttcgttgctcaagcatagaagcatcataagcttctggattactagtatctggctgtgaatcacagtcagatatagttccttctaactcactaatctggcttgcattactgtccatagaagcataaacttgtgagcccttaggccagaccgtctcgttcactttcaactgctggtccatccaatttcccattgccttggctaagttaaccaaacacttgacagaatcattcctgaatgtactatcttgcgctggagacaacgttgttgatgatccggtgggtggtcctagagcagttttgagaagaccgttgacaatcctgcaagtatctgatggaattataagagctttaatacattacatttactcttaacgagtcatgcaacaattttgtgacagtttcttagactaatctaataatacctttcaagtatgtttgaagactccacatcgcagtcatagttcacaaagatatcgaccatcaactgcggatcttgcgacattttgtctagcaagttgagaacagtcatcttctgcaagtaactaggttgaagaacattctcaagcacgcgaagaacaatcatcggaaagaaaatgccgatttctgctttcaagactgatctaagctttgataacaagctcatgaagatagcacattgcaattgaaatattgacatgattgataccgcactgttctttagtagtgataagcataagtattgcttaacggcattgatgaagctttcattagtccgccaaacagaaccaccattgtcaataatgactttaagcaactccaaagacagagtcttacctctcaccatgatctgatcatcattgttctccttggacgaaaacctcatggacaatttacacaagttcttgaacagaagaaaagcgtcttgtctcaccttactcatgtcaccggtctcagaatcaccttctccgtttgccacgtatcctcggaaagacggtgaatccggagtcataacggtttcagtctcgggattttgcaacagaatctgaatcacatcaggaggaggaagaggacttccttgtcctgcagccatgacttcattcacaaacccttgacagaaataaacagagcttccttcattaacactcttgtccgtgaaagttaataactcgttgacgtaaatcgttttgacagaaacatcaagcgaatcttcttcagatcttgtgaagatcacaagcatcatctgagctaagacagatttagcacagatctgtgtcgtgccgctcaagccaccaaggtaaatattataacaagtcttgacaacgtgtaacaagcaatcaccacggatcaagatacatggagatctaacggcagcgagaagaactctaagaacagcgagttgaatcggttcttcggctatagcaccgactttggagacggcgttgacgagtttgaagaggattgaatcttgttttgatgattggatctcaccgcggaggattgagagagagaagagtttaaaagcgcaatctagagaaggctcgacgacttttgaataagctgtttcgagagataagagaaaaggttggagaacggaatctgcatctgatgcggcgaggccagagacgacggaggaaggatcgtggaagtcgtcgggaagagattcgagcttgtcgagaacggatttacatgaagagacaaggtacgtgtgtttacgccacgcagcgttttttatgatcttgtctaatgatggacctatgatccggccacaacgtgtggcgccgccgagggtttgtgacgttgacatcgccggaaaatcaaaagttttgatttagtccattggtcgaaagagagagagattgatatttgatcgtaagtttcaatacgttaagtgcggcatttatatagcttcttgatttgctgaattggtaaaagctttcctgctgaagaggaagagcgcgtggagatcatgtgttatagagaggcgcgtgtgactgtcttattacccactcatctcccacgtcccatatggcaactatgatccaatcaaatgtttttaaatattgataccatacaaatgtatactaatggtcacgttattaaaaagtatagtaatgcgtcttaatcaaattgactttgatgggaacgtaaccgtagtaatctagaaagtagaaacataattgcacttatacattttctagctttcttgtatgactttttttgaacgtaacagtagtaaagtaaagtaagtaatgactatgattttcttcaattcccacgataatgtagtcattagtcatattaatgcattggttattcttcgaacatttagtatcgtatatgggtaaaataaaagatagtttatgaaatgttgatttagggattaagaaactatagatagacgaccaaagagagagaaaaaagatgattccaaaatttgggtatgacttatcaatcaattcactacgactaaaattaatccgacttgtataagtacaagtgtaacaagtcaaatgattattttggtttctaggccatagattattgtgggtttaatccaactatactggtgtccaaacgccaaacacgacgacattttgatgatatacattgattgtcttgcaatattctcgaccgtaaggacatcgcaatatgctgtctaagaaataggaatatatcgtcatttctacaaaagtatatattatatgcatacattaatataattatatttgattggttgcattcattttgcagtagtgggtttatacataaattgacattttcaaaggaagcaattgaatttgcttggataaaccaaatggtgatggaaggaagatgtaacgttttaccttgtatcaatcatccaaataagacctagtcctaataggatcaaaggaacctaaaaccgtaacaagacttctagaaacattttactaattaattattattccaaaggttttgattcatgattctctcagtactactcttcctcatcgattccttcatccacacttcctcaactttgtaatggcatagtcgtagcttttcaagcactcttccaaattcgtttcacttagttccaatttttgtactgatttctaccaaacataacatagggtcaatataattagtgtttataaaagaaagacacaaaaaaaactcgttcttagttacctcaagcctatcaaagagtcgtcgatgtctttcctcaagctttgcagaaatctcatccaaactcaactcggtttctttcaaacgttgttttactttcttcgatctctaaatttgttttgatcaaataaaattggtatgatcatatccaaactaaaaatgcccgttattggttatgcttattaattacctgatttagccggtcacaaagttgttgttccttttccactagccttttataagtcttctccaaactcctttcgcttaatcttaaactttgttctgattctctcaatccaaatttgaacctcttatatcttagggttccatgaaatttgtattcatatccaagagaaaaaaaaatacacattattcttgcttacccctactctggttgaaaaattgcgagatcagggatacacaatactgaaatgcatttggaatcatatataatcaatgaaaccagcggatcaaacaaagagaattcagctgcaggttctgttcatattcgcgtaccttggcatacacggaagcacgcatcatctcttgctgacggtgtcttttgctcagaaaattgggaattagggtttgtcgcttcgattggtttggctctctctgaaaaaatgtttatccaacatccaaacctttgatcagaacgggccttgaaattagcaatgtaccaaacaaaacccgattgaataataaactggctttgggtttgttttgttttattattaaaacaatagaattaactagagaaattagcaaaactagacagatactgagacataaataagaaaatatttttgaaactttatttttttgaatgaaaatatgtttgagattattgtatgcaacaatcaacaacgtttagatataaaaaaaacacggatcatttcaaatgggagtcgaggatctgaaggaagtcgacataaacaagttcttaattatataaaaaagtgggcgtcagcttcaagaaacaaagtatcttcccatgtggttcatggtcggctgctaccatatcttcgggacacagcagtgtctgataaggtatcccacacctgcacaagcatgcgtatacatatacgttggttatctcaaaaacagaatttgttatttcttgtaccatcaaaatccctacttacatttagcccctctgagccaccaacagcgagtaagaaggggcagtccgctgagaatgagaccgagaaaacttctccctgtttgatatatcaaagtttggaatggtaaacaaagaaaccagaaacaaacatatggcagcaaaagttcttattcatggctcttacagcatttggcttgtttgtagcaatccatgatggttggttgtttgaaagatcccaaagtttcacactttcatccgcagatcccgtagccaaaagctgcacagctcggatattaaacgactacactatgaatatggtaggagacaagagagaaagagagatatatgtgtgtacattgggggcatgtatgttgtatgatatggaggagacttcactatcatgagcatggataatgaaacttggtgataaatcagaagcacgtgtatcaaagcccttcacagttccatctttgagactcacctaagatggaagaagaaaagttaacgattcacatcagatatctgaatcattcagatgtttgtgttagaagagcaaagaaagcgtaatgcaccacaaaggagtgttcgctgtgaggatcccaagccaatttttcgactttggcctcggtagaccatttcaaacccgagtttgaagggtcccttccatctttctcaaacatatatatatatatatatatatatatataaaagactgatcaacataatgataaaaaaatttcatgtacaagactcaacacataaatggaacaaaacagtcaccaatactacagtacgatcacgagacccactgaggagtacttctggagtataattgttccatgcaaccgcgtgaacctgttagccaaacaacacacaataaataaaccatgagcatgcacagatgctagcttgaaagagcatggaaacagtttcaccttcataccttcttttcgtgatgctccatagtaaccttgcatttccccgtagccacatcccaaaccttcacttttttgtcttcactaccactagcaactatattcctattttcccagttaaaagttaaaaaaaaaagagtctggtaagcaagttctggagattattttcaatcatgaaaccagcgagcttaaacatatgtaccgaaactccttgttccaagcaagatcaattactggaccagtgtgggaatctgatgtctagagtgagagaaagacaactaacatgttacatttggaaaaacagaggagctaaataattttcaaaagttggttgtcacacctgcccggctatccgtcccagttgtacacaaggtagcacctcattcacctgaagcattatataatcagcttacaaatcattatctcatgatggataaaacaaaaggtaaacatcatcaaaaaaacagttaacaagtacatacaaggtcaagatcccatatctctatagaggactccattgtcccgatagctacaaagttccctgcgaacacgaaagcaaaacttgaggaaaatgatcataatctcatccacagctattcttggatacacacaaaccttttccccctcctttgagaggacaatcaagccatgctgtgcacaatggaagctcggatataatcatgtcattgcgaagataaatgttttcggattcctcatatacataaacctcgagatagttgacttcatgtttaatagcagcacagatgatcagtgaatcggttggcctaattgtcaagtcatcgtgatcctctgagtcatagtcaccctaggggatatcaagatcagtatttactattgagtctccacaattagtaagagaaaaattaatggtgtttcttacgtcagtatcctttaggtatggatccatgtcattgcttggataataaaggtgtccctgcccagagctaaacagttcaatctctgagtccaaacgcaagaatgaaggaaactgtacattagcatatatgcaatgaaaatatgcaaatatgtaggaaaaacagaagaaagttatataccatcatcctcttcatcatagttatccatgtcgagttctttcaagaacttgacaacttcatcagcatctgttgaagaagaagaagcaaccttgcttttcccaaaagattttgctacagacttggcatgagtaacttgagcattctgaatttcatcgtccatcttttcttccatacaaggagattcagcagcaacaggcatagcctttgatgcctcttttgggatccatgaaagtgcaactatcgtcattctgcaaaaatcaaaagagatttttacttaataagcgcagctcggttaggaaagcagagaacgccatgaagcaactatgaatgaatcagcaaactagagatgacttttagggtctgtaaacttggcaactaaagagcttacgatccaaaaaggtttcaactttaagaaagagagactccaattcatctatacaagactattgtatatacaatgcactatacaaatgaactatatactatgatagcttactatcagaaacgaaaaccacacaacaacgtaggactcgtcgaagaggagaatccaagaagcttgctctgcttgggaacgcgcggcacaaggaggcaaggaggataaacgagaaacgcttgaaagcaattaaaataagggtttcctcttaacttgccatttttctgttttaaagaaaaatcacttttttattctacagtgtttcattttcatatctcacacgtacgaacgaagaatggagagcgactccgagatggtagcgttgcctctgttaccgactccgatagaatcgaactacagggcttgcaccattccttatcgattcccttctgataatcctagaaaggctactcccactgagatctcctggatcgatctcttctccaattccatcccttctttcaagtttgcatctctctctcgtgattctgttttgcattttatgttcaagctttgatttttgtgatctaggaagctcatatacctttgaaattactcggattttggattttatccgtcaattcgatcaatctgttctattttggttttacgattgttgtgacttttcatgaatttgggctttgtgacatcatgaagaaactctgattgtttattgacgtttataggaaacaatagaaattctgatccaaccaatttaaaaattcaaactttcaatgttctaaagttgttttgtttgattttttttgcagggaacgtgcagagagcgatacaaccgttccagatgctcctgttcgagctgaaaagtttgccaaaaggtatcttcttttttttttgtgttctcacatgtgtgttcatagttgcttaaaagaggcgctcattcgctcaaaagtatcaattttgggtttgatttctcgcaaggtatgcggagattcttgaggacctgaagaaagatccggagagccatggtggtccaccggattgcattgtaagtatagtttcctcttgtaaagtaaatgcttgtagagagctttgttgttcatggatttatttttgcagcttctctgcagaattcgtgagctgatactaagagaattgggatttagggacatatttaagaaagttaaggtgtggttttcctgacaaggattttctcaaaaagcattatattctcttgcactctttgctgatcgaaagagttcatttaggatgaggagaatgcaaaggcaatatcactatttcctgaagttgtccgtttgagtgatgctattaacgatgaaggcaagcgcatagagaatctggtcagagggatatttgctggaaacatctttgatctgggttctgcacaggtatatgtcatatctttcttttcatgatactcttctctgttttgttgagtatcttaatgagtggatcttatgtttctttattcacatattgaagcttgctgaggttttctcaaaagacggcatgtcctttttggctagctgtcagaacttggtttcacgaccatgggtcattgatgacttggataactttcaagctagatggctcaagaagccttggaagaaggtcacttctttaacttctctctgttttgtcctaactatgctttatcatgacttcaggagttttatcgcaggacacactgatttgttttatttctctctttttcatgccaggctgtgatatttgtcgataattctggtgcagacataattttgggtatcttgccctttgctagagaaatgctacgtctaggaatgcaggtgcttcctcagttttttttttttatgcacaactatggacattttgttctctggtttggctttttgattgtgagaagttgtttattatgtatatttctaagttgttcctcattgcaccttcccttttgaaggttgtactggctgctaatgagcttccgtctatcaacgatgtaacttatatcgagcttgcagagatcttgtctaaggtgatgaatagagtcatttgggtactctcgtccattacagattaaagaaactcgaccctgactgagtcttaatttaccagctgaatgatgaaaatggacaattgatgggtgttgatacctcaaatcttcttattgcaaattcagggaatgacttaccggtatgttattcaaaagctcgcacaagaagattgaacttcaagttatcactaattcctgtaaaaaatttcttatcctttctatcccgttgcaggttattgatcttgcaagagtatcacaggaggttgcgtacctctcaagcgatgcagacttggtcatcttagaaggcatggtaagaccttttaatcgcgtgaagttggtgaactatgtgttatctagtcttaggtatcaacaaactgactccttgactgtcctgtacagggccgtggaatagagacaaacctttatgctcagttcaagtgtgattccctcaagatcggaatggtattaaacttataattccatggcgttacatagaaaaagagttacatgtttcttaattcttccttattactcaagtctggtcttttgttatgcaggtgaagcatccagaagtagcacagtttctcggaggacggctttatgactgtgtcatcaaatacaatgaagttcagatttaattatatttcacacacatttttactaaaccagccattcagtttattatattaaaaactgttaggctttgtaagttagagatccaatctctatctctgcattcagatgtaagaattgaaaactctttcgacattctttatcaaacacacacaaaaagcaccaatctttctgattggaccttatctggtatttgaaagtttcatatttgtagagaacatgatcttattgagagaggtagctctatggtcatgtttttttaggtttcttgaagctggatgagcatttggaggatgtgcagtcagaaaaatggtaagagaactcttaccatgttattttaaaatctcacattcatcaatacaatataatgtgcaatagaaatgcattgaaagaaagaaaaaaaggtaggatgcaggaacaaaggtatatctatcacttggtcttggtaggatatgaggccatcttgttgattccacagagtccctctggtttaccagtgtttctcttcatcctaataaaccctttctctccccatcttggtccccatgagttcttgacaataacatagtcagatccctttgatgaaccatatccaaccgctgccacaccgtggtctaggtctgttccacatttaccattaaacactccctgtaaacaaacaaaaatctccaaatcggtttttgagagaatgaaagattggatacatagaacacaatttcgatatcataatcatctgttatatacccctttgtagaactggaagtctcttcctgaagcctcaatagccacactgactggctgatgagctaaagccttcaccaggctttcgtcatcattttcagggacatcttcgtagccgctgattgtcacacgttccacatcctcctgtgtaaggttcatgattgatcagtgtttataaaaaatctgtttcccagtgttaagttttgattatgtttgtgtctagtgtttgttactttctgctcttgacaaattccttcctccatgagataagggtaatcatcttctttgtggagaccaccggtcgaaattatgtactggaatgcgtagtccatgagacctccattgcagccactgttgaaagttgtgtcacagtctatgagttcttgctctgaaagcgaactcagattccctgttgtgatctggttgatcccctcgacagctgcaactgttgaaaatgcccaacagctacctgcagcaacaaaataagatcgttggatagctattcgaatctctgagttctgttctatatacctgggaccaagatggaaagagagaaatgttaccacattgaccctggtccttgacaggagccacagcgcctttctttctccagtctacggatttaggcaagtccgtgatatctctgtacctgaagttagctgagggctgtctctttctagagaattgtggctttgcaagtcctagatatcttcctttgaactcttcatgggtcaaatccgcaaactcgttcaaaccgagccagtaactgttgatctcattgttcctctggtctatatgcatcagattctctctgaaaacctcaaacctgtgcaccttctcctccacgcttttgtaagccttgctgtgttctgacatccatgactcgaagagctctagaagcttgtcagtgtttgtcaaatgctccggcgtgtatccaacaatggagaaatcacgggcaaaagcacaacagaggagagctgatgctgaaatggcaaccaaaagagagaatttggaaagtgatggtgcagaaaaagccatagccaaatttgttcactgagagaagaggaagaagaagaagagatggtgtgaaacagagtagaggaatagagcttatatacaagttggagacaagacaaagtctcataggattggctttgaagcaaagacaatgattaatttaaaaactaagtacgccggtctccgagtcttcacggttggatcatttttggttaagccttttgttctaagcgtgcaattttcaacatacagcttcacgttcagacagttaatgattattaaaatatccggaggggtgttttataaaaaaaattacgtagaggcttaaaatttctgaaattgtaactattcttgataagttttggtatcgtacaaatgagaatagaaggtttcatgagacggaaaaaaaaatcaatacagaagcacaaatgtgaatatacctacacgaaaaacaaaatcgtaatcgttcaaaagctttatctctgtactagaataatggtgttttcttggtagatgtaagtgtgaagatctttactatcgtagcttccctgcggaatgtaaatatactgaaacagagacgaccctgcaaagtgcaaacacagtaatgcattttatgagacaccttttacgcagtcagtggctcttatgtgcataaatgttggtggctacttttgatatcaaaagttgagatgattgtattagcaaaagcaaatgtggttaacttacgttgaacccaagaagaaggctaaggaaagatgaaaattgaagaggaatacagagacaactgcggtgagaagcatcgccactgatgtcgaataaacctacataccgattgataaagttaaaccctgtgtcaaaaagtgacaggggaatgaatgtgcatttttttgcaaatacactaccttcacgatattgtctgcatatttcatcaccatcgacacagcaatgccacttcaaaacaaacaataaaagagtgttttggtgttagcttcactaacttacatcagagttaagaaaaaagtctggcctcttaagcagcttttacctgagagcatggttaagaatcatgagtaatgtgatgaaggagtaaccatggaagaatcccctgaaaatggaaaaccatcccattcaataccagaacagaagagtcataacagcataatacgcagttagtataatataatggaactataggacaccgaggatatagaggtgtagtactagtatgttctggcattttatagcaagtatgaaagaggatggtttttggatttacttatttgcaacggcatcaaaatcttggatcactatagcaacagcattgaaagccatcccaaagacatatagccagaagttctgtacatttatattccttgaaggtcgctttttaataatggcctgccaaaatggaaagcaaaacctttataagctttatatatcataagttaatttatcaatggaaggaaccaattatactgtattagtgttgacacacacacagagaaaagaaaccaaatcagctttgagtatttacagtatacagtcctaatatcccacctctgtgtacactccggcgaaaccacttaaaagagccatgacctagaaacaacgagtgattatattaattgatgtggacatgaaagctgcttcacaactcttagttgatattagcttgcaaagggggctaacagcttacaattgccatagtccagccaggaagagatgtctgaagaacacgatcagaactgcaaaagcaatttcaaatatgagacatatattggaaaaatcagcagagacctgaaagttcacagagcaggaaccggatatgagcttttgtgtgttacgcatcatatgcaagaatcgttaaagctcaatttaatagaattcatatgaaaatcaagggtaaagttttactttgaattcaactgagcagtggtgcatccgcaacacaatagaatgaaacccgcccactgaatctcgctcaatctgttagagaagatagtaagcaaagcagttcacacttgcaagaattgaaggaaactgaaacagctcactgatggatttccagaacaactattcattggaagctgttaaatccatttggatgattaaaaaaacctactttctcttcagtataattctgtacaagacaccggtacttatgatgttcaagttcttcaatatctgatagcctggggcgtctacatatgcaaaaatataatactgccacgtaaaaggtgacacaacaagtagttagagacatattaacatgaaaaacataagttaagaaaaatcgaccaaagccacagaaaaaaataacaaactcaggacaccccacctgtaacaaattcttaaaaagatacaatgctgcgggaattggaaagactttaacttcatcaaatgttgtgcttaacctgttatagagacaggatttgggtatcagtaacgaaaaattcagtgagctatctacggtcatgttcaaagaggaattagatataaaactcatggaaatttctctaaaactgataacaacagattgagtaacaaaataattcgctacctgttgtcgtcagtaacaccttcatttttccatatccttgtcaaagcaagaagagataacgcacatttcagagttcaacctgatgtccaccaaagagtaaacaaaatcactatatcatcatgattcagagattaaaaaccacacaaaactggcctcgcttgcaacacatacagtacactcaatttaatgcatctatgaaactcaccaaaaagttggcggttgtaacactatactcatacttcccagctcgtttcgaccacacgataagtatcgcttgagaactcgtcagaatcgtcagtgcacatgttactacacccctaattcaacacaagctatttaaagaacttgaattttccaaaaaaaaaatgaacaaaggaaaaaaacttactttcgtttccagttgatccgttcactggatccaacacccagagtagccattgcaatgttactcgaagcaactgtcaaatcaaagcaccaatgagcacattaaagaacacgagaagtggaatttgagaaaagaatatctcaccggtatgagattttcctttcacactctcgatatcagaagcaacgtcatgatcgtcctgaagaagctcggaacaaaattgagcattaaagagagtccaaatcttaaattaaaagcagcagaaagacaaagtgaaatggaagtaacgaacctcatctttgattttccggtactccattgtttcaagctctcagatctctgtgatctcttctccgaacatacacactcgatagctattaaaaaaagaaagaataaagtgcttaatttcgattttgggcttgaaatttattgggccttagtctaatacctgattaggcccgtctgggatatcttttttcttttttggatttttgtatgtgattgttcttttttctgtcaacataaatttgcttggctatggacattggacagattctgctacatttttctgatttttattataaaaaaatcaaagccaatgcaatttcaacagatttctgtactgggaaaataacctttaaaataaaattacaaagaatttttttaattaaatttgtattgtgacttgtgatggaaccctacctgaaaacaatgtttatctatattcactaaaaataaaattgttatatttccaatattataggtgcattcattcatacacaaaacaactaactatacaaatcaacaaataaacataacaatacaaattatttaatacaaaaacaaacagcaacaacaaaatgaatgtaattggctgggggcataaaagtaaatggaccccacaaaaataaagtggaataaaaccccagcctgtgttagagctgtgttcactaatcaatctctcacattcacattcatcttcttcttcaatctctctcaacacaaagaagaacaaagaagttatgagctcaatgatggagactctccagattcgtaaacccacttccctccccgtttctcaacgccctaatgcagcagccaccgccgacgatgagcctggtctcatccgccgtcgtctctcttctctatcactcaacctctcaaaccaaccagcagcgatcgcagctagattcccgagatccaaatctgtttccgccatgggagaacaagcaggaagctctgtgaaagaatggtgggaatggggttggtcatggatcctttcaagaaaacctatattcatcagagatcttgagcttaacaaagacgaagctaaatcgattggttcacaaaacagaggaagtataatgcacgttttcttcaaactccgatctcagatccgtaatttcatgggaccttcttcagaagattctcttcctctttcttgcaaatacaagcgtcaacgataaaatgattcatataaggttgagattttgtgatttgtctgttctttttttacttttgtgcaatggagtataatgaatgtataattcgtctttttttttttaaacttgatgttgtattttgctataattaatttgcctagattattattaatcaatttatttattttatttgtggttacgagtttgtggctgtgcagttgtatttttgtattttaataaccatgcaaattatatagaaaaatccgttattttcgttttaatcttttacgcgccaacatgagattcttttttttttttggttttaatgtgaaaaacaacatgagattcttctatctaattatgattctgaatttcgttgtatagtttcatatacacaatgatcataatgataattgatgataacaacaatctatgtcgaagaactcttaatttcatgatacaagtagaactaaaaatctaaaatatttcaccgaattattttcccattttgtggggttttcaacaaaaatggtatgtaaaaaagcaaagtattaacgagagttcggttccataaaactgagacgcgtgtggccgacaaaacatttgtcggtggcagcaaatcgtcggtggcgtattgatatttattgttctgattatagtttaaactaaacttttactttcaagtcggactagttttaaattaagagaatttgggtacaaatgatcgtattttagctaattaacatataatttttaaataacaaagctgaccaaattgccatacgttactcttaagaagaggttattttacactaataaaatatgaaaagtgacaccaaaataaatattttttgttaatatgaatatgccatgtgtataggagaagtaccaaaaaacctgtatatgtaaaatacattaaaaatggttttggtgcataatgttccaaattacagattgtggccaatgaataatttgcttggaacagctttgagttttggttttatttgagtttaaatacagattacttagaaaaagcactttcatttacatgattgagacttgctagctcatcatcttccacatcataggccattggtactattctcatataaatttattcaatatcgagttgtgtagtccgatatggatgaagggtcgtgatcgtctagaaaagaagaaatagattttcaaagtaaaaatgcttagaaatcacacaacatacaaagacatttttgtttttttcaaatacaagtgaacaaagtttaacaatggcagatgatgaacaaagctcactaacttcaacaatggccataatgaacaaacaacaaagaggtaaagaaaaaacctccaaaactacttgacgattaatcacacagtcgttaaacaaaactcgaaccatccacaggtatgaatccggtttggtcttctttcatcgccttctaggtggtgagcattgaggttgttgattccatgaataagaacattttcgcagtcacgatcgcactaacatattaaacaccggggaaaacaacctctacgcgtctctcatgctaatgtttagactatttctcatcgtccttcttccaacaccagcatttcccttttgcatcatctccacaaactcaccataatcaatctttccatcctgttcagaccaacataagaaccgataagactttttatcagctgatgcctcgacattagcctagcgaggaatgtggaacagatcatcatataagcttacattgttttgatcaacttctttgatgatgtcttcaaggaaaacatcagccatgccatgttcaacacacgcttgttgtagctcatcaattgttatgaaaccgcttccatctttgtcaaaatattgaaacgctgcaacaagatgctcttcccgctctagtttgttgagatggatcgtcgctgcaatgaactcactgtaatctattgtcccactgttgtctacatcagcctggtcaataaaagagctgagtgtaagaatacataacaatacttcattgtcaatgtacttaaccaaataaggttagatttttaccgcatccataagatcatggatctctgtgtctttcaaggtagatccatattttctcagcccagctttgagttcatcaaatgtgattgccccgctgttatcagtatccattgcttgaaacatttctcttaaaccagctatctcttcttccgagagactctcagctataacctgatgagcccaaaacaaagagtaaaacaaacagtttcatgagaagtgatgcagagaccaaagaagataaagggtttacgcacaaaatcactcaccttcaaagccatcttctttagtttattcattgcagagaattgcttgagacgagaaagaacagctggatctagtgctctatctggtgcaacaccattctcacagatccatggatgacctgaaaaaaggatattagtctaatgctgtttggttgtcactataagtaatcatttatgtgaatacgtacgcaagacttcatgagcggtcaaacgttctgcaggcttggaggataacattctgcggatcaagtctttagcactgtcggatatcacaggccacgggtctgactcaaagtcgatatatcctttcaacacagcatcaaatatcccttgctgtgtttctgattccaaaaacgacaatacaaaacacatttcaggtgacttagactttctacatgactaagaaacaggctaacatggaaaatgacaaatacctgcccagaaaggtgggactccgcttagcaatatatacaatataacaccagcagtccacacatcagcttcaggcccataacgtttgagcaaaacctcaggagcaacataatatggacttccaacaacatcagtgaatatttgacctgaaagtcacattctgtttcataagattcttttaccagcctagttaagcaaaacattaactaaaagcttcaaacactttacctggtttgaaaaagacagatagcccaaaatcaatagccttgagagagaaatcatcatccttattaaccaataagaaattctcaggcttcaagtctctatgcatcacaccaagcgaatgacacgcttcaacaacaccgacaatgatcttagtcagctcagcagctttcctctcactataatgtcctctctgaataatcctatcaaacaattcacctccagcacaaagctccataacaatgtgaacatacaaagagtcctcataagctcctttaatcgtcacgatactaccgtgaccagctaaatgatgcattatctgaatctcccttctaacatcctcaacatcttctttagagatcaacttcctcttggatattgacttacaagcgtagtcaacgcctgaggcaatctctgtacatagataagtcgttccaaattgaccttgacctagcttgcggctaagggtatagatatcacgaatgtttggtgtcttatgaccaagaacatagtaagcttgattgtctgggttacgcctcatgattggttctcttaaaggaataacaagagctggatctttgctgttgttgttgctgttgttgtctttggagaattcttgagcaatgatgtctgcagcgttcggtgaatggtcggaattagaagacaagttggtggtagaggttttagagtaatcttcaggcttattgttatcgccttcgtcgagtttgtccttgaaagatccacggcaagaattgcccatgaaacaatgggaattaccaaatcctggttataaagacagcaactttcactttgtgttcttcatcaaaggaactgttcatagagataacactgtcaaaagtcaaaagacttaaattagaccaaatacaagaagctaaacgagaacaaagtaacgaactttaacaataccacaagtaaagaaagacgcaaaacccacatcagatcaaagagtcaaaataaccaaaaaaaagacaaagagctaagaagtttcgatggatcttttaaaggaataacaaaacagagaatgaagtaaagcaaaaagaggatctagttaccagttgttgaactcagaagggcgaaagagaagactgaaagaatgggattaggaaggaatctgacttaaaaggagaaactaaatttaggggagacaaaagagaaaagtcgaacaacaaaggaaagctacaatattttatgtttatttatttcagagattgaagtaagaataaaaatagattttttaagagctttggtttggtcggatagattagattcgttggatgagaatgtgatggtgttttattttacggcggcgattgagcgaagaaaggtcttttattagtgctcaccagctactacttctacacctctctgactctgtctctctccgctgtttcctctcaccttctttcttctgcttttgcattattaaatttaaaccagtttctcttttgtttatcgtttaaattgtaattgaaaaaaaaaactaaaattagaatgttggtttgtacaaaatcaaaatgcatttctggttttactagttaccgttaattgtaaaaaaatttaagtattaagcacgatggttttattctcgtcgtatgagaagactaatttaaatacatgtgatctacttgtaaaagaagcaaccgttcattcaatctcctatcagaaagaatagtaatctcttgagattttttcttaagataaagatatgccaaatatttaaacagtattatggcgtcactgactattatgacgtaagagattgacttttccatatattgcaactttctggagccccgcacataatccctaataagttttacttttgggccttgtttattcactgatccagcccaatgttcaaatacaaaattcagacaccccaaaggccgtattattgtattgttttagactttagaccttacaataaggcctaaaatgataacatattacacatttcaattccagataaaaaaaagaaccgaaaattttaattataaacgctatcaaattgacattttcacaagactgaatcaaatttgacacctccacgtacacaagcaaaattatattttgggttttgtatcaatgtgctggctgattttttttagcaaaactgtcctgtaacatctctccaacttggtttgaattcgttttaacattagtttggtgacaaacataacgttattgaatttttcatttttccgtaataatcattctgatttttttcttttcaaaatgttgttactagatgtttctttcccaagaataatatcttaaatcagtaatcactactaccagtaaacataaatggtacgtttctcctcattctacggaatttttaagaagcaatgatgatgattaattgaggatgtggacaagaatctttatatattcgcattcacatgccataactttcaaagtctatgaaaaaagattctattgcgtgtttatattctgtggtgtgtactgtagttccaaacataacgcttgtactacgttcatttccggaaaatatctaagaaatatggagtcataaatatttattaaccaattagatgtttttcctatgttctaaatacatttatggtaatctttgcggtcaaatatacgaactttaacaacgacgtttaacaatatatcttttgttttatacatatcaagttttgatatacggacgatagatatttattttcagaaaaccagtagttgtcgtagtcacatggtttgtttttcgttgatcaaaatttgttaatgttattcatttagaattagagactgtatatcgaatttggtactcggttctaaaaaaaaaaaaaactcaatatgattttttatacattctttttcttcccttttaatctgtaagaagaatagtaaagtgaagaagaaaaaactattcattatattgtaacatacgaatacgactcacaattaactaaagttaaagtgtctcattgtatttggactttggacattattctccattattgcattgtttctttctttcttgattaattatgtaaagttgaaatgatttgaagatgctttccggatgtaaacaaactaaactttactttaccaataactttgttttcagaaaactcagatatttatctctagtttctcgtataagtcccaatgaatctaagatttcaaaaaccaatcctatatttgtttcatatttacaaaaaaacaccaaatatttttccccaattatgccgacattaaactcatctttttacatacaaaatcccaaattaatatccgtttttacctttacttcatgaaagcgaagatggtaaaaagcagaaacatttcgagatattaatttgattgtataggcccgtgaataaactcgtggacccaaatcgaaaagataacaaaatttaaagatgtacttaattctctgaaaaaattctgtacgcaaacacgagaaagagaagagagacatacacacacaatacacatacgtggtttgagaggacaggagcaaaacggcaggtgtcactaatcccataggcttctctctctgttcactgtccttccgcacaaaaaaaaaaagtattcatttttatattctcacggttacttcgaaatctagctttcgttttctttttttttgatttaaaccaaaagggtaaacaatgctttatgattgcttagtgacgccattgaagcagcggctcactgatagtggcttcttctgcctccaattccaagttgctaaccctagttttcatctctctctctgtatatcatattctctcgtactttcttactttctcttctacttggtagagataaaaagtagtcaaattttattcaaagttttgattttgacatctgaggtttcacctctgttttttttttctagaactcctttgggtatgtgtcttttacgtcactaaagggtttgttatagtcttaggtcatgctttttggtgttatctctctctgttttatcttttagctcaccaagtgattgtgtctgattttcgaattttcaggtggattttgtttcactcactcatcgtcgttgatcagtgactctgtttttgcgaaattctcttcagatttcttgataaaagatagaagacggaattatgagtggagctgtgcttgttgctattgctgctgctgttggcaacttgttacaaggatgggataacgcaactattgcaggtgattgattatcttctgtatccataattctgtttatgaaatttaggatcgataaagtcaggatttttatggatacaattcacagatcttttagcttatctcttttgcttgtgtgatggattttaagttttctttgggtactctgcaggagctgtgttgtacataaaaaaggagtttaatttggagagtaatccatcagtggaaggtctaattgtggcgatgtcacttattggtgctactctgattacaacatgctctggaggggtagctgattggcttggtcgccgtcccatgctaatattgtcctcaattctctactttgttggttctctagtaatgctatggtctccgaatgtttatgtgttgctcttaggaaggttgttagatggatttggggttggtcttgtggtcacacttgttcctatttatatatctgagactgcaccacctgagattaggggactgttgaatacgctaccgcagttcactggctctggagggatgttcttatcttactgtatggttttcggaatgtcgttgatgccatcacctagctggagattgatgcttggtgtccttttcatcccttcccttgtctttttcttcctcacggtcttcttcttgcccgagtccccaaggtggctcgtgagcaaaggtcgaatgcttgaagcaaagcgggttcttcagagactgcgtggtcgcgaagatgtgtctggttagtcttaaatcgttctgactctaattctttcaatgaaaccaatcttttctattgaatgttcttatgtggcaatgtataggtgagatggctttgttggttgagggtcttggaattggaggtgaaacaaccatagaggaatatataattggtcccgcggatgaagttactgatgatcatgatatagctgtggataaggatcaaattaagttatatggtgcagaagaagggctgagttgggttgctaggccagtcaaaggaggaagcactatgagtgttttgtctcgccatggaagtacaatgagcaggaggcaaggctcattgattgatcctcttgtcacactgtttgggagcgttcacgagaagatgccggacactggaagcatgaggagtgccttgttcccacattttgggagtatgttcagtgttggagggaatcaaccaagacatgaagattgggatgaagagaatcttgttggagaaggtgaggattatccatccgaccatggagatgattctgaagatgatcttcattctccgttgatctcacgtcaaacgacaagcatggagaaagacatgcctcacactgctcatggaactctttctaccttcagacatggaagtcaagtgcagggagctcaaggggaaggagcgggtagtatggggattggaggtggatggcaagtggcatggaaatggacggaaagagaagatgaatcgggacagaaagaaggtgggtttaaacggatatacttgcatcaagaaggtttcccaggatctcgacgtggctcaattgtttcattgcctggtggtgatggaaccggtgaggcagattttgtacaagcgtctgctttggttagccaaccagctctttattccaaagaccttctcaaagaacatacaattggtcctgctatggtacatccatccgaaacaactaaagggtcaatttggcatgatcttcatgatcctggagtcaagcgtgcattagtcgtaggagttggacttcaaatacttcagcaggtagtctagatagccacatcaaaattagtgaatcacagaagaaataatgcggtttatgctaattctatgttttcctgcttcctcttggaaatgcagttctcaggcatcaacggagttctttactacacaccgcaaatccttgagcaggcgggtgtcgggatcctactatcgaacatggggattagttcttcctcagcatccttacttataagtgcattgacaacctttgtgatgttacctgcaatagctgttgcaatgaggctcatggatctttctggtcgaaggtgattaaaacttaaatttcctttgttcttacaatacacataaacgaaacaagctaaaatgcgttatgaaatgtcttttattttatatttgcaggaccttgcttctcaccacgataccaatcctgatagcatctctattggttttagtaatctcaaatcttgttcacatgaacagcattgtgcacgcggtcttatcaaccgtaagcgttgtgctctacttctgcttcttcgtgatgggtttcggtcctgctccaaacatcctctgttcagagatttttccaactcgagtccgcggaatctgcatcgccatctgcgcactcaccttctggatctgtgacataatcgtcacttacagtctccccgtgctgctcaaatccattggactagctggtgtgtttggaatgtacgcaatcgtatgttgcatttcatgggtctttgtgttcattaaagtcccggaaactaaaggcatgccacttgaagtcatcacagagttcttttctgttggagctagacaagctgaagctgctaaaaacgagtgagaaactgaaagacttgttgagataaaaagtttgtgtaatattcatgtggatttgttgttgtctttttactttgtgcagtaataatcatctctctctgtttcgtcttcttcatgtggggagaaaaaaaagtttcaaactttcagttacgaatctctttattaccatttaccatttgcagaatccatagaacaaatccgtaaactttcaattacatactttcgataagtctagctccgactttatcaagtttcttcacagaagcagtagatttcaagtttccgatcttcaagaacacttggaccattttctctccgatctcgtaacctttctccgccgtgtcaatcactgcaaccgcagttatggtgcgaccaaatgctccagcttctttcccattcaaagcagaaagtgatttattcacctataattcttgagcaattcagcgtctttcctcgcttcttctcctttcattgctcaaactctaaaccttgtagcctcgagctctgtgatttgtagcctcgagctctgtttctgcaatcacacaagctgctctatggtttggctacaatcagtcgctacacgtttcaaagctaatgccaaatatatcatccattgttttcttgcgaatcttggctaatgagggcacgtgcgagactctcattgctctaagctttttaagtggaaaaaggaaacaatccaaaatttgttttagaaaaggaaataacaaagaaaaaggaaacaacaaagagccgttaagaaaaaaggaaactttgaatcccaaacacaaacgatgtgtctataaattgaggaacccttctcagagatagaaaattcttaagtgagagagagagagatgaaattacatacgcaattgctctgattttcaccattctcttcttcgattcctgtttccttcgcttctaattcaactctgattcttcttcttcctcctttgtctctcgttaatggcgttacgatatcttctctcagtctccgtcgtcggaagttttctacttttgtttgaattcaaaggattccggattttgtttaccctgtcttcaatgcaatggttcatcggaagattttgcgttttctggttcatgattcatcggatgatcggaggcttttgggtttatccggttcatgattcatcggatgatcggcgacttttgggtttctccggttcatgattcatcggatgatcggaggcttttggtttatcagtcacggacacgcacacggggaagacggacatggcggtggacgaaagaggcttggactgcaaatctcattttcagcccatataatactcagaagcccatcaacaaattgaggttcatttcctatcccttcttatttactttttttttttcctcccaaaaatcgattttctcacggatttttaatttgcataacgatgatatgaaaactaactggattttggatacagtcttgatcgttagcgattccaaatattcaacttgttttcatatcatttttatgtagatatattatccaagttttttattcggatttttaaaagttttaaacgtttttttgttttgttttgttttgatactaaatttacataaagatatatgaaactaaccggattttggatccagcctcggtcgttagcgattccaaatattcaacttgttttcattttttttatgtagattttagtatccaagtttttaagtcaatttttccggtttttttttttaattataaatttacataaaaatatatgaaactaaccggattttggatccaacctcggtcgttagcgattccaaacattcaacttgttttcttattttttatgaagattttagtatccaagtttttaagtcaattttttcggacttttaaagtttttttttattttttattttgtttttattctaaatttacataaagatatttgaaactaagcggattttggatccagtctcggttgttagcgattccaaacattcaacttgttttcatatcattttatgtaaatttggatattcggatttttaaaaggtttttttttacactaaatttgcataatgatgtatgaaactgatcgtattttggaaccaacattagttgttagcgattccaaacattcaacttgttttcatatcatctttatatagatttttaatatcgagatttttaattcgaattttatattgctttttcaaaattttgatattttgtatttggatttttaaggtttatttttattttttattttctatctttttattgttttgatatttaattttcataatattatataaaaattgataactaaccggattttggatccagcattagtcgttagagattccaaatattcaatattttttatatcatttttatgtagattttaagtatccaagttttttattcgaattttgatattttctcttcagatttttgaaagtttttttttctttttgagattgtttttatagtttttttttcttagtatttaatttacataatagtagtatatgacagaaaactagccaagtttttaactgtttgagtttataaatgtttttagtgattagtgtgactaatttgattcaatggctaatcagcaaccactaactatcctataaaaagtaaaaaccaaccggtacatttggaaagcttccgagtttggatatagtcggtttagcaactaaactgcctaatccggattggcacctctagtttttacagttttggtatgcaacataactggaagataaaaaggataccaagtaattcttttttttaagaactatgtatgatatagctttgtcttacaagttaatgcttcactttctttggttaaaaaatgttccgtattcttcaaggcttattcttgaagtacagttaaaatcaaaatctgcattctactatataagtatgaggtatgtgtgtctgcatttcttcatctttcatgcttgagtcttgatggatctgtcatattggtctagaaggctttaaagaaagatcatcgtttcgtttacgcttcatccttctcttggattcgtcttctttttcatcaaaataagctagaaatgtctgcaatgatttagaacgtgaactttctggtgaaggtactgtggcttcttcatcatatttgccgtggcggaagaagtcgcggactatcttgaagaagtagatgaagagagcgataaaacaagagatcccacacacaaggaataatccccagaagcttcggagtttaagctgttctgaatcttcatctgacactgaaccgttgaggttactgcagttagatcttgaaagccacttgtcatggatcttttgaagctgtccggtttctgatagacctaagatcgcggttgacatgtcgattgctaatggagagtctcttggaaatgcctacaaacaaaaccgcaaaaaagatgatcaagattaatgttcaaacaaaccgcagagacagttttaaatgaaggtactcacaaatccccagccacttctggtgaattcttggcctctaatggcaaatccgcagaattctgagaggaagagatcaacgtaaggacgctcatcaacaattgcagcaacagttccgttttgaagagctgcagcgtattctttaggagagccgagtggtacaagtctggatctggcaatgttaagctcatcaatcatgtagttttctgcataagaacctacctgaaacccaactcgtccactgctgctgatgagtgtgtctactcctctgattggtgagtttagctgttgcactgtaagaatcgatgtaagactcgctgtgtagcttgatgttatgattagtaccacaaatagccagatgagcagaacagcacgaccgagtgtactcactgtgttctctcctgcaagtttagtagcataaagatgttggagatatcatcacctatacagtagtaacttagctgcagtttttagatgtaacttactgtgggagaaaaacatcgtggagaagctgaacctgcatacatagatcatagcttatgaggtctttaggtatgttatgtgccaacatattgataaaatgcaacttcagtgactgtttactaaccagagaatagtaacaatttgtttccttggaggtccgcggaactcatcgttgattctatgttcaagaatccatattactgatccaacgatgaggaaaaaagctgctgtaacagcccacattggaggtgtaaaagggcgtaaaaacgcccacggagtatcatttagctttgtgacaggagcaaccacgacaagccctgattctatgtaaggctgagtgaaatccacaatccttgttcgtttcgtaacaatagctatgtctcctacaacagcatcaaatacctgaaagcagaaatgaacaactcacaactattacagtcagtttcgacaatgctttgtaagagaaatgatattttcttgattcttttgctcaccccaatagtgacattgttgacaaattcattgaagtttgggttcttgagaccgtctccaaataggacgaactcatgaggaaccggataagaaatcagttttaccgcagcttcaaagacatcaatggcatacccttgcactttgttgcttccatccaaccttgacacaaactccttaaaacttgctctatcgggtacaccgattctcaatcgtctcccgttgttaggaaaaacccaaccacgtggtgtctcagaagtcccaccaggccaagtcacattgttcagatgttggtttgagctcgaacgatttgaaagctttttgtatagtgactctggaggtataatagagagcccggaatggttagaccaataccctatctgcctaaacccgtcatcaaccacgtttatgatgtcatatgagggctgtatcattgatctgtcaggaagaaactgtatttgacctgtaacaccagtcatatttgtattcacaatataatcaagaaattgtgatccttggtcaaatatgctcaatgcacctagattcagtgaccctcctcccttcatgctggttaactttgggtcactagagaaggaaatgttagctctgctatctagaagtctcttaacagctcgagcaatgatccagacagtatcataagcatagagaccataaacgtttaaaccgacagtcccgttactcaacttgttccaccgtgccacgaaatcttttttcttttttgaatttggcgtgtgaatacgaagagtaagcacgcctctaagagattcagcagtcttggcaggtaacgggttaacagaatctaacagagaagtcaaccaagttgtagctatccaaacatagcctttctccatcatgccaagcttctgggcttcctcaaagattttcttacctgttttagggaaagtgttcacaatgattacccgagattccatcccttgaatcttaaccaactcatttataatctcacgaggactcgtaatcaccacatccaaaggaagcacagccttgtatgaaatcttgcagcgccttccttcgagctcatcgcctaaagctgttataccgtttctactgttgtcatcatcattatacaatgcaatcacctctgaccaaccgtagtaacttatcatttccgcaatggcacgcatcagaaagagatcactaggtgctgtctggacaaagaacgggaactgaagcgccgagagactagggtctaaagctgtgaatgacaacataggcacactaagctcatttgcaagatgagacagtacatgagccattattgatgtctgaggaccaatgatagccacagcatcagtctccatgaattgcaaagctgtgaaataaaaccaacacaaaggataagtaaaagtttagttccaaaacaagaatcaacgaaacaagatcatatctttttttcacctcccatgatggtgaggaatccattacgctttgcatcatacgtcgttatacgcaattttgatccaccaaggaagctaggatcagaatttacatcttcctctgcagctttcatagcaatatttgtaacttcaccctgtaaagtccctaaactgaatattgctccaacatcaacataacgaggccttaaaccagctccctctgaaatcatcccatcaccaataagaacaatgaagctcaacagaaccaaaacccaaaacatagctttggcttaatcagttcctgaaacaccaagtttgataaacaaacaacaattagataaaattcccaaaaactttaagaatcacaaaatgagagattgtgagccacttcaccaaatcaaaatgggatttttttaaaaagagtaacataggaagagaaagctagaaacttctaatgaaacaaaaagaataaggaagataagcaaagaaagtgactttaaccagaactgaaaaagtgtcacgaggattaaacccttacctcaaacatagagaacaaggattgtcaagaaatgagtggcagagatgccaaaacccaaacccaaaccaaaatcatcctttaaagaaaagcagattcgtcaggcacatgaaaaatctagctgaaagaaagcatgaggaacaagcaagaggagtacacatataaaaacctgaaaaaaggaaggagtaggtcttcaataaacaaaaaggaggtaaactgacaaaagtaaaatcatgggtttgcttgaagatttaggaaagtggtaagctttttggtgggatttgattacttccaatcagaattcatgcactagtcacatttacaggctaagaaaaaaagagttagagaaggaaattggatagactaaccataattgtcgacatagataatgagccattatcgattgaaaaatgtgaacttcttaacttgtaagttttgtttccagtgaaaaatgaaaactttttgttttgtttgcaagtgacgaagtgacccttttggttcccagccaaagtaaagaagatgatgatgagaaacatattattccttactataatctataatggtagtctataatcttttattggctagtgaaatcattaacccaaaaaaagagataattaaccaaatcatctttgggaccattaatcgtttgcgtcatggagttgtatgattatacttttgattattgaatcagtattttataattatatattatacttgtatttggattccgttataccttgatccaatgactgttttaaatttattttattgtttcattttcttttttgaaaagtaatagtattatattttgtggtctttcatgcgacaatgagaaagtctggatatttcgaatattatttggttcaggtatttaaaacatcttcccatgttccacatatgacataactccaaaaatgaatgtatgttgttggaccattcttttatttgtaacctttttttaccccaaaccaataaaaattacagatgcttatggcattttctgattttgttgtcctatataggcaaccttaaaccttcttaccaaaaaagagagacaagtttacttataccaaaaacaattcttgttattatttaaatgtttcaggaagataagaaaacgcacgataaagaaaatctaacggatatagaaacaaaaataataatctaggaaacaaatcgtaatcaaatgtccaatttcaatagtgtgaatcatgggatgggagagtggcgattttatttctgtggaagtgtggaacctccaccgaaattgagtaatggaagctcaaactccactaaaatctttactttttccaaatcttccaattggctttggaattttgttggctttggaattttgttgcttcaatattcttgcataggcttagaatttaataatagacgcaagatttataaggcctatcagaaataatggactctagtattataaggcccataagaaataatgaactctagtattataaggcccatcaaagataaacttgggccaacaaataataagcagcaaaactgatacataaaaaacgtggtggtttcaaactgcaaagagataagtctcttccttacatagtaaaccgctctgttcctcaactgaagttaactgtctccctgttcctccataacttctttcccacgtaacctctccttcttcttctacttaagcaaccctttctctaacttctactcttttttttcccacttttcttccatcacttcctctacgtgctcacaatgaacaacaatcattcctatgatgatcgcagttttcacattccacttcatccttctaacacaagcaaccctaatccaaatctccagtttgctttatcttcaagctacgatcacagtcctaagaagaaacgcaccaaaaccgttgcttcatcctctagttcttcaccaaaatccgcgtcaaaaccaaaatacaccaaaaaaccagacccaaatgcccccaaaatcacacgtccatgtactgaatgtggcagaaagttttggtcttggaaggctctctttggtcacatgagatgtcaccctgagcgtcaatggcgtggcattaatcctcctcctaactaccgtgtgcccaccgcggcttcttcaaaacagttaaaccagatattaccaaattgggtctcatttatgtccgaggaagaccatgaagtcgcttcttgtctcttaatgctgtctaatggtacaccatcatcatcgagtattgaacggttcgagtgtggaggatgtaagaaagtgtttggatcacatcaggctttaggaggacacagagcgagtcataaaaacgttaaaggctgtttcgctatcacaaacgtaaccgatgatcctatgacggtttctacttctagtgggcatgatcatcagggaaaaatccttacgttttcagggcatcataagtgtaatatctgttttagagtgttctcgagtggtcaagctttaggaggtcacatgagatgtcattgggaaaaggaggaggagccgatgatcagtggtgctttggatttgaatgttcctccaacaatacaggatctttctacttcggacacatcagggtgttgtttagatcttaggttaggactctaattagtatctatatatatatataatgtctgtaggtatattggatgtttccttctaattaataggtcaatgtacatgttgtgatttgatgataagtataacgtatgtaggatattctgctatatatatgcttaataaagaaaaatatttagttttgtgctttcgaaatgcactgattttctggtatattaattaattttgaatcagatcagaaaagaaaagaaaaaaacacttgaatcaagaaagaaaacaaaacttgtgttgtaccaaaatgtaaaagaaagtttcaaacgtatatccaaccaaatactagagaacagaattgatctcttaaaacatgaaattcataagcagatattgagccgttttgtaaaatttaagccaactaagaaaagggaaaacattttaatttcacggaagcttaattagtattattcttgccaaatttcgttgtttgacttgatctcaaactcaccacgatctccaagactccaaccattctatttttaattattttcttaaaactcttaccattctatcgtatatagattagatcttattccgctagagaatcttagtgttacttatatctaagataaccttgttttcaccagctagctttaacataaacaatgcttaaataaagattgaatcttaaagaaaattattagtctaaagattcagatgcattataggtaaacacgcggaactaattacaacatgcacgaaccctaatccgagacagttttcaattaatcttctcgaatctattaaacaaatattaaatcaattgtccttcaaacaattatcgagctagctagtgcgacacacaaccttcgtgaatattcaactactaactctttttaataacaataactatcgtttacagcgatgcttgttggtatataaatacatcaaaaacaacaaggagaatcttctggtgagatttatttatatcaaagatgaatttccctagctcttgattgattctagtacatggctcgtgttaatcacaggcgcgtgacaaatatgttgtaaaattgttcacgtacattgtaattcatttcatatgtctacatctacaacatgttgacaaaaagtataaatgtatcatatgcatcataatattttatatgttgttgatttgtttatatgtgtttaaaaatggtagatatgaaggcttacgtaagatgaagttgacccatttatctcctcacacgtcctttacatctttgacaagcactccatcctttaaaaaaagggttaactatctatgctcaaacttttttttctcaacatgctcaaatgtagtttactacgacaacttcggctacagtaattcgttagtaagcttgttcagagatcaatcgaagagcggtttgtgaaagaaaaaaaaaaatcattgctaagagaactgcacactcacaaaattagtcaaagactacaacagccagaatcctgatggatactaaaagttttacagaaattaaataataacaaaagttcataaattatatatatatatattattttcaatgaatatatccatatttttgtaggaatatcttcaataaaaaaattatgattggaaatctaattcaatactctcaattctttcagaaaacaagtagtgattatataatccaaaaacattaatttattggatgacgtcgtaagaaaatgtcagatagatccaacatatatatatatatatgaatgattttgacgattcctgattgctgatgcctgctatacgatgttgttttataaaaatatataaaagcaaaacaaaaacttaaaaaaaaaaaattatatttgattttgaagttgactaggcattatgtctttaagttatgtaaactgtaatttattaatcagattcagatccgtacgtaattgaaaaataatcatggtgatattagaaaccagccagtacagcgtacatacatatgttaagtatatatcaatatatgtataggcattagtatataatactgtagctaaatttaattatgtgggaagcacgtcatcgtgggagaaaaacgtataagaactatttacagtatatgcatatattgcaccataaattattagactaatcaaaatatattaggtggattttcgaggaatagtaattttttctttaaatccaggctttacacctaatcaaactataattgtaaaatcaaaactagcaaattgttaatattgaacaattatctcatttaacttctagtgtgatgccgcaatgggtggcgacaaaaataataaattttaatcactgctttcatttaaaaagtcattaaacggcagtgacatcagcttccattatcgcggctttgcttcagaatattaatattatatctatattagtttattttcattcaaacaaagaagtaattatgagataatttagtaaagtagtagttacttactacaattaacatttgcctttagatttagcgccacttactaatcattcttagcaattttacgcttacaatatacatgacgctcttggttttgacatttgttaacttataaggaggtttaatcatgtaattaaagagataaattattgtttccgtaaaagcgacatgtgtaggacctgctggattcagacaaagaatttcagtgttagaaatttcgtgcaatttttttatacataaaaattagagagatatttcgtgcacgacaatatatcttgtataaattgtaatataaataaattgtatgtatacgttaacgttaaaactgataagttatcaacttatcgtacaaacacgaggatttcaactaagtgttatgaaatatgaggaaacttaaagtaagacgattataatgtaaaggaaaccatttgtttagtgaggtctttggatgcggcgagtcggggatcggacgatgaagaagggacgatgactcctcagatcgctgagagccgtttgatccttactttttggagcaaagtggcttaactacttaacccatatttctctcatctcaaagccttgatgaccctttgcaaattattttagattatttctataaatgtcatctactttactattttcagaattgacaaaatcgagaagaacatgtgtgtaagaccggattggatgatgaatttgccgtatagttggacttggatcgataacttctgtcttcatcggtactgaaattgtcaactttcatgttgaagtcgcacattaaaatcttctaaatgtaaaccttataaaagaacgagtgactcaatcacgaaatttctcggatgggtacattgcttagtacactttttacgtacattttgtatacgttttattttccacatacatattatctcactgaatctgaccacttcgttgaatcttatatatgatgaatcatcttctttggttatgttattgtacttatgcattctgaactaggtgtagagcataactcacatcaacgaactaactgacacaaaagctataacaagtaccggatggtttctacaacgttctctgacaaaaaaaataatggtttctacaactatcactaagttttgttttacaaaacaaaaagtctaactaatccaatcaaccgaacaaattaattcaaacacatgttaattattgaacacagtttatagagtttaatgagcagctcctttttactcttcgtcatcaacgacctacatttgcaatttttttttattaatattcgtgtttctttcactatgaacactctctcttcttttcaacaaaaaaaatctcttttcaatcaagtttttgaataaaatgctttcttcaccagtcaccacacgttattctagcacaatagctctctaaaagatgcttcattcttagctacttcacactcttttcatatttgtttcaacatgatatcttctccaattttatctgtatgtgtgtttgcaacaaatgcctttcttcttctttctagtagaagaatccaatgcacaaacaaagatatatatatctaatatttttaacttttcaaaaattaagaaaaataatatttcatatcaagcatatatgtatatccgaaagttaatatatcatatatacaatcagatatatatcacatatcgttttaaaccgttcatatatacataattttttataaattaacctactgtctgtagtgttggaactatggaaagtgatattttgaaaattaacctgtatacagtattgttgaaactatggaaaatgatattttaaactgttattaattgaaattactgtttctttttttttggacaaaaaaattactgcttctttgtttcattttcctttaattgtacacactttgagaaaaaaaatcatatgttcaaaaattaagaagtttaagaagatttctaaatgattcaagtacttctgggatccatatataacacacataaattccttttaaaaaatctaaatttatgtaaaaatgtggttattttcatatctgttttggtcaaatatcccaacatttgttattgaacttcaataattcaagtaatttctaaatgatgacactttatagccatcatggaaaatggaaagtacgacgtctatcattatagtttttaaaaagtttgctatgataaattagtgtgaacttttataaaaaaaaataaaaaaaattcaattaggcaattagctagtgaacgaatcattgtataattcggaaaaaaactatttcagcctcttcttccatgaatcagactcacatggatgccatttgaaagcatgtaattaactttcagaaaagcattaaagttaacaatttcaatgaatatatataacatagtttaaaacctcttttgtactgaaatcaatacaaaactcaatcttatagaagaagagtaactattggctaattattttaatttgtatccttgtatcaatctatgtgcatacacacacacacacacacatacacatgtatatatacttattagttattacgtacagagagatggaaaaataaacaccatggcaaattctgaaaccaaaagaaagatgaataaaaagcaataatttattcaaagggcgtttaagaaaatttcaaactttgtaaacaaaaatcaatcaaacaaattaaataaaaaaactagggctgaggtcagaaagggattattgtttttgagaggagtaaattaaagaaagaatcttgaaggtcaaaataattaatgaaacctgttcaatgacagacattgtcttctgcaaagaatctttctccctcttctttccattgatacatttacagatcgagtttaaccaatcaaatgtacatatttgcttacgtaatcaataattaattatacctaattaatatattaaaatttggaagaatctcaaacaaataggccaaaagacatcaccaactacatcattaagaagaacaatcatctcagctcttaaaaaaaccataacttctcaaaactctctttttttctatttctcaatatcttcgcagaacaaaacagagaagcatggtgagattattttttgctaaactaatgtaagtgtgaattttaattagaagaaacagtagagagatctaattggatggtaataaaaagggtccactttgttcttggggaaagattctgcacgcccacatggtgagattaaaatagactaatattacccttcatcacctacttgtgtccagagagagagaaaaaaaaagaacttgtggtgatgatactatcatctatttgagagctaaagaatttttccttaagctttttttttttggttcagaatcttttcatcatttatgtgtctgtgtaccaataaacatagaccaaacaaacaaaacctcttaataactgaaaaacagagcaaaacttttgtttttctgtcagttaacttacttcttctgtgtgtttgaaacccaaagtcaattcttttttttcttcctgaaattctctctacttgctcaaggaatcttgataaagtaagtaacttttttctctttcaagatagtaactatttctgggttttttttggatacttgttgtgttatggagcatcagaagatttttttgttctttggaaactgatgtcatgaagcgcatcatattcttaattttataattccattatctttttttttcttcttttcttgtgtgtggcatttattgtctgctggaatttttttgtatgaattgtctttgaagggctcaataattggccctcttggagtttccatgtccattggggaatattgtacttgagaagctgatgttagtacttgatgaatccttctttcaagtcaactctctctagcttttatatactctctctatatatgatctcacatctcttaaaatctattatatacatgttgaaacacacttttgatcttccagttgacaaagactgagttttttttggctcttatcttgtttcttgtttggttcttgatcatgtttctgcaacctttgcagatcggttatgtagacaacgacgaaaggaaccttaaggggacctcaaagacgcttggtcttgctggttcttgaattactacaacatcaaagaacaagtctttgaataatttgattggtaggcttttggttgatacaagagaaagagattgttttgatatggaaggtggtcgtggtggtggagatggcaatttcttaccaaactctaactttggtgtattctctgactccgctatggatatggatttcatggatgaactcttgtttgatggatgttggcttgagacaactgatggtaagagcttgaagcagaccatgggacaacaagtatccgattctactaccatgaatgacaacaacaacaactcgtacctttacggttatcaatatgctgagaacctttcacaagatcatatctccaacgaagaaacagggagaaagtttcctccaataccaccgggctttctcaagatcgaggatctctccaatcaagtaccttttgaccagtctgcagttatgagttctgcacaagcagagaagtttctccttgaagaatctgagggaggaagaagatattggattgctccaagaacaagccaaggtccttcttcatcagtgaaagagagattagtacaagctatagagggtcttaacgaggaggtgcaagataaagacttcctcatacagatatggctaccaattcaacaagaaggcaagaactttctcacaacttcggagcagccacacttcttcaacccgaaatactcgagtcttaaaagatatagagatgtttcagtggcttataatttcctggctgatgaggattctaaagagtctgttggtctccccggtcgtgtttttcttaagaaactacctgagtggacacctgatgtgcggttctttagaagcgaagagtatccgcggatcaaagaagcagagcaatgtgatgttcgtggatcattagcccttcctgtgtttgaaagaggtagtggaacttgtttgggtgttgttgagattgttacaacaactcagaagatgaattacaggccagagcttgataatatctgtaaagctctcgaggttttttctcttcccttgatttctctaactcaatgggaagttttgtttgtattgtagcgtaaagaaaattcttgtttttttttgtagtctgttaatctaaggagttcaagaagcttgaatcccccaagcagagaggtgtgtaaaaatggtctcctaaatcaaacccttacttcatcaatacatagaaacaatgaattttggttgctaaatgtcatatgccctttttgtttcagtttctgcaggtctataatgaattctactatgctgcattacctgaggtatcagagtttttgacattggtctgcagagtatatgacctgcctctggctttaacgtgggcaccgtgtgctcggcaaggcaaagttggatcccgccattctgatgagaacttctctgagtgtgtttcaactgttgatgatgcttgcattgtccctgaccatcagagtcgtcattttctagaggcatgttctgaacaccatctgcttcaaggggaaggcattgtaggaaaagcattcaacgcaaccaaactgtttttcgtgcccgaagtaaccacttttagcaagaccaactaccctcttgcacaccatgctaagatctctggtctacatgctgctttagcagtcccattgaaaaacaaattcaatagttcggttgagtttgtgttggagtttttctttccaaaagcttgccttgacaccgaagcacaacaagatatgctcaagtctctgtctgcgacccttcagcaggatttcaggagcttaaatcttttcattgataaagagcttgagctagaagttgtatttcccgttagagaggaagttgtttttgcagagaacccacttatcaacgcaggaaccggagaggatatgaaaccattgcctttggaagaaatttctcaggaagattcttcatggatctcacacatgataaaggcaaatgagaaaggtaaaggcgtgtcactttcttgggagtaccaaaaagaagagccaaaagaagagtttatgcttacatctggatgggataacaatcagattggatcaggccacaataactttctttcagaagctgagcagtttcaaaaggtgacaaattcaggactcagaatcgacatggatccaagttttgaatcagcttcctttggtgttgggcagacattactaggcagtagaagaccaggtgagaagagaagaacaaaaacagaaaagacaattggtttagaagttcttcgacaatactttgcaggaagcctcaaagatgcagccaagagcattggtggtaagaaagaaaacttatagttattatgtctatcttatcaatctctcagaaagtgatgattcattcacgcagtttcattttcatgttgcagtttgtccaactaccttgaaaagaatatgcagacaacacgggataacacgatggccttcccggaagatcaagaaagtggggcattcattaaagaaactccaacttgttatagactctgttcaaggtgttcaaggttctattcaacttgattcattctatacaagtttcccagaattaagctccccacatatgtctggtactggcacttccttcaagaatccaaatgctcaaacggagaacggtgtttcagcacagggaactgctgcagctccaaagtcaccaccatcatcttcttgtagccacagctctggttcaagcacctgttgttcaactggagctaatcaaagtaccaatactgggactacctcaaatactgtaaccactctgatggctgaaaatgctagcgcgatcttgaagagagctcgtagcgaagtgagacttcataccatgaatcaggatgaaacaaagtccctctctagaaccctgagccacaaaacattcagtgagcatcctcttttcgaaaatccacctcggttaccggagaatagtagcaggaagttgaaagctggaggggcctcaaaagtgaaagccacatttggtgaagccaaagtacggtttactttgcttcctacttggggcttcagagagttgcagcatgagattgctaggcgttttaacatagataatattgcaccctttgatcttaagtacctggatgatgacaaggaatgggttcttctgacatgtgaagcggatctcgaggaatgtatcgacatttatagatcatcacagagccgcacgatcaagataagtgttcatgaagcttctcaagtcaagctgggaggttcttttggtagcatcggtcttggtccctcgttataagctatcaggtataaggttgttacctgcaagaaaagaaaagaaaagagcaggagattcgactaatttactagtgtgttagaaaaatattactcaccattttatagcaatgggcatcgtttgtaaacatattttcagtgcccccattttgcaagcagcagtagtggactggtttcctgcatcggcttagcagattttttgtataataaggcgatgcgtaccagagaaacatgcttatatgtatgtattattattgtctgtacatcatttgtcttctggattctactaagctctgcaagtatgttaaattgatatatcttctacatcgtcacttgtatttattttcttacttaactatgcatgaaattcttaagggtgctttttggggcatcaaagcttactgtgtacaaacattacagtcaataaggagttagtattcagaaagaaacaagaaaaaacattatgccagtttgaaagtaagaaaaggctagacgttttacttatataggcaatgatagtcatataaacacagaagctatttttggcagaaaaagtagagaagaaagtgtatacttggatggtgaggacacatgatatttatagagattctcttggtttttaagcaggaatatgtgttcaagagagagaaccacctagtggagtgatcttccaagttcctaaccagagtatctctgttaaatcctcaaatcagtatttgttaaagaaacaagtaagcctgcagacaaaaggttctcgttttggtttgtttttgtttctttctgattcagtgagtgacacaaaggaagatattgatcctgaacctatcattgccacctaaacttcagagacaggagaaaacaacatggaaaacaaaaaacctatgtcaagagaatcagaccaagtgtacctgattgtaccatttggtactaaaaatcaggatgacgaaggagttgattcacgtgactatgcttcgaatctcttaacattgccaatctccgtgtttctaagacttctttcaccaaagccttgatgaaattcgagggtgcaagttatgattttgcaaataatgtagtactctgcatgatcaatgattttgcggcaattttgtaaatatctgaagtgaaaaataagcaaatgtcaaactaaattaattactgagtaaatgttgatgaagttaaatgattggggggatttgtataaatatcttaattgacgattctgaaacaaagtggtctaatcggtgattatctattgttttatggaaatatcttaatgagatgaagattttggggcgaattgtgtaaataactaaattttaacaataaacgcttttcgtccgcctccagctcccaaaagccaaagggcgaatcttcttcttctctttcgatcaaatcttttcagattcaacccaaaattgaagacaaaaatgtctcgcagatcgctaactctcctcaagaatctagctagaaacgcgaatggatcaggtattcaaacccgatccgtgacttacatgcccagacccggtgacggagcaccacgcgcagtgacgctgatccccggagatggaatcggtcctctggtgacgaacgccgtggaacaggtgatggaagcgatgcacgctccgatcttcttcgagaagtacgatgttcacggagaaatgagccgtgtgccgccggaagtgatggagtcgataaggaagaataaggtttgtttgaaaggtgggcttaagactcctgttggtggtggtgttagttctcttaacgtccagcttaggaaagagcttgacctctttgcttctctggtcaactgttttaatttgcctggtttacctactcgccatgagaatgttgacatcgttgtcatcagagagaacactgaaggtgagtacgcggggcttgagcacgaggttgttcctggtgtcgttgagagtctgaaggtgagaattccgatttctgctcctcgttttggattcaatctgtatttgtggaatcatcttcgtttgcaagtggtctttgtatgttatgtgtgattgttctgatcctatttctatgcttaggtgatcacgaagttctgttcggagcgtattgcaaagtatgcttttgagtatgcctacctgaacaacaggaagaaagttacagcggtgcataaggctaacatcatgaaacttgcggatggtttgttcttggaatcttgtcgcgaggttgcgaaaaagtatcccagcatcacctacaatgaaatcattgttgataactgctgtatgcaacttgtagccaaaccagagcaattcgatgtcatggtatgtttcagagttatatacatatgaattttcatgacgttctttaagtcttcgatgttttactttgagaaaaagataccagtcatctctccctagtttggtatccctctagattgcctgttttagagtcatattatcttattggtatgagactgatgttgtgttgccatatactatagttaatcgccccatttgcatactatttaatctcgtcatttgcatatcatgctttcagggaatcttttaaattgtacttctgtgaccttgtctatgtatacttactactttgcatacactattgttcgttagagcagtaacttcactgttgctaagtattaacctttcattactgtatgtagtagcgtcttttggcttttccccccttttataacagcaatttatgaaatgttttgcaggtaacgccgaatctctatgggaatttagttgcaaacactgctgctggtattgctggaggcacaggagtcatgcctggaggtaaaaaaacatcctgtattgatattctctcgagctatacattagtggataaagaatagttctaaaatttatacatctgcgacattaaatacaaaaacaggaaatgttggggctgaccatgcggtattcgagcaaggtgcatcagcaggaaatgttgggaaagacaagatagtattggaaaacaaagcaaacccagtggcattgcttctctcatcagcgatgatgcttagacaccttcagtttccttcatttgctgaccggctcgaaacagcagtgaagaaagtcatcgctgaaggaaagtgccggacgaaagatcttggtggaacaagcacgactcaagaggtcgttgatgcggtcattgcaaaactagactgactttgacaaattacgtgttcccgctctgcataaatcatcaaattcctgatacagattttgtgttgccaaaatatggggtatgatccaagcacaacggttatctggttttgtacctcgagttttattatattctttagccgtggaatatttcgataagaaaaaaaaacatgttccaaataattcatgttgctacgtttgttggcgccttttgtcatgtcaaagtttcttaaacacttgttcgtggaatatgcaaacttttatggattcgtaatttcaagaatatgaatgaaaaattgatggtatctttgatcacctcgaatggtggtttcttaagagcatccacattggttaatttttgatggatgtttttaaatataaaactttattttaagaggtttttgagtagttaagaaactctaacgtgtcattgtgtgtgtggttgaacattgtgacaacatcatttatttatttttcttttcgcgtttttctctcttttttagtccatatgatttttaatatatatatcatatttgtttaaaattttaatatttgtattatttattaagttttataaaataaaatataaataatttttattttaataataatatatttttttaaaagacccacttaaacattagaccaaaaaaaattaatggtccaacaaaaacactttaattttttataatttaaaattttaaaaaacccttttaagggctcaaccattggggttgctcttactccaagtctttaatttaatttgtgaattaacattgactaattttaaaatcacttgaaattgtttcatcggatttgggatgtcacatttggtacccggcaagttcgaaaatgacttttaaactttgacacctcttgcctcttggtagagttttggatgaggcttgaaacttttgtattgcagcccataactgaaaatagtttattagtataatatatcttctcaacaaacattgcaaatattttgaaaatccagctaaaactatacccgatcagaattagaaaatttgagcccaagcccggcccgtaagtattattatagaaaccgatataaagtttcctttttcttaataatatttattccgtggcagcaaatgcaagccaatccaatgtcaaaacaccagctgacgtggccaaacgcacatcaactgtcgtctctctatctctctctccctcacttgtctctctctcttctcttcgacactgatggcttcgctcaggctccccgctcaactagttacacgtggcaatctcatccaccacaactcttcatcctcctcctccgggcgtctgtcttggcgacgttctctcacaccggaaaatacaatcccgctcttcccatcttcctcatcctcatcccttaaccgggaacgatcaatagtagttccggttacatgcagtgctgcagcggttaatcttgctccggggacaccagtccgacccacgagcatcttggtggttggagccactggaactttgggaagacaaatcgtccggagagctttagatgaagggtatgatgttaggtgtttggtccgaccaagaccagctcccgccgatttcctccgtgattggggcgccaccgtagtcaatgtacgtattcacatcttcctttaaagttactcaaagtatttaaatttgtccaaaagagaactaaaaccggagttttgtgtggtcttaggcggatcttagtaaaccggagacaattccggcgactttggtcgggattcacactgtaattgattgtgccacgggacgtcctgaagaacctatcaagacggtaagcttctaaattatatctttttgttaaagactcaatctttagcctagtgagacttattaaagtttgattggcttgtgtgtctaatactcagtttcatgccttggcttgtacgtttgagtgttggattcagttttccaatgtgattgaaagttatgtgtgttcggtttaggtagattgggaaggaaaagttgctctgatacaatgtgcaaaggcaatggggattcagaaatacgtcttttactcaatccacaattgcgataagcatcctgaggttcctctcatggagattaagtactgcactgagaagtttcttcaggaatctggtttaaaccacatcaccattcggttatgtggtttcatgcaagtaagcctcattcccctgaacttatgcgtctagttgtccctgaaagtgagtacatgatgttgaatgtggtaatggctgattgttgtttaatccagagtatactatgcctatggctatgcagggtcttattggtcaatatgcagttccaattctggaggagaaatcggtttggggaacagatgcaccaacgcgtgttgcttacatggacacacaggtgagtaatcaaatgaagatgtactccatttctctgtgtaatatgtggatgaaacacataaaatgatctaaacatgttcctcatgctataacaggatattgctaggctgacacttatagctttacgtaatgagaagatcaatggaaaacttctgactttcgctggccctcgtgcatggacaacacaagaagtaagcaaggctatagttaccgctcttttgaatgaaaggaatagagaaatattactaaagcataaccttttactacccttttgtcaattcaggtgataacactatgtgagagacttgctgggcaagatgcaaatgtcacaaccgttccagtttctgtattgagagtcacgcgtcagttaactcggttctttcaatggacaaatgatgtcgcggatagactggccttctcagaggtaagatttggccttcatcaccaaacaatgatgcttttgtagtttgtttcatagtagcttttcagatcagctgaaatcatgcttctaacatatgtgtgacactggtacgtttaggttctctcgagtgacacggtcttctctgctccgatgactgagactaatagtctactaggtgtggatcagaaggatatggtgactctagagaagtacttgcaggattacttcagcaacatattgaagaaactaaaggatctaaaggcacaatccaagcaatcagacatctacttctgagtttctgaccttgtagtgtcttcataagattcaacactatttataaactgcatttgcaaccatactgtgagattcgttgttgctctgttcttcaatggttattgtgcttcttcttgtaattaaagagaattattgtaatgtaaatgtagcttgaggtgcccagagagattctttgttaccttgaggagaaaccaacaggtaaaaaaagataatgagattcccttacaaaaccatctctgtttgacttttgttcgaggctagggctgtgagcttcttgttacagtgttttcttcaccttaaagtcttcttctcattcattggttcttgttaatgtgaataaaagtgagaaagcttttggcaaatgaatagtaagatgaaataaatgcaagtgttagtctcaatgtaactttagaacctaacaagtggaacaagatcattcattatctatggttgaaatttgctaccactttttgaagaatcgaacaactgcaccaaaatccgtaagtcgtgagtctattactacccatttaagaatccacaatgctcaaaacaatgatccattggatatccaactccttatctcgaccagcaaattcacttttaagatcagaagtaataagtgtttgcaaaaggtgttgtttgagttgttaaatcagtatcttaaaataaaatctttttttctttgcccgaatattatttcgatctaactaatttgtagacacatactaagataaacaacacatagggatagtacgtacgatcatgtttaaaaaatcaaaacctgaaaaggaattataaagaggagaaaaaaatgtggaatctaatcatagggttaggtcgttgattatcatttaggttgtcttgtctatgtcttttcgtattatattttcattgattttattccattgatgtagtactagtattaaaagtaatgaaagaagaaataacatgaaacctcgaaaccacattcacattctgtgttctcccctaattgttctggcctacctagacagcgaccccgatgcttaaccaaagacaatcgatccgttttatgaataaaaattagttacatttttttacacattattttctaattaataccaaaaaaaaagtccacgactacataaactaagtccatatagagttaaaaaaaatactaggtatgcattattgatatatctcacttcactaatgccaaattgccaaaggtacacgtttgttctgtttaaaacttttcagatcattttgatttgtttctcaacttgaaagtcgatcgtaggaggaaaaataatctcaataatagaggagtaaatgaataaaaaaaaataaacatagacacatggaaatatataagtggcatgatgaccaaagtgatctccatccaactacaaaactttagtggcagagaaagaagataaaatccaatgaattaatgctcttcacaatcagatcagaccagtctttatttttctttactatatatactttcttgttaattggtatttagatattgggagggacagttgctttctgttggatattctcttttccttttgacatggctttcgcataaatatttaaccttttccataattattgtgattttataaactgaattctatataattcatgaaaccaattttttatattcaaataataagtattaaaacgatacttattgttttagaaatagaagagtttaaataattttaacacaaaaagcaaagtcgttcactccaaaaaaacaattaagcagagtctgcaaagcttatgagaagaactctggttccaaggaggaacaagaagaaagtcaaagcgattctttcgagttgaaatctctgcttctttctttttttgtcctttacaggaaaaaacgaagcttttctattcgttggcttcacgagaatatactctttggttttaggaccctttgttaaatatttttcttttactgtaattaactaattgtatcgattttagtaatttatttgtttttccttgaccattattttttgaagttatgtcgtataatattcacaagaatactgggaattttataatgtaggctttgccatgtgatctatagcggcattaattagtttaaagattcatatactgatatacctagaggctagatttgcaaatttattttatgagaaacatataagtgggttagtggtcacacctttgtagtttctctatcaaatctaaagcttgaacttttgtctaatcaacctaaagaaatttgttattaaaaatcaaaagttacctcaaaatatctcatccactactgtcatatatagaaggagagtttcttgcagtgcggatcacaacaagccacccaaaacattcgcagcaatggaaacatttcccttataattcacaacacttggattttctctttttccttattaaaggtttctatcgaaaacacacgacacctcaaagtcatacatagcacatgatggtttggttgaaccaccagacaaataaatatatcaactcagaagaagaagaaaaaacttatttcgattaaaaaggaacagtgtatcaaaaacccaaaatttccttaattaagtacttgtatgtactgcatgcataacatgactaaaaaattactgtaccctccctaagactatatagtattaatacaagtattaatactatatacacacataattaatactatatacacacataattaaatatgaagctaagtgaaaaaaagcatgtgtatagtgaacctttttacgccagtgaaatgtgtcacctgtcgtcgcccaattattctgtgccgaattttctccttctttcaaccctttcttctgtgttctctttattcctcctataaaccctaaattcaatccccttgcattaatgaccatcgcattaataaccataaatatatcttactcaccagtactttattccaaattcaccactaaacagcagaggaataaaatagttgtatggattatactagttttagatttgtttctgtatgcgttaataatgcataacattatctatcactggcatatacgattgcgttaagtatagataaatgatcagaacttatcagtatttgcccaaaaaaaaaaaaaaaaaaaacttatcagtctataatggagttgtattctactgatttgcatatgaaatcgtgacatttgaataagtacttccttaaattgaaccgttatcttaacaataggtaatatatcatgcagatactttgctcttaaattggcagaagaactcaactttttaccagcgttaattttttagaaaatttatatatgtattctctatggctcagtttaatacatcaacgttttactaattttggccacaacttacattacataattcgtgtgtacatatgtaaactggaaaccaaatgaatatcagcagcttaacacaacacttagaatctccggaatgggtgatatcccaagtttttactgcaaattttttagttactttgtataatttttgtactatactattctaatgattaaataaaatatgatgattaatctgatcgaagtggagtatagtaaaaattaaagtgcactagcaaatcaaataattggaccttcattataagccaaagaaagacaaaaaaaaaacgacggtgttatctagatcccagaatgggaaaaagtaatggtgttgagcttgaacgtgcttaacttgataagctaaagaaagtgaggaaaataaaatgatagggacaagaagacgaagaagacgtcacaatgcattaaattcaatgttttagcacagtactgttaaatattcctttttaaatttcacttctacattacaaacacttcaagtatactataaagtatttacttcatcactctttccccaaaatgtaacaatcaattgacttattgaagttgggtaggggaccaaagtataactttctcaaaatatccttacctctgaatcaacaggcctcttcttatattctgcacctaacatcactaagattttggacatttgtcaaataattttgcatgacaattatatatgatctcaactattttggatttcaggtaaagcatgaatactaattaacttttgccatatgaaaccacctatatatgttattgagtaattgggcttttgtccacactccccgtacgtaccatttatataatcctcttttcatgaattcgtaacagtgtggcacttggatactctattatgttcgttcatgcgagttggcatgagatgttacgagttttgtcaacattttcatctcggacggtaaaagtatagagattcaagggaccatttttctaaagagagtagtgccaattactaattgaatcatctgcaatacagtgaataagatttatttggtctcgttacaataaatgttttaaacggaaatttattaagttggttcatttgtttagcagtatatggttccaattatcccttcttcttctttttttttttttttttttgtgtagagaaaacacatggatttttgctatataaaacattaaaatggccaactacaattcgaaatcatcacacgcattattttgtttttggttgaaatcttagcgctaaatctaaagatgtataagctttttttatcatttgattcaactcaaacactaacctaaaataggaatactttaatttcttttctttttttactttcagttaccatgtgcgataaaaaagcagacatatcaattaagtgaaacaccaaatttatttgtcttaattttggaaaggataaaggatctagcatatatgcagcaaaaaggcaaatattatgaccaaaaaaaacaagacaaatataaaaaggaaaaaagagtttaataaaaaaaagttaaaagaaaacagaagggacaaaaagagttgcttctgcatcaagttattctgcgtaaataacatttatatatcagttacaaggcttccatgctaagtatcatccttatcggatgtcaaaatatccgaaggctttgtttgatttctctacattatttttgtgatatatatagttcgtcaccacattttttgtcgctacggacctgatttggtttcttgtgacaatgtgcatatatagtcattactaatacagtaatatatatcttctagactgttcgttctagtcggtcgacacaagtttttaaaaaatcgttgttgtgcgaaattgtgaatccggttaatcaaaatatatctgttttgttttgttttgtagaaacatgtctttcgcatgttctttaaaacatatctatgtaaataaatgtgcgtaacatatataacgcaaacaaaattcacgtgtttcttcagatatctgaagatagtaacataacaccttagaacaaagatttcgatgtcgttaaagggttactatatacttgagtgcgctatcaagtagtttctctcctgcaactctcgctacaagcttttattcgtgtgtttacatttaaattgtccacacacctcgtcacgcacttttagccttcttcattttgatttttaggtccataatattttatatataagtagttcaagcagttaaagaaatgttattttagcagtaactatcagaattatgtacaaattctatattagaaaaaaaaaatccctcatcgttgtttcagcccaaaaaaacgttatagagtgaagatccaaatttatttatttttttaaaaaaatcccaaaacacatggttgactcttgcaattttgtttaaattgaccctttaatgctacgataaaaagtatatataccgttttaatttgcggagtaccgatctcaataacaaatagcaataccgaaaacgttaataacgtttatctcttaagattttaaactattttatactattcgtttactgttttttttactctgactagtttttatttgtgctggtttcaccaatcgatatcgattactagatgctaattaaatttctaataagcttgttttgttcagatgataatataaaaaatcaattcaacaaaaaagagtcagtctagtcaatgagagaggaagaaacatgacgacgttagcatcacacctgaagcctgaagtgcctgaaagctaacaaacatcgattttagttacgtctctagtttgaacacaccaaaccaacaactgtagtactattttaaatcaaaacaaattccattacattcctttgagaataatcaataaatcaattactactaattaatagcaagacataagttcaatacgaatctcatcacttaatttcttacgttacccgttaccatcaacatgtcgaatttaaattgtccaaatcaaatactgtcgttacgtaattaaagaacataattaagggaatgacacaaaaatggtcaaaacgagtcaaagttaccgtcaaaccaaaccacaaagccaaagtagaaaagtagtccacttatacttacacgttattattaacataaagatcaaaaattactagtagtactaccgtatctctttttctaagatccatgtctgaatctctctcaaagtactgtcctaaaaaggttaaattttcccaacaaaaaaaatctaccgtgtaagaattttcaggttaattaattttctgaaaaaggagattatggtaaattataaaaaaaaagaaaagaaaaaaacaccgactcaatcctatggaagaaacggacgaaaatctcggtgctggcaagattccttcacagtccttttgctgttttttttttctttctttcttcttcttcatcttcttcagctaatatcattcatttttatctctttttttatcttatagagaaaacaatcacttctttcatttgtatgtaatctctatcaacatcaacccacaccatctttgccccttatgcgcctccatctcttattcctctcacctacctttctttctctttctttacgaaaagtcttttaatttcaattctctacacctgatttcaaatcttgggtctctctctctctctctcttttttttttttctttataatttaatttaagttgattcttttttttttgtttctttttttctttgttgttttgggtttggaatcatattattgagtgttatgggttgtacaagttctaagcttgacgatcttccggcggttgctctttgccgtgaacgctgtgctttcttagaagctgctattcatcaacgttacgctttagctgaatcacacgtggcttacactcattcgcttcgagaaatcggtcactctctccatcttttcatcaatcaccaccaccgtttcgtcgcttccggcggcgctaacgtcggtgattctcctcgacttaatcttcctcctcagagaaaaggtgaccttgacgacgaagcaacaaattccccaaaaaaacaaaagcttgcttcttctcaccacaaccacaaccacgctcactcgggttccggttctgattcgggtcatctcgaattcgattcagattccgacgaagatgaagaagacgacgacgacttggatttggattcgttgcatcaccactctcctccccaccaccatctcggcaatttccctattcccgaatcagcaccaatgggcggatacatggaacaacaaccgggttatataaacccgtacccgaatccagatatgatggggcatccttactctggaggaggaagttatatgcacatgaattacatgaagaacaaatccatgcctccttcagttgtctatgagcaaagaccaactagtcctcaacgagtctacataggcgaatcatcatcttcatatccatatcctcctcaaaattcatattttggatactcaaatccagtacccggacccggaccaggatactacggttcttcttctgcttctacaactgctgcagcaacaaaaccgccaccacctccaccgtcgccgcctaggtctaacggttgggattttttgaatccctttgatacttattatcctccgtatactccgagtcgagattcgagagagttaagagaagaagaaggtataccggatttagaagacgatgattcacattacgaagttgttaaagaagtttacggcaaaccaaaattcgccgccggtggtggtcaccaaccaaatcccgccgccgtacacatgatgagggaagagtccccgtctccgccgcttgataaatccggtgctagtactagcggtggaggtgatgtcggagatgcatctgcgtatcagtctagaccaagtgtgtcggtggagaaagaagggatggagtatgaagttcacgttgttgagaagaaggttgttgaagatgaggaacggcggagtaatgccacggcgacacgtggtggtggtggaggaggagggccacgtgcggtgcctgaagttgcgaaagagattgagaatcaattcgtgaaagctgcagagtcaggaagtgagattgctaagttacttgaagttgggaagcatccttatggtcgtaaacatggtaaagctttgatctttttacaatgttgttacttaaagttttcagctttctgtaattggttaagtaaagttttgaacttgtatttgttttgtgtcgtgtgaattggaagcagctgcttcgaagatgttgcacggtgttactccttcgttaccttctacctctggaggaacttcttcgtctgctgctgctgctgttgtgccacctacttatgcagatattgaagaagagcttgcttcgaggtcgaggaatctttcttcgacgttgcacaagctccatctttgggagaagaagctttatcatgaagtcaaggtaatggttgattttgtttttgtatcaaatctttgatcttagaacactgttcggttctgttctgttcctttgttctgaagagagagttgttctttgtgtaggccgaggagaaactgcgtctagctcacgagaaaaagcttaggaagctaaagcgtttggatcaaagaggtgccgaggctatcaaagtagataaaacgcggaaattagtgagagatatgtccacaaaaatacggattgcgattcaggttgtcgacaaaatatccgtgacgattaataagataagagacgaagacctgtggccgcaactgaatgcattgattcaagggtaaatataaacttgtcttctccaaatatatacaatgttctagatatttgcaattgtagcgctaatcaaatgttgatatcggttttaattaggcttacaagaatgtggaaaacaatgcttgaatgtcatcaaagtcaatgtcaagctattagggaagcacaaggtttaggcccgataagagcaagcaagaaactaggcgatgaacatctagaagcgacgagtttgcttggacatgaacttattaattggatattgggattctctagctgggttagtgcgcagaagggttatgtaaaagagttgaataaatggctcatgaaatgtcttctgtatgaacctgaggaaacacctgatgggatagttcccttttcacctggtaggattggggctccacctatctttgtcatctgtaaccaatggtctcaagctctggataggatatctgagaaggaagttattgaggcaatgcgtagtttcactacaagtgtgcttcagctttgggaacaagatcggttagatacgatgatgacggggcatggtgattcagagaagaaagtcaggaacatggacagagaagaacagaggatacagagagagattcaagcattggaaaagaaaatgattcttgtggcaccgggtgatggtaacagtctttcgatatccggcaacgttgtttaccaaagcgatactagcagcgatagtttacaaggtagtttgcaacggatttttgaagctatggagagattcactgctgaatcgatgagagcttatgaggatctcttagagcgcaccaatgaagaaactgcaccacgggaacttgaggaagaagaggaggagtaaaaaagcaaaacaggaagaagaggtttgcttgtcaattcaatttgaatcccatgatcgagctgtttgctgatcttgcaatgccagaatactcggttttgcgcgtctgagactcgggcaaaaagcgcctttcaggatgatgatctaagaggaggcaggaaccgtctggtgaacctaggcattttatgaaattggctttgaaccggatggttttgatgccatggtggagaaaggtttgtgataacttgacagttagtagccacatatgacacaagtcacagatatgagttgagtctaataatttaatgtttgggtctttgtagataagacgcttaggacaaaacttatgatataattctcaacaattctttttgtaaaatcctaaggtaggatatatatagctcaggcaaatctttttttttttttttttttgatctcggtgtattatttctctgtccaaatatgctttgttcttgagcaaatggactgacttttagtgtggagtaaagttcggtttatattctaagacaaaacagaaaaaccaattcgaatcttattagatttggaaaatttcatactattcaaaagaatcgcaatcacaatggacaagttccaaaatacaatgtggcagaacaaggatcatccataagaatcttgttctcatcgattactttagtaaatccaaacgaacttacttttcttcccttgcctttgttgttcatttggatagtattgatacattccgcacaaaactgcaacatgagatttttacaattaactctgaaactccaaaaataaaactcacaaaacttctgttctttcacgtctcggagtgatcacatcacacgtctctttccaacttttcgtaaacgataattttgtaccattgcaaagtaaataaatcacatccatgattttcaaatcatactggtcgccttctgtttttactttttaccgaactatttgcagaaactatataacgtacgcagcattataaactaatctaattagttatcaaataaatactgatatttaacatgcgaagttttatgttttgcctcatcgttctcgtgttggctcttaaaaaaccatgttatgtagatcggagataaaagtagtgaacgatttacgtgaaagagatattcgttaaaagttagtgtttcatgatatccaattatgcatggccaacaagatactaggcttagctagataactatagtacgataaaatagagaagtactatttccaatcattagcctggccactgaccacttcaaacattaatgattctcgtgaaactataataatatttaaacccaatcgtctcaagagtaatctcgactatacctgcgccaatagttctcggttcttgaagctgccgtgcctaacatgattagcgaactatttccaatcattagcctggcctctggccagcttcaaacatcaatgattcgtgtgaaactataacaatatttaaacccagtggtctcaagagtaatctcgactagtccatgcgccaatagttctcgtcttgaagctgccgtgcctaacatgaatagcgtgaacttgacgtctcatgtgtcaatcttttttttttgtttctctttattagtaataataaaatgaaataaagttaataacatgcagagaataagtgccagaagttattattgcgatccaaccaaaggttaaataatcagtacttatttagtattaaaatataagtagagatagtgcttgagcatctaatcatataagaaaagccaattactctggagaatcatcggatcacttcactctttgccttttctacacaaagagacagctcttgtgttcttgaaagcttaaagctctgttttccccaaagctatatgtgatgggtattacaaatagcaagcatacttttcatttccatacatctaaattgagaatataccaattattgtccttttgggtggtcattggagtttattcattaagattttgcagttttttttttccaaacctttgatcattttttaaatgatactattatattattttctcaatcaaattattttaagataaatatcaacttatcgtttaatagtaatgtgtatataatgtaataattgattttaatgttgaaaaatagtatttctaggtttccaaactaaattaaaatgaaagtacaaatgtttgataattttacggtgtattttctgtaggattttggtgttatatccacataatctatctataattaataaaatatatacaagtaaaccgttgaaagtttggaagcttaatccatattttgaccatgttttgtagtactaggctagccgtctttattaaaaaaagtaccgcgtaactacatctagttcaaatttggtaatctctaatatgaggttctaaattagcaaaatcatattttaaagaatttataacatttagccatatttgtcttaggttccaaataatacatagttccaaaggcaaataaactgtcttttatggtttagaaagatttctgccttgagagtaaacttcttaaaataaggttaattccaagagatttgattccagtttatttctaggaataacacaaagaaataatcatttttggtaaacaagataatcagaactcaaacggaaagaaatatgtcagtctgtcaaatccattaagaaaattgatattcacttctactctatttagaaggcacgtcaataattcagaaaaataaaccaagtgcatgcgataatgcaaaagaacacataaatccaaaatatcacaaggttacaaagtcaacttctaaaacttcatattttcttcacacgcttctctttacatttatacacaaagtacgaattaccttttgaaataagttgctaggtacttaatatttataagaaaaacaaaacaaaaaactttgggttgaaatgggaatgttcgttgaataaataagaaaaaaatcgagaaagcaaaagtaggaatggttgatgataagtcactccattcacaaacaatttgagctgtcaataatgtgattttccaaaatctcttttggtaccacaatgttttaaatcattggacatcggaatcaatttattgtattatagtatcgtagtatacaaaagaagttggcttcttctgtttttttttggctctgcagttttcaaatccattgttttaaaataaaacataattcgacttcataattataatcaaagtgttaatctttgaattttaataatctaatattagtggtaccatattgacaagaaggagacaatgtcacagaaacttacctcaggagtcaaaacagaagaattgaaaagaaaaaagaagaaataaaaattggatttttatatttgtttcgaccactatcaactctttctctctcttacaaggagcgaaagagaaacactttccgacttgggtaaggaaaaagagtttgatgggttgttgtcaatccttgttttccggcgataacccacttgggaaagatggagttcagccgcaaccactatctcaaaacaatcacggcggagctacgacggctgataacggcggaagcggcggagctagtggtgtaggcggcggaggaggaggaggaggaatcccatctttctctgagttctctttcgctgaccttaaagcagctacaaacaactttagctcagacaacatcgtatcagaaagtggtgagaaagccccaaatcttgtctacaaaggccgacttcagaaccgtcgttggatcgctgtcaagaagtttactaagatggcttggcctgagcctaaacaatttgcggtaagctaaaaaaaaaaacagaaccttttaatttgattgaatatttgttttctgaaatctgttttgttttgtttcttcaatttgtttcaggaagaagcatggggtgtggggaaattgaggcataatcgattagcgaatttgattggatattgttgtgatggagatgagaggcttcttgttgctgagttcatgcctaatgatactcttgctaagcatttgttccattgtatgctttttctccttcttttattgcctcttgtctaaagctgggaactttagtaatgtttgctgatattaggagcttgcatttatggtttatgttagatggatgaaaagagactactttaggtgaattataatgtcttaaaaggtgaatttttgtttcttatcttgttgttgttttggttattcacaggggaaaatcagacaattgagtgggctatgaggttgcgagtaggatattacatagctgaggctttggattattgtagtactgagggtcgtccattgtaccatgatttgaatgcttatagggttctctttgatgaggtattattattttcttctcaagagttatttatttcgtgtttaagagatgccctgtctcgttgcggtgcctaacaagtatattggaatgaatatggtaggatggtgatcctcgtctctcatgttttggcttgatgaagaacagtagggatggtaaaagttatagcacaaatttagcttatacaccacctgaatatctaagaaatggtaaagcaacttgtttatactctatagattattatacaatcaacataaaactcaaatttatagtttttgcactgaaacttcttgaagcaaagatggatctcagtgtgataaattttgtgttgcaggaagagtgacacctgaaagtgttacgtatagctttggaactgtccttctggatttgcttagcggaaaacacatccctccaagccatgtaagttcctatctttatgttttagtaggatgaattgtactactactaatatgtgttttggtgaaattatcttctcattggtcatgcttttgttttaagttatgtgaagctctcgtagtaggtcattgaccatggtttctagaaactgtataatactgctctgtcatcatctctcttgaaattagctaagatatgtgccacgctcttgttctttaaccactgtctatcagatttagctctcaatatgtattatgggcaaggtattagtgattcttggttcttgcatatttaatcttgataaatgtccatgtcatatagtatcaattgaataagatttgtggtattatcttcttctctaggctctcgatatgatacgaggcaagaatattattctgttgatggattcacacctcgaaggaaagttctcaacagaagaggctactgtagtggtcgaactcgcctctcaatgtttacaatatgagcctcgagagagaccaaatacaaaagatcttgttgcaacacttgcaccattgcaaactaaatcagacgtaagctagacatcttgaaactcccaatcttgaccgagttcttaaatttcgtcttttaagtgttaaatattttgggtacaggttccatcttatgtgatgcttggaataaagaagcaagaggaggcaccttcgactccacagagaccactttcgccattaggtgaggcctgctcaagaatggatctcacagctattcatcagattttggtcatgacacattacagagacgacgagggcacaaacgaggtaatcaaatggtagttttggtttcaattgctaaaatgctttaaaaagagtcttgactaacttttggggtttatctatggatttcagttatcattccaagaatggactcaacaaatgaaagatatgcttgatgcacggaaacgcggtgatcaatctttccgcgagaaagatttcaaaacagccatcgactgttactcacaggtcttgatttctggctacttcttcttacatttccgctcagtattagtatcggatttttggttatggttaaagccagatttgccaaaaaaattttgtttatctggatatagtagaactcatatggttacatacattgcttctgtggacagttcattgacgttggaacaatggtatctccaactgtatttggtcggcgaagtctatgctacttactatgcgatcaaccagatgcagcactacgcgacgcaatgcaagcgcagtgtgtgtatccggattggccaacagctttctacatgcagtctgtggcattagcgaagctgaacatgaacacagacgcagccgatatgttgaacgaagcagctcagctcgaagaaaagagacaacgaggcggcagaggatcttgattcttgagacacaaagtgttacatcttgttgtaaaatttgatgagcttcaagaattctttttaagaagaagagaaagaaaaaatacggttaaaaacttgttgctggattgtttgattggggatgtaatgtaaccatagggagagaaaacaattgaatgtttgtttgtatgcaatacatgttgtaagttttaatggtcaaatgtttcgaaaatacaaattgctcttttcatcgatcatgttcttctgctcttcaaactcagacttaacatggtgtaagtggagtgattttgctttccaaatcaatgttaagactcatggcattagtaagcaagattgtactgattctctttcggataattttgaaatccaaaagaatcgttgtggaaaattttgcaaaaaaaatttggaccatttctcgatttatgcgtgtcatcgcagggccatgctaatcttctctgtatcgttccaattttatcggatgtctccgaagggacaatgacttagatcactccaacgctttataaacgcagcttttgctcttcacgtaatcgatgtgggactttttattggttgtcattgttaataacttaaatgggcctctccctctcattctttgtaagcccaattaacattattgatcataattcccaacttaagaatataaagccttttattttaagtaaacacaaagctagtaaagctcaatttcaaatacataagcttaatgggggaattcatctcgttgcagtctatagaaattgtttattttattgacataaatcataggacgttgtattgaaagaacaaaaacagttacatcttaagaatatgttgacagaaatagactaaagttacatctttaggaatgtttgatgttgcagagcccgaagtagcctcactcgttggatttttccttgtcacaagtctcgaaacactgatatatggttgagacagcaagcaagattccggtcggttacgagtattaccctctgtatttatagagattagagacggttgaagacataaaaccaaatctgaatatgatcaggaaaacaaaaacctatttcaacaaggatttatatgttatgaacttttccctatttgataattagtacaaccttgacagattaagagaatttttaatttatttattgacatatacatagaaatgaaaaatcttttttcttcggtgcttcattatcatcaacttggtcttctctgcatctctcttatttcttcctacttcaatctccatattggttgcataaatctagcacaaactgatattcagttcataagctaagcaagcttttgattacggacaatttcggatttggcaggtttgtgatgggagagaatcaatcgatgaggatgcaacgaattggagacccttctgctccaaccagtcttagaggtaagcaatggacagagtagagtcctgccttcacaccatccagcttcaacccctccacgagtatagtctcctgtcaaggttttatgattttctcaaccatcaatatcaaatctacactgttttggattcatctagttagcaagacttaaggacaataatgcttgcttacccggtcttttaggaatactaggtgggatggaataagatcatcatatgcagctactgatagataatcaatccctatattttgacattgatacaccaaaactcagcttagagatcacttcaccaatacacaaccaacaattctaagtcaaaaaatcaaatcttcatataaacaaggagaacagaaatcttcattaccaacaagtttgatgtctgtgttgtctaccaaccattgcgcaccatccttcatgaatccgacatagcttgtatcaaattctttcttgaacataagacgcctgaaacgttttcactcatttcagaaactcaaaagcttattactggtaagttctagaatcaatactacctgtcagtgttcaatgttctgaaaagcacacgactaactccttttggaatgtgaagagatttcatcacttcagctacacaatcaaatcaatacaaagaacaagatcatcgcctaaacacaaacttcttattagcactcatcactgtcttctaatcactacctcacacaaaactatgaagtcaatcaatctaatcaatcaaagtcgcaacttaccagtaatgttcttatcctttggaacatcaaccaacaacgcaagacctacaagcaaaatccaaatccttcaccaaattgagagataatacaaaaatgaaaaaaaaaaaaatggatttgtagatcataccattgaggacttgaagatcaagcgagtcaacatcaaagccagcatcgtaatacttgtcatagacgtgaccaggtgaatcaacatgagtaccagtgtgcgtgggaatcttcatttcagagttattagcaagagatccgttcttcatactcgcagctaaccataggaaccgtccgattccttccgatgagtcccacgacggcatctccggagtgtaacggtgactgatgtcatagattttgccattcccgtagacttcacggcgaatgggtttaagttcatcggtgaaacctccgtcgataggagcggttccgggaatagaaggataggcattggaagcaccggcggagataagaagagaagggagagagaggagtgtgaggaggaagaataatggaggaacggccattgttaggtcactggttggtgattacgatcatcacgaagaagatgaattgattttgaccattttggggttgtttaatttatgggcctgaattaattataggcccaaatcgtcatgacaattaaaacagagcaaatcgtttcttggtgcgaaagtaacaagtccactagttgacacatgcaagcaaagtagcaaacccattgtctcattgaagcatacgatactagaatttcataccataaagtaattttttccaattatcaatataataaaatatgtaacaattgcaaccataaaagttgtaaaattcttgttccttggaatttttgagttcttatgttgagaaagaaagaagaaatggtagaacttaaatgtttcaaagaatgttgtattagttttgtgttagttaacatttacgtattctatatgtacaaaaaatttgtgggtacaatgatttattagatgttaagaatagagactctgtatttgatcaatgatttagagagtgacccaatcccatcttcaagatcttgaatgcatatttctaagttctgcacatcctccatttgtaacgacttttcggattggaactccatgtctactcttgtgaattc

SEQ ID NO: 672 - DNA, 27408 bp, Arabidopsis thaliana
aggttgcaaaagaggaggccagttcgataagtaatataatcgctcaggctactaatcgataagtagtcttattcatcatctatgcattcttatgcagttaaagtatgttccctgtctctggctacagtaattgttttgagaaatctttatccatttgatttttcttgcggagggattttcgtcttaaagcgtaacttggagagaagaaatatgttatgatttggttcataaacaagtaaagattatatcgtttgtaatctttgatttcatgttttccaatcccattctttcattgtgaatccacatgactactatttcagaccaatcttatttgcacatattctctagtccaagagttatggaagaacagtagataaatagccttgctcgactaatgaggcaatgcagtcatcgaacatctcttcaagggacttgaacttgagcccgagactctgtatcttcgaggtgtcaaagtcgtaatgcaacctatttagtttctcaaacctgaaattttcaaacagagtatcatcatgatctatgattttaaaattttacaaggtttgagagatggtttagtttaaagggtcagtgtcaaacctcttggggatagggagtgatgggtaacgagcagataggaatgaaacgagttcctctagactgataacgttagagctacaaatgtatctgccttgagctgcttcgtgttcgaaaacgactatgtgggttcgtgcaacgtcatcgatatgaacataccccatttgtccatgccattggaacttctctgtttctcctgttgtgttatatgacaagttataaccaactgtaacagatgaatattggacccaaaaacgagtcatgtgatcttgcttagagattaatgagaaagtgagtacctttcagtaatccgaggacatcggaagctgtagaacataaatcaggaggcagactgggtccaacgaggaaggatggtagaacagtgacgaggtcaataccattttcttcagagaatttccatgcagcttgttccgctaatgtctttgataaggcataccagaccttttttgttgcatcaaattgtgaaagtcatttacacaaacagttagctaatatgagttttgtgtttagcaaaatagctactctttcacattcgggtaagctagaagacattttgatctctgtcctttcgtaaaacataaaaggctattttcaaattattatacctggaagcgcttgcagagttccacagacgtccaaattgattcgtcaagagggattttgggatcaaaatcatctctgatcctgactgttgaagaggatgaggtgagaaccacgcgcttcagggaaggattcttcctgcatgatcgcagtacattcagggttccttctatagctggtctcagaatctcctcctatcaaattataaggaagaaaaagtcagagaatagataatctagtaacagatacacaaagcatagtgtgaccagaaaaaaaagtttgtcgtggcatgcctctggattagaggtaggtttaagcaccggagaagcagtatggaacactccttggcatcccattatggcgttatcaaaacttccttcttccattaaatcagccttcaccaaccgtagtctctcctttgccccttccaacttccataggtgcgcaagtttcttctcatttcctgtcaaaacatgaaaactaactgagtactgacaggcaccaaatcggaccaagacaaaggaaacaagaaggatagaaagacctggatctctgactgttccgataacttcatatccttcaagtagaagcctctttacaagccaagaagccaagaagcctgaagcaccagtaacacagacttttccctttgcttgatccattttccggtataaatggaatcacacccgaatgattatatagcatgtgtatccatgcatgttcagagggtactagctatatcatgatggaggtaagtataggttaggtaggtcattcaacccatgcggggttgcttcttctttacctaaaaggttttaggagggttgtttaaccaacacaatggcctgactactgttttctctaggaattttcttagagaaaaatatccatacaattagatgtcaacatgcccttgcggctcaccgagagagacacacacaccagaaataagggcattccaatatatttcaatgttcttcaatatacaaaatagtggacaaggaaacccttacaattgttgacactgttagtctttaagtagtcaaaactttctcaatatgatataagtcagaaagcactttacaaaatagacaatactaagtaaggtacagtaacaatctgtaagaaaaaagtgtaaatggtaacgaatcacctgagcacatatctttggtttcaggaaaatttctgaagattttctcagaaccacgctccatgtttcgattccctttggattgctcagcaccttaagtgagaaatgggggcttcaccatttaaaccaacagatggagtagacaaaaaacatccacgctgcaccagccaactcattctccccaaatctcttaatacaaagaacaaaaattggcccggagcctcacagaagaaacaaattgaaatcaccctggtcagctcagaagagttacaaagcaagaccatttacagatacagcgaatttaggaggtacattctggttgctagagccctgccaggtcaagcaagagaaaaggttaagaaaaaccagtatcatctccaatgcagcatctacaccgaaaagtttcaaatgaattgaggaaccttatttgctgggtcaatattttcggtatcaactctaatacagatgaaagctctaaaattaaaaatctagcaaactggactttgcgactcactcctttcctctgatgagcaaacaaaaagttgcaagtaattttttttaactaatttaacttctactacatccaatgtgggaaacctggcagcccaagttatagttacacagactctctacacactcttgtcatatggaagactaggttagtcagttaggttcattaaaaacaatccatatgaaaaggtgatcttgggacaaacagttaaaccgaggggaaatagatgcaggtttacctgcgtgttagagtgatacattctctatccaggaccccaacagggtgtattctgggagcatcaatgctgcctgaaacgactgcaacatgagaaagttcatgcttgttcatgattgtttgggcagcgagaagatccatatcaggtgtaacagtccatggcactttacattttcctccactcctcgaacagatgtcattaacaaaaatatcctaagccaaagaaatgcttcaattaatgatcaaagaaatagttatttcagactattcaatttcgtaccttgggtctattatttccttcttttcttgctttgctgaattcctgaatgtctgaaagtgtaagtataccgagaaagatattgtcaggatcaacaatcaaggcgcaggattgtttctctatcagcatacgagttaatgcctcttccaaagaagtgctcatcataactgtcgcaaatcttgttcgcatggcttctgaaacaaaaatactcttcggcagctcctcagattggttgagagaatcatcaaggcaaagagaactttcaacttcacaaaggttattcgttgatgattcatcatcagatgacgtcagagactgtacagcttcttggctctttcttttcctagtttcttttgtttctctagtttcttgtctctttgattgtccagatgtaatccatgaagacatgcctacagctcccagtagaggtaacactatacgataatcctgtgtaagttcaaatagcagtagtactgctgtaagaggaacttgacaaacccccgcaagtgtagcagccattccaacctgttaaacaatgagacaaacaggatcattggcaatgaagctacaaaaaaactagcatccattctcagttaacccgaaaaaatattctgttcaaagtattgataggtaaccaatcaagaaagtctgaaattaagacaattttgaaacattgaccacataagaacagtaccagaccataagcttgtggagatgccacttccaagatagagagattgaaatcagggttctgagccaaagcaagtccaataaactttccataggccattcctgctgccccgccaataaagagagaaggagcatagtatccaccgacaagtccagaagcccgacaccatgcggttgcagctatcttgaccgctaccagctgaagcaaaagatcagctgaaagacccttcacaaatggacgtttctccaacaaaatatccacattctgaaaaccccagtataatacttcagggtataccaaagctatgataccaacacttaatccacccattacaggaaatacagcctttggtatcccagcatccttgttaagactgtcaacagcagatgtcatggatgatgtacatcgagataatgccaacgagaccaagccacacagagcgcccaataaaagatagagtggaagttctgaaaatcagtgaccagctctcataagtttggtttctggttcccttgcgtaaaaagcataagaatggcaatgcatattacctccaggagagcggaagtcatagtcaggaaccttaaacgcaggttcagagccgagaccgatttcggaaaccacagaagcagtaacagcactaagaataaccatagaagttgtgtttggaagtgaagttgatgaatcagttgatgaagaaggccacaaaacggattcaactgcaaagaagcatccagccacagctgcattgaaccctgtaacaacatataacaaagtcctcttaacgaatcaatcaagagttccatacgcaagagagaacaacattagcaaatatcagatgaacaaaccagaggaaatgccagcagctgagccagcggcaagaagtgagaagccagtctgaggacttttattgaacagagaattcacacctttagcgattgacgctccaatttcaacacttggaccttccggccccagcgaatttccagtcccaagcgtcacacatgcggcaacagtcttaaggaaaggacgcaacactgcctttacgcgatcgagactagaatgagaatctccagtagattttccagcagattctcgaagctgattgaggatgctcaccaccaaaccgccgatagtcggaacaaggataacacgcaaccaattggaaccgatcggtgcctctctaagccacgaagctccacgatcaggaatcccatcccaggaaaagtctcgaagcaagtgaacacagttgttgaatagaaccacactaactccagtgagaacaccaaccaaacaagccgacgctatcgcaagctcctgagacggctgctgatcaaatccaacctcatcctgatcagtctcctgcttcgccgccggtaaacgcgggaaaattctaccgccaatagcgacggaaccgaaaaacggtgaaaggacgacattgaactgaaaaggaacgtcggttttgtgaattggagcgaatctccgggaagagacgggagatcggagggcagcacagagtggaagcgtggctgccatgaacggctgcttccgtgaagtgacgcgtgtttatccattaacggataatttgatcttaaatcacaaatcttacgtggctgatcttattattcaaacgcatgggcttgggccttgaggtaaacaggtttatatgggccaataacaataaatttgattaaaaataaaaggcctcttagctttaggttcaaacttcaatggagaagcagtggctgttgtccctcgcagttgatcttcttctcaatccaaaatccagctgataaataaataatttttctcttgtcgtcatattaaaaaaaagaaagattatctgtatttcaagtttcatgagcgtttgccaccacaacattgtcttttcgggttaatttcttcttcttcttccttttcttactaaattctcttaggtagttgtcgattcgatttctttgtcttcctcttcgcttattttcgttgaatctcttgtttacaccttttcctgaaaacaaaattgtgttttttgtagggttttagtcatacttaatggcttccaattcggagaaaaatcctcttctttcaggtgattattttcttctcagtatacaatctgatctgcgataatgaatcgtttctagtcagatttggttattggttcattgtaatttgtttactgtagatgagaaacccaaatcgacggaggagaataagagttctaagccggaatcagcttctgggagttcaacttcatcagctatgcctggcttgaatttcaatgcttttgatttctctaatatggctagtattctcaacgtaagttacctttgctgttagcacaattgaaaagttatcttctttgagtttttttttaattgataatggttttttttgtaggatcctagcatcagagaaatggctgagcaaatagctaaagatcctgcgtttaaccaattggctgagcagcttcagagatctattcctaacgctggccaggaaggtggtttccctaactttgatcctcaacagtatgtcaatacaatgcaacaggttatgcataaccctgagtttaagacaatggccgagaaacttggtaccgccttagttcaggttaggaattgatgactttttccatctaatcgaggtgtggctttgaatgaagctctgtgtcttatctgattttatttattttttttgcctacaggatccacaaatgtctccttttttggatgctttctcgaatcctgaaacagcagaacactttactgagcgtatggcgcggatgaaagaagatccagagttgaaacctatactagatgagattgatgctggtggtccttctgccatgatgaagtgagtgatacaaacttctttcaatgttttttagagaaactgtagagtttgtttctgtttatgaaggaagaattatttattctgttttaggtactggaatgatccagaagtgctgaaaaagctgggtgaagcaatgggtatgcctgttgctggcttaccagaccagactgtttcagctgaacctgaggtagcagaagaaggtgaagaagaagagtctattgttcaccaaactgccagtcttggtgatgttgaggttagactgcttcctacgttaatatgcttgaccatgtgagatttatcttgcgtgttgcttgaggaattagatgttccaagttttgttttgttgaactcgttattggatttttattcgttgattcattagggtttgaaagctgccttggcatctggtggtaacaaagatgaagaagattctgaaggaaggacagcattgcattttgcttgtggatacggcgaggtatgcaattctcttatcaattcacggcaattaaatattcggatttagatggttctctttttttcagtagctgtgaagttaagaatctttataatcattcaattggtagaaaagtaaccagtctacttacgtctacgagtttcatgacacaattacttatagcaagttcaaatatttggtgaaagagcaatgagatggaactggcgattacttgcatactaaagattttgcttatgaatatggattgaactgagtttaaccctgttgagccctatcaacagttgaaatgtgctcaagttcttatcgatgctggagcaagtgttaatgcggttgacaaaaacaagaacacacctctgcattatgctgctggttacgggaggaaagagtgtgtaagccttctcctggagaatggtgctgcagtgtaagtctcacaacacagtacttataatgaaacaactccattaaacactgtttcaggactttaattatatgtgctttggttgatgtgtgtggttgcagcactctgcaaaacctagacgagaagacgccaattgatgtagcgaagctcaacagccagctggaggtggtgaagctgcttgagaaggatgctttcctttgagctctgctggttaaaggaaagctctaagctcatattgtctttgaggcatttgtcttgtgtgtgtcctgaaccagtttcacaggctttttgtgtacactttttattagttcctctcttcttctaaatttgtctcttatgttgttttaaaagtcaataaagaaagaaatagcaatcaatgatttaatttatgattatattctttatttcgtcgacctctacagaatgattcaatttggaagaatcattctggtttggaggatatgtaagaaaaactacttgatctccaagttattccattcttctgttactgtattgcccaaattcccaagcttgacaatatttacgcaaagctcaaaacccaaaatatttgagaatcaaaacaaaatcaagggtcttgtctttttttttttttttggtgtgaatcaaaggtcttgtctttgcaagtaaattcgttcctaatgaactgtgtgagtcgtttaaagtgtttgataagcaaagcacgaagctttgcacggcttggtggtgaatccactctctctcaaccgccgtctctcgcctccgccgcgttttcttcatccgccgtcatgaatggtctcgaaactcacaacacaaggctctgtatcgtaggaagtggcccagcggcacacacggcggcgatttacgcagctagggctgaacttaaacctcttctcttcgaaggatggatggctaacgacatcgctcccggtggtcaactaacaaccaccaccgacgtcgagaatttccccggatttccagaaggtattctcggagtagagctcactgacaaattccgtaaacaatcggagcgattcggtactacgatatttacagagacggtgacgaaagtcgatttctcttcgaaaccgtttaagctattcacagattcaaaagccattctcgctgacgctgtgattctcgctactggagctgtggctaagcggcttagcttcgttggatctggtgaagcttctggaggtttctggaaccgtggaatctccgcttgtgctgtttgcgacggagctgctccgatattccgtaacaaacctcttgcggtgatcggtggaggcgattcagcaatggaagaagcaaactttcttacaaaatatggatctaaagtgtatataatccataggagagatgcttttagagcgtctaagattatgcagcagcgagctttgtctaatcctaagattgatgtgatttggaactcgtctgttgtggaagcttatggagatggagaaagagatgtgcttggaggattgaaagtgaagaatgtggttaccggagatgtttctgatttaaaagtttctggattgttctttgctattggtcatgagccagctaccaagtttttggatggtggtgttgagttagattcggatggttatgttgtcacgaagcctggtactacacagactagcgttcccggagttttcgctgcgggtgatgttcaggataagaagtataggcaagccatcactgctgcaggaactggttagttctctactttctctgaaagaaactgctttagttagctattttagttatgttgcctagaactacttgactttgtgtgcaatatatgattttggaacgatcttttcaaaggaagtactttttttagtagctctgtgaccctatggcttgtcaagttcttgaggtttagttgcttctatatcatgtgattcaattcacaattgatgcaagcctagtttttgttttggagttgttcttctttgagtttgttgttccatgcttagtagagagatcattgattgttttaggtaacagtctttagagtaaagagtcttgttttcacaatgttcaatgcttattctattcatagagcaataatcgtcattgcaaactctgtttgattgattgtgtagggtgcatggcagctttggatgcagagcattacttacaagagattggatctcagcaaggtaagagtgattgaggaaattgttggaaggctcaggtcattgagttattgttgattgatccctgattcagttagacattgatggaccagaatgagacttgatctttatcatagaacaagttaagatacattgatttgtttattccttaatattgcagttggaattgagtacgggtattgttcaaagttgtagctctaatggtaaaactagctacgacaaaagtcctcttaaaatatgagttttagatgatgccttaacatttcatatattcagtgaacatgatttatccaataatgtattatgtattcttataaattagtataatataaaaatgggtttccagaaatctttaagacatttctgatcttgaagccgagtcatttccagagcttctagaggcttttgaaatgatcacagatttttcagaggaaacggctttggtgaagctttaacactttgatgtcaagaaagagagaaatgacggcttggaagggtcttcaaccgatgacgtcgttcactcctacatggttgaaatattcaaaagagttcataaaatccttcccaaaagtagtcccgattattcttctaaccattcttaaaattcgaaacgatgaatgtgattcttaaatgtggatttttctcaaaattatgtagtcaacaagattgaactatgccttaaataaaaaaagctgtttgattaaaaggttgaattaaatctctactttataataaataaataaaagttcctgcattttatctttgttgttttttctttttgtttgacttgatttagaaatattaaacttttctaatcaacgatataggtttaaagagtttttaaagttagttataaagtgtattttcccgaaatgtattgtgaaataggacttctaaaaaaattgaggttcatacatttttaaagtaaagtttgtgcttatagtagaaatttggaataatgatcaaattcctcgataatagtatgtagcattcttgtaatgcttgaaattgcaatgtgttgcgaccactgaaaagtgcaatggatatatttctgttttatcttattttattggaatttcctataagattttaatcagttatatcaaaacaaattataattatagccagtatagatccgacgttggtgtgtcaagccacttaaaagatgatggaaatggatcagatttactgaataactgacacacgaaattcctaaataattgttttctgtagaagaatatgtacaactagaagataatatatgattaattattcagattttatcttaactttttgttgtaaacgtaagtttttatttggaatggtcatactacaaataatcttcaagcattttataaagagtaaatttaaatatcttcgacacaaaaataaaatatatattacaaaggaaaaaggtaaaagaaaaatatattaaaaattaaatttagtactacattaatgtaagtattaaaaaaaaaaaaaaaattggttcaaaatactaaacaattttagatgagaaattcatccaagaaaattctcaagtaaaagtttttgtttttacttaaaagtttaaaaatctcttcataccaaaaaaaaaaaaaaaaaaagtttaaaaatcttccagatatgcaaatgcatatgcaagtgggggccatgaatgtgacagctggatacaggttaaaggacaacacatcatcgaccacatccccgacacgtgtcccatctcacacatggcgttttcctctctctttcaccatttttttaatttcgcgtctccgtttttacatctttttttttggctaaattgttttctttttcttattattcatttctatatattatattgaaaataatttgattattagtagtactgtagtattattatttcatacaaagtatatatatatatatggcaaaaaatagttgtttaatgcttgtttttttcttcacaaaaattcaccttctacttctccttcttaggacataatgggcctattgatttatctttgttaatccctataacattccaacttccaagtgtaatgcttattttccatataagaataacaaagcttaaaaataaaaaaaaattaacggtcacaacacaaacactattttaacttataaaatggaaataggcaattaggcattgatctccgcagaatctattgcactagcttgcactatgtttattcactttaatctcaccctttttgtcttctcgaaaatcagttgataatatccataaatacggtcaaaatacgtagaaaatacgataaggagagtgtaatagtatagggagaaaatgggaataacgtgatatacatatccacagataagcaataggtcaccatcccacggttcacgttatttccgtcggtttttaaaatcaaaaaatttcctctactgataatgttaattaagaaattaaaattatgtcttcaacttttaataaaacaattaatgaaaaactatcattattgtagtttcattagtgacaaatgacaatattaaaaaaaattaagaaaagtaagcaattattagttgaagaactgaagaagcagaagaagaagaagcagaagaagaagaagagaaaattttgacagagataatacacagatagagagaagagacagagacagagagtgatggaaacagctgtatttattatgagacgaaacaagaacctctgggtttctacttaaactcttctctctttcctctctcactttaaaaatccacactttagagcacacaatacaaaaaataagggtttctttatcttttcgtttcttccaaattttgtaatggatttgatgcaaatggataagcgtttggattcaacggagcaagtggttgaagaaatcatgagaattcacagatctctacccgcaagaccaggaattgacgaagttgaagctgccaagggtttgattgacaacgttgagaaagaagatcaagcttgtttagaagccattgctagacagaggaaaagctctgaagttcctggtgagcttttcatggtgttgcaagaaatgaagaagggttatgttcagtttcgtagcaaagaacagataagagaagctttgaagcttctcgatctggaatctgttcactctttgttcgatgatttcattcaaagagcttctaattgcattgcttctccttcctctaacggctctgtttcgtctcgtcctccgctgcctccggcgactacgacggctgctcgttctgattctcagtcaagtttgaatttttctgagagagctcccgttcgccccaaggatatggtttcgcgagacgatagcttcgtcacaaagtctaagccttcttctctctacagtgatggttttgcagctcctcctcgaagaccacagattctcgattcaacacttaccaccggtaagttaacccttctcttctcttagtcccgttgattcaaagctctagtttactcaattggtactcgaacttatgattctctagatatagaaagtttaggacttggaattgtttaaagtttaaaccttgcaatagattaagttagtaactgtagtgtgaatcgtttgttatgtgtaggcaatgatggagagaagctgagtttgataaaacttgctagtttgattgaggtatcagctaagaaagctacacaagagataaatctacagaacaagttaacggaacaactcgagtggcttccagattctcttggcaagttatcgagtttaacttcgcttgatttgtctgagaatcacattgtggtgttgccaaacactataggaggactttcttccttgacaaaactcgatttgcattccaacagaatcggtcagcttcctgagtctataggagaattgttgaacttggtttacctcaatcttggtagcaaccagttatcatctctgccttcagcgtttagtagattggttcgactcgaggagcttgatttgagctgtaacaacctcccgattctccctgaatccataggttcgcttgtgagtctaaagaagctcgacgttgagacaaatgatatcgaagagatcccatattctattggtggatgttcttctctgatagaactccgtgcagattataacaaactaaaggctcttccagaagctattgggaagattactacattagagatcttgtctgtgcgttacaataacatcaggcagttacctacgacgatgtcttctttagctagcctcaaagagctggatgtgagtttcaacgagctcgagtcagtgccagagagtttgtgttttgccactacacttgtgaaactgaatattggaaacaatttcgctgacatggtatcgctcccgagatcaataggcaaccttgagatgcttgaagagcttgatataagcaataatcagatccgtgttctacctgactccttcaaaatgcttacaaagttgcgtgtgtttcgtgctcaggagaatccactacacattcctcctcgtgatatagctgaaaagggccctcaggttctgttctctctctctgtgtctctctatgtcatcatgtgtctagattctaaatggtactcactcacggatgagttcatcatacttacaggccgttgttcaatacatgaatgatcttgtggagacgagaaacgcgaaatctctaatggttaagccaaagaagagctgggtccagatgtgcttcttctcgaaatccaacaagagaaaacagagcagcatggagattgtctaacacagctgataatgtctctgaccctaaatcaggtaacactttcctttaattcccaaactcaaaaatcaagattcactctcagtattatacaaatacaacaaataacacatgttttgtttttccctccttctttcaggtaattctgttaaagctgttgacagcacaagtgacaaacatatccagctatcttcttcacacgacaatgcattgatttgcattgcaactccaagtactgtagatgtttcactattcattctttgtttgtttctttcttcactattcacatgtatcaatgtgcacaacattgtttcattcatgtctctccacatatcatagagcccatcccaaaacagaatcgaaccatgtcccttgtagattgaggttttcattaagctcttaccatgtttgtctatcgtctctggttttgtttctttggtttgaaacttaagacactcacatctgtgtatatggatagagatgtgatgtaaatgtgatggctttgaagtttagaggagagatgtgacatgagttggctttgaacgtggttttgtctagagagtaacttggttaattaatactcccttgtaataatgcaacttcttttttgttttgttttgtctatgtgtataatcgtcacgagacatggtctttctttcatgtgtgttatcatattatgatacatgtgacttcacatgtgaaccaatgaatgaagcaaaactttgttcaacatcaaaaccccatatctctcttcattctgtggaaaaaaacatccagtccatacagagtctttattgggctggatctggggttgcattatttaggcctaatttactcttaattttcttcatatggctccttcaggtataactatttagcaatggcccagcccatataggccacttgtacaaacaaaacaattttactctcactttagtttttttttttaaagaaaaaaaaaagaaacctcttatgttgaaaacttaacgcatcttatgatcaacatcatctgatttggtttaattttgggttaacttcattgaacaaacttgatgtagctttttcgaatgtagtagatgatgtaatatagtgaaaaggtcatattttgggtataggatttgccaactttccataatgaggctggcaaaaagtggtagtaaattaaaagtcacatatataatgtgaacattagaaataagtaggaaaaaaaggttagggaagattaagagacgaaggagtgaatctttgaaaatgtcactttattgactatgagggaaaaagatagttaggaggaaagtacctctaatgaaaattattattgatataaattattttttattttttaaaaaagagagctagttgttaaacctcggaccattctctctatctaactttctcttattcttcttaatttataagttgattagatttatatattcctgaaaatgatgatcatctaggaagtaaatattcttggaagcaaaatgtcactttacactatacacattatacgccaaaaacctaaatgataatatgttcaaagaaaaagtgcgagggaatacttgagtttgaagctaataaaatcaacggaaaacttgtcttaacaacttttccaatgttctcatttgtttttgctcataatcacctctttaattttagataagcttttttgcatatgttatataaagtttttaaaacaggattacaagaatccgagggtgcaattgaaaacttgtaataaactcaacagtaacaaagtctaatgcatcaaactgaaaaaatcaataaatggactctcgtctatggtagtatttgaggatgtttatcggaaagttggaaaacgttcggtcttaacaagaaaatacaaaagaaaagttggataacattgagctatgattagaagacagaaaatgtaaaaagccaagttaaaaagatgaaaagttttggccgaaatttttgtatcactttattgcctcttgggtgcaatttaataaacatatcgagaaaaagagagggaaagagataaggcataagattccattaagcgaaactgaaaggtggatgatacttgggcttgtcatgcgtttctaatgtctataagtttggtggtacgtttatcgtttcccttcaatattcctctttctccactttattcactttaattattattccccatattcacaatttacatgaaatgatagcagtctagtagcattcgatagtcttaatgagaatttaatttaaaactgtgagacaacaaaaaaaagaatgaatttatcttaagttgtcgatatctaagttcggaattagttagagtaggacacatgcagtcacacagactcacagataaccattttaaaggaaaaaatccagaagattatagctatgtgaatctataagtacatataactataaaccaaaataattgaattactataatggtgaaaagggacctaacaatattattcatcgtcaaatttatgcttgttttgacatggaatagtttttagatattttgagatattttgttaaatccataaatgtttgtgaattacgtataaatttaaaccaaaatatattgaattgctataatggtgaaaagggacctaacaaaattgattatcgtcaaatttacctctgtttaacaaggagtactctttttagatattttgagatattttgttaagtcgataaatgtttgtttataagttaatcctcatcaatttgcattataaataaccaaaaacttatttaaatccgccgctaatgactaggtgataccataaatgtaaatatacgaaaaataatttgaattgctataatgatgaaagagacctaacatagttcattttcatcaaaattaataatttatttatttcacatggagtattccttggatattttgttagatatattttattttcaaataatataaaatacatctgtgacttaaattatacgtggtcaatatttctattcgttatatctaattttaaaacaaatatattttgttatattttgttttcatatattttgtttactgtatagactatagagttttttaaattacatgtatagatcttttagcacaaaataaatcatgcattatatgcattcggatattgttggatagaaatgagaccgagtcatccttatttgcgggtaatggagatgaggccattacatgcttcctttgacttatgactgaaaataaggtaaacttttaaatacgcacatacatttatcatgattttattcattttgtttaatttgcatataaccatcttcttcttataactaatttgttttataaaaaaatattacaatcactacacactaacatttcgccaaaacataatactaatggacttatagtgtgccaattttcctaattctagtaatcaacaaaagaattgctagatatttgcaaaacattacaagaaaatcaaggaaataaataattttcagttccaaattaaaaaatagtatagttttttgttttgtttttttttgggtgtgttttgctctgaaacgagttcacatgaccgactcttttcttagtgctcaggttgtccaatcagtaagtatattgtggatttttttggaaataaaaaatgaacatctcgaatgtcgaaatttcatctgattaattcagaacagaggattacagaggagaaatataaaagtacttaactaaagatcactaattcctaattaattaatactttacttttaatcatgccgatatttttagcaaattataaaaatttaataaagtgaaaacatttcaaggaagaaaagcaggaataatggcggaagtgaactgtgaaggatgttggtgatgaggaggttgatctttgacctgagtctccgccgtcgaagcatggtgcccacacctatcacacttcaccggcaccagtatccgacgacaagacggacacgacgaccgtgaagtcaaccacttgtctatacacgccacgtggaaggcgtgactacacagcggtaagattctgatttcttcgccctccgaaaattccgttatgcatattgcacactcggtggatgaatctccgtctccgactgaagagcacggtagatcgtcagcggcggcggcggtagaggcagaggcggtgtaagttgatttagggagagcttgaagtgcttttttcttgaggcctttgttaggcggtggagcttctccgacggcggcgggattaactccggtgagacggcggagccaagcgcagcgagctacggcggctaaaccggctacgcatacgagagcgcagagaagtgctgagagaatcacaaccatgtcggtttcggcggcgaggatttcttccggtggtggaggcgacgccgtaccaaggaatctagaggagcgagtcattttgttttggttttgagttctgtttttaggggaagaggaaatgtgaaagacagaaggaagagagactttgttgttgtttagaggagaagaagaatctgatccaagttataatagagacacacacatacacatctatacttatataagacatgtccaaattgcagattaaaattaattaaatattaataagtagtgttcatttaattccatgtcatatcggcaaaaaaaggttttggatgaatagaagaaaaacttagttttacaacttttccgaagataaataatgagattgcagtatccataaagacaaacatatttgaatctttatttaaaagtaaaaaaaaattgatcactttttatttttttttgggtaattcaagtttgatgttctacaaacaacatctttatttttaggtaacccaaagtttactcgagtggtccaaatttaaatgttcaacccaagattttaaatttttaatgcatgctttgaactttggaagtttataaagttctgatttacaaattgataaatcatataagtatgtgtagttaaactaatagaatcatcaactgaatttttttaattatgccgttacaaaaatttacagaattaggtacttttgtatgcaaaactatatatatcatcattccattttgttatttttgacaaaactaatactttaatataaaaaataaacatttcctcgtgtgattcaaagactatagattgaaatactttatcatatacaaaaattattatgatttctgatttaagacagaatttatgtctcaacgaataagttatcttgtttaagaaaaatctaaagtactaatacaatctgttacgactaaattatttcttagccgcatgggagatcttgggcaacatgcctcaacatagatacgggttttaatttaaataatgttctcctccaaaatacatttagataagagatttggaaatatcgtaatcgaatacaataaagaattaaattgccgtatattattagaaaaccagacatggaaaaagatgggtaggtgtgggcgctctttttaggttctgtttgacgaactcattatcaaaaggtgtaagtgtaaattactttcttacctaaacctacttctattagactcttttattctgcattcttcaaattttttgggcatcttgaaagattcctttaaaacaaaaaaaagggtaaaagattgagatcagaagatggttttgttgacaggtggtgctgaagtttggattcaatgaatttcgaagttcttgcgatattgtcaagttttcctcttggaataccatatttgttttaatagatatactgtagttgttagtttagatatattatttttcataaccgagtttgtttacatttgtatatgttaggatagaatgatgtagccatgtaggtgggatcttgataagtgataactatcaatttacagaatctttgaaatgaatctacgtgtcctcaaaggtagcataatatatttacattatagtattaacagcaggtaccaccgtccacgtgtgcataaagttttggtgtttctagactctcttgtcatactactaactgaaatattgtaatatggttttcacactaaaaaatcgaatcaacccaatatattatcaaatcaaaccaacgacgataaattttacctaaaactttttttttaaaacgattttcagccgaaatatcacaagattatcggtcttgggctagactctagagagggatagatagatggaacttagaaaataataaatggaaaaagatattaaaagaataataactttgaagttcaaagtacaatcggaatggaatatcagtcttttgcgtgaatgcgtgtgatgtgagtcttgacgtcgtatatggaaccaaaaaggtgaaaaagcaaaccgagttattaaaccactaattaaaactataagacattcttagcacatcggattaaatagaagaaaatcaacaataattgagaacggaagcattaattatgacatgtaataaacgggaaaaacaacgacaattatggactttggaagcatcgattgtactggggtttggagcatcaataatccatattttggatacaacaacaattttgtttgttttttactcaaataaagatgctatatttgttatgttcaaaatctctatacatctttcggtctacggccaaataggcaaatacttgcaccaattacaagcaagtaagtttatatcttgacatataatcaatatatgatatagtccatgcgattccagctaaccacatataactaattcatactttagtggagctagccagatataactttattcatatagtagtgtggttatgaatccaatatataattgatagagaaatggtagtttcgaagtaacgaaggttgacaatttcaaaaagcccatacaatcagtttgagagacttaaaagagttgaataatgtacagcaacaacgagtcaaagtcatgcttgtgtgttacgtgttctatatgtgtccatgattataacgcaatagcaatatcatgtcggtgcgctaacttgttttgactttttggggtcattaaactaaaacatcagtttcaatatacatatacatgacgtcataaacgttccattcaatcgctatgccattttaatataatagaattttgcaacttttttttttcctcaaggtagaattttataactatagattaaaattggataattaaagttctttgttcgtttatttgattagtttttctgtagtatagggtcaaacaaggcaatgttaaaagtcaaccatcttctttatttatatttgttcctagttaattacacttaacactgtttgttaattcattgaaattgttttgtcatgtactaactattgattattcagtcaccgtcccatgacatgataatcccaccaaggtaccaacacgtccaaaacaacgaaataggaaattattatttagaatctaatgggctaaaaataaggcccaaataaaaagcaaaggcccaatatatactgtcacaaaaaccctcaaagaacagtgaagctctcatcacgatcgcaacaatggcggctgctgcgaaggagatcctacggcgaccagtggcggcaacaataaggctaaccgttccggcgggaggagcgaggccagccccaccggtaggtccggcgctaggtcagtacaggcttaacctgatggctttctgcaaagacttcaacgctaggactcaaaagtacaaaccagacactccgatggccgtgacgataacggcgttcaaggacaactctttcgaattcaccgtcaagtctccgacggtgtcgtggtacatcaagaaagcagctggagtcgataaaggaagcacacgcccgggtcatttgtcggtgacgacgctatcggtgagacacgtgtacgagatcgcgaaggtgaagcagacggatccgttttgtcagtatatgccgttggaatcgatttgcaaatccatcattggtactgctaattctatgggtatcaagatcgttcaggatttggagtgattttagggtttctgatgaaagagtggaatcaatttgcttctggtaaacgtctttgctttgagtagtaaagtataaaccatgaatgaatttcacagattgttttgtgttttggtgttacttccattgtgttgtttgtttcaatggataattgagctccaaaagctttccaaaatcaaaatagatattgagtttgtttaactttgatcgtttgaataatttggacagtaaagacattgcattgttgttgttgtggatgtagaaattgttcgtatgagcaaagtattctaaagtttggtcctttaacttgatatatcagattccatggaagaagttttcctctgtaaattcgattttttcagagaattgtgtgttcatagctcagtgatttgaaggaacaatgggggtggtctgaaatggcaagacataagtaggatcttaaggaaacaacaatctcaaattaacaaaactgaaagcttttgaattgagttgcttgaatcttcttctgcaatatgttttcaagtgtcacagctttgtttgtagttgtatgtttggagaaactagaacttttcttgtgtttcattggagattagtttggagtctgtaatcgagccccaagcttatgagttatgactatcaagctcgatgaaatgtccagctcgaactagttgcttttgtgaccggatctttaaaatttgccgtctgtctatggaagtttttgaaattttggtaccatatcgaatgtttttggtcaagcaagacattgacttggcccttgggaaacaataagacagagacacctgaccggagcaaagggcaaaatagagaaatagggaaaaaaagtttaaatcgggaaaatctgaagcaacgagattgattaaaaaaatcacagaaaagagcaaaaagtggagagggtcttacgtttcagggccacacgcaatctgagtgccattcctctctttgtctttctctctctctttctctgttctaagaaagggaagctctttgtctttgtttgggtccttgccaagatccaatttttacgatcaaaatcgacccggtggaattcagacacgtcttttagatagagatatgtcttgttcatcttcttccggatcagaaggagaagaagagggtttcgatgcttaccgtaaaggtggttatcacgccgtcaggatcggcgatcctttttccggtggtcgttacatcgctcagagaaagcttggttggggtcaattctccaccgtttggcttgcctacgatacgctcacctctgtacgcatctctcttcttttcccatttcttcgattgttttgttgctttgatcgtaattcttcattttgacatcaaccattcattggtttcatttttcatctggcctctgatctctgacatatcgagattgaatcacatttcaatggcactgttgcaagctaaagactcgtcctttatatacaatacgcatctgttactcttagaagtccaatagattttagtgcaagatcattgcttcatgtgatgatgattctgattttgatattgttggattatagccctagatttggcactgtactagtagtctcctctagtttaccagatttgttagctcaaaatggattgcgtattaaatggttatagaatctttaatcataggaaggtaactgtcaccctataaagtatatcctaagaatgttttgctttgtatgtttttatgtctcttgttgtagacttatgttgctttgaagattcagaagagtgcacaacaatttgctcaagctgcacttcacgaaatcgaatttctttcagctgctgctgatggggatctcgacaagacgaaatgtgttgttcgtcttattgaccatttcaagcatagtggtccaaatgggcagcatttatgcatggtgcttgagtttctcggcgatagcttgctccgtttaatcagatacaaccagtacaaaggtctgaaactgaataaagtccgggagatttgcagatgtatactgactggtttagattatttgcaccgtgagctcggtatgattcactccgacttaaaacctgaaaacattcttctttgttccaccattgaccctgccaaagatcccgttagatctggactcaccccactattagaaaaaccagagggaaacgcaaacggtggcgcatcaacaatgaatctgattgagaagaaactaaagagaagagcgaaaagagcggttgctaaaatatcagaaagaagagtctcaatggttacaggtgaagaagcatcatcgaaaacggaaaaaagtctagatgggattgatatgagatgcaaagtggttgactttggtaacgcttgttgggctgataaacagtttgctgaagagatacaaacaagacagtatcgagctcctgaagtaatactaaagtcaggatactctttctctgttgatatgtggtcttttggttgtacggctttcgagcttgtcacaggagatatgctatttgcacctaaagatggaaatggttatggggaagacgaggtaagatctaaatctaacctcaagagtttgctgcttcattgttttagcctgatttcttatacgtttttgttatctggttttggatttaggatcaccttgctcttatgatggaactcctaggaaagatgcctcgaaaggtatgtgtttttttttgctttcccactgtgttttcttggtttatagtctgctttttgatatgcttgtttgagcagattgccattggaggggcgaaatcgaaagactactttgacagacacggggacttaaagagaatccgacggttgaaatattggccacttgatcgcttgctgattgataaatataagcttccggaagcagaagcaaaggagtttgctgagtttctgactccgattcttgagtttgcgccggagaaacgaccaactgctcaacagtgcttggatcatccatggatgaatgtaacaacacagaacgatgcagaaaatgtagatgaccaaatgaacaacttgcatatcaaagggtgagagaaactcaaacttcttgttttttttgtggtttcattcctttgttcgttttcttttaatataactttcttcttctctttatatgttttttgttttgtataatttctcttttttttttggggggacctatgatatattgatttaaccatcgagttcatttgttgcttattaagaatgtctatgtagcgatgaattgactaacaaagatgttgcatcttcttattttagactttgaattttgaatgttcttttgatgttttgatattattgctagatgtcagttggtttgggtttagatcaaatttggttttgggtttgtttcggttgctaacaaaaagttttaatatctatttctatcagaatttaatttattttaactaaaaaatggtaattagtatttgatcgaatctagaaaattactagatcccataatttacgagttagtagtacgtatgtctaaattgcaaattttgtttatccctctttttaatgatagttcatttgtttcttgtcggttaatacaaaattattttcttgttaaaaatataaatgtttctgtcggttgtttttgtcagcgtcatgtagatatagtgcagttacattatactttattgactatcatatgagtttttttagtatacctggtcaaaatataacatgaagttcctattttagacatgtcattgtcaatgtatttattcaagtaataaatttaggtttgatagaaaccaaaataccctaaatggtgaaactgaaatttcactgtcatataaattaaaaaataaaaatttactctagttagtagtaattctaaaaagcgacatggccagatgggtttttaactttcagaccacatgtgacgtacatgacttcgtagctttgtctttagagaatttgcgtgtacttctgtgtcacacgttccatatcaccacgtggatctacacgtgacaccctgtatccaatcgttgaatccattcaaaaatatttgtttcgttgtaattttcttattagctaattgtttcttagcaaataaaaaatggattagatgaagaaaaaacttaccattcaacaaaaaacaagtacatcactttattgcatctatgaatccaaaatatcaaactttcttctacacaacaactgcgaataaacccatatatgtattatgtatatatttaacaatatataacataaattttaaaacacatccaaaaaaggaaacaacaatgtgattcttctaccgaaaatggtaatgctgaccaaatcttgaaaaaaagagtcattttttctgtagacaatggtagtcactatgaccgtacggctttgttctgcttcacacattctggtgcctttatgtcctggcatttccaagacgacgatcctgctatgaccgtgatcgcaccaccgtcttcctgcggctgagccaccggtaatggagacgcggaggaagttccgttttcttgatttctagaattacaaatgctcaaaggaagcttctttagcttcactcttcctcttcttttaaccaatgagttgctttcttcccctgatttctccatcatcagcatcgaatccgcttcatccctgtttgatctagctatctctaatccttcataggagctgtctgaatccacaactccagcaatgtctttcatagaaccggtcactataatactactactcccaccttcaactacgctcttgttcttcttctgcttcttgtatctctgaccattct

SEQ ID NO: 673 - DNA, 94315 bp, Arabidopsis thaliana
gaattcaccgtcaagtctccgacggtgtcgtggtacatcaagaaagcagctggagtcgataaaggaagcacacgcccgggtcatttgtcggtgacgacgctatcggtgagacacgtgtacgagatcgcgaaggtgaagcagacggatccgttttgtcagtatatgccgttggaatcgatttgcaaatccatcattggtactgctaattctatgggtatcaagatcgttcaggatttggagtgattttagggtttctgatgaaagagtggaatcaatttgcttctggtaaacgtctttgctttgagtagtaaagtataaaccatgaatgaatttcacagattgttttgtgttttggtgttacttccattgtgttgtttgtttcaatggataattgagctccaaaagctttccaaaatcaaaatagatattgagtttgtttaactttgatcgtttgaataatttggacagtaaagacattgcattgttgttgttgtggatgtagaaattgttcgtatgagcaaagtattctaaagtttggtcctttaacttgatatatcagattccatggaagaagttttcctctgtaaattcgattttttcagagaattgtgtgttcatagctcagtgatttgaaggaacaatgggggtggtctgaaatggcaagacataagtaggatcttaaggaaacaacaatctcaaattaacaaaactgaaagcttttgaattgagttgcttgaatcttcttctgcaatatgttttcaagtgtcacagctttgtttgtagttgtatgtttggagaaactagaacttttcttgtgtttcattggagattagtttggagtctgtaatcgagccccaagcttatgagttatgactatcaagctcgatgaaatgtccagctcgaactagttgcttttgtgaccggatctttaaaatttgccgtctgtctatggaagtttttgaaattttggtaccatatcgaatgtttttggtcaagcaagacattgacttggcccttgggaaacaataagacagagacacctgaccggagcaaagggcaaaatagagaaatagggaaaaaaagtttaaatcgggaaaatctgaagcaacgagattgattaaaaaaatcacagaaaagagcaaaaagtggagagggtcttacgtttcagggccacacgcaatctgagtgccattcctctctttgtctttctctctctctttctctgttctaagaaagggaagctctttgtctttgtttgggtccttgccaagatccaatttttacgatcaaaatcgacccggtggaattcagacacgtcttttagatagagatatgtcttgttcatcttcttccggatcagaaggagaagaagagggtttcgatgcttaccgtaaaggtggttatcacgccgtcaggatcggcgatcctttttccggtggtcgttacatcgctcagagaaagcttggttggggtcaattctccaccgtttggcttgcctacgatacgctcacctctgtacgcatctctcttcttttcccatttcttcgattgttttgttgctttgatcgtaattcttcattttgacatcaaccattcattggtttcatttttcatctggcctctgatctctgacatatcgagattgaatcacatttcaatggcactgttgcaagctaaagactcgtcctttatatacaatacgcatctgttactcttagaagtccaatagattttagtgcaagatcattgcttcatgtgatgatgattctgattttgatattgttggattatagccctagatttggcactgtactagtagtctcctctagtttaccagatttgttagctcaaaatggattgcgtattaaatggttatagaatctttaatcataggaaggtaactgtcaccctataaagtatatcctaagaatgttttgctttgtatgtttttatgtctcttgttgtagacttatgttgctttgaagattcagaagagtgcacaacaatttgctcaagctgcacttcacgaaatcgaatttctttcagctgctgctgatggggatctcgacaagacgaaatgtgttgttcgtcttattgaccatttcaagcatagtggtccaaatgggcagcatttatgcatggtgcttgagtttctcggcgatagcttgctccgtttaatcagatacaaccagtacaaaggtctgaaactgaataaagtccgggagatttgcagatgtatactgactggtttagattatttgcaccgtgagctcggtatgattcactccgacttaaaacctgaaaacattcttctttgttccaccattgaccctgccaaagatcccgttagatctggactcaccccactattagaaaaaccagagggaaacgcaaacggtggcgcatcaacaatgaatctgattgagaagaaactaaagagaagagcgaaaagagcggttgctaaaatatcagaaagaagagtctcaatggttacaggtgaagaagcatcatcgaaaacggaaaaaagtctagatgggattgatatgagatgcaaagtggttgactttggtaacgcttgttgggctgataaacagtttgctgaagagatacaaacaagacagtatcgagctcctgaagtaatactaaagtcaggatactctttctctgttgatatgtggtcttttggttgtacggctttcgagcttgtcacaggagatatgctatttgcacctaaagatggaaatggttatggggaagacgaggtaagatctaaatctaacctcaagagtttgctgcttcattgttttagcctgatttcttatacgtttttgttatctggttttggatttaggatcaccttgctcttatgatggaactcctaggaaagatgcctcgaaaggtatgtgtttttttttgctttcccactgtgttttcttggtttatagtctgctttttgatatgcttgtttgagcagattgccattggaggggcgaaatcgaaagactactttgacagacacggggacttaaagagaatccgacggttgaaatattggccacttgatcgcttgctgattgataaatataagcttccggaagcagaagcaaaggagtttgctgagtttctgactccgattcttgagtttgcgccggagaaacgaccaactgctcaacagtgcttggatcatccatggatgaatgtaacaacacagaacgatgcagaaaatgtagatgaccaaatgaacaacttgcatatcaaagggtgagagaaactcaaacttcttgttttttttgtggtttcattcctttgttcgttttcttttaatataactttcttcttctctttatatgttttttgttttgtataatttctcttttttttttggggggacctatgatatattgatttaaccatcgagttcatttgttgcttattaagaatgtctatgtagcgatgaattgactaacaaagatgttgcatcttcttattttagactttgaattttgaatgttcttttgatgttttgatattattgctagatgtcagttggtttgggtttagatcaaatttggttttgggtttgtttcggttgctaacaaaaagttttaatatctatttctatcagaatttaatttattttaactaaaaaatggtaattagtatttgatcgaatctagaaaattactagatcccataatttacgagttagtagtacgtatgtctaaattgcaaattttgtttatccctctttttaatgatagttcatttgtttcttgtcggttaatacaaaattattttcttgttaaaaatataaatgtttctgtcggttgtttttgtcagcgtcatgtagatatagtgcagttacattatactttattgactatcatatgagtttttttagtatacctggtcaaaatataacatgaagttcctattttagacatgtcattgtcaatgtatttattcaagtaataaatttaggtttgatagaaaccaaaataccctaaatggtgaaactgaaatttcactgtcatataaattaaaaaataaaaatttactctagttagtagtaattctaaaaagcgacatggccagatgggtttttaactttcagaccacatgtgacgtacatgacttcgtagctttgtctttagagaatttgcgtgtacttctgtgtcacacgttccatatcaccacgtggatctacacgtgacaccctgtatccaatcgttgaatccattcaaaaatatttgtttcgttgtaattttcttattagctaattgtttcttagcaaataaaaaatggattagatgaagaaaaaacttaccattcaacaaaaaacaagtacatcactttattgcatctatgaatccaaaatatcaaactttcttctacacaacaactgcgaataaacccatatatgtattatgtatatatttaacaatatataacataaattttaaaacacatccaaaaaaggaaacaacaatgtgattcttctaccgaaaatggtaatgctgaccaaatcttgaaaaaaagagtcattttttctgtagacaatggtagtcactatgaccgtacggctttgttctgcttcacacattctggtgcctttatgtcctggcatttccaagacgacgatcctgctatgaccgtgatcgcaccaccgtcttcctgcggctgagccaccggtaatggagacgcggaggaagttccgttttcttgatttctagaattacaaatgctcaaaggaagcttctttagcttcactcttcctcttcttttaaccaatgagttgctttcttcccctgatttctccatcatcagcatcgaatccgcttcatccctgtttgatctagctatctctaatccttcataggagctgtctgaatccacaactccagcaatgtctttcatagaaccggtcactataatactactactcccaccttcaactacgctcttgttcttcttctgcttcttgtatctctgaccattctcctcgctagttctcaagactctaggatacgacgtattgtctatagctcgatgcaacctacgcgctaaatcatcttcctcgtctcttagctgcccctttgaatacaagagctcgacggggacatgtttcttctgcttgttcttcctaggagacctctccttgcaatcagccattgcttctttaggaaaagaatcaaccaattccaatgccctcttagccgcagcaatcgccttagcggaaatcaaagccttctcgttagcaatagctctcgcagcctttgcagctttaaccgctaaagcagctgcagatctcgttgcctccacgagctcttcaggtgactggtcattgttgaaaggagaagataacaagttgccgagatgggtctgaacattggtggaagcagaggaagatccgtttgagtttgaagtagaggaagaagaagcgaaatctgaaggagaagatccattaatgccgttggagttaaatttcttgaatccagcaagtaatcgttttcgaggagggagatgcgaatcggaatcgagctgattcatgtcacacggattcgtctccatttttgaatcaagctaaaaacctaaatctgagaaacaagaacacgaagttgttgtgtcttaatatcggattaaaatggatcggaattcgaattatggatgagatcagctcgatgataacactatggaacaacaaatcagagtaaaatacatcacgaggagtcagcagctgaatcatttcagattacaagagtccaaaaaaccaattccgttttcaataaagatcgatattttaagcaataacatgaatcgatccttcaaacccataaatcaaataagcatcccaaaaattacataatttaaaagcagaaatttttgacaagaagagctgaattactcgatcataaggtgatcgatgaataataggaatcacacagcattgaaagaagaagaatcataaatcacatgtataaaacaaattttaaaaaaagagagtataacacgatgaacaacagaacaagcaaattcggttttaccttggcgtgtcctttagagtgttgaattgtcgtagttttgaagttaccttatcatttaggaagaaaagagagagaaagaggaagatgagagagtttaggagaaaggaaattagggtttgcagagagaaaggaggaggaggaggatgaagaagacaagagaattttgttccgattttcatttttatatgtaaaccctacaaatcaatctttctttctttaattttttcttttaaattaattaagggacaattaatgatcacatagtaattttgattgacatttgttgtttcttacagttatctcttaccttagaaaattaaccagctggtctcatgctttccgttattattacatccctccgtctaactataataacggccgtcatttatttctctttacggagttacctttatctttttacgtcggagttaatttcatttttattacatagaaaagagtcaaacatgattcgatcttgtgtcttaaaagagagttatacttgcaaatttgtatcagaattttagatcatgtgtgtaatcgacatacaaatggaaccaccttattatttgacgtgttttagatttttttatggtggatggatattaaagcaacgtggttgatccaagatcttagttttggggaaaaaaaagaattcgacaaaataattaaattaatctgatagaattatgatcattagtccctactttggtgaaaaactaatatgtttggcagagacagtcaacttcaccatccacttgccgtatcattctcaaatctcaatagaccccaacaaagttaatgatatcattttatacaaagaaatttatggaattattacatcgtaattatcaacagtgtgaccaaaacaatatcataaaaaaaatatcatcaacactgtagggaaaatatatcaacaattcaacaccatttagaccttttttttgtcgttctttttaattaatattatcattcgtcattaaagaattttataacgtattttaagattcacttcttcttggaaggattttgtttaaattatagataaaatagtttgtttgttgtccacaatagataaaactagattttaacccgcggtataccgcgagacgatttatttttaaaaaataatatatattaaaacttgcaaattttatttttataaaatatttttattttacagtttataattattattaggtaacgctatactacgaatccatgagataattgttaaaaaactgaagttttaatccctacttaaacagcatattaataatattttaaaattttataaatattgattcaaatacatccaccatataacctaattccaaaataaaacccgttctttaatttttttacccgtcccgtgattttttttttaaagtagtaatttttaaaatttaagaattattttttatatataaaagttttgcacattgtatcattctctaatacatttatattttattgtttaattttatatatagtaacattatacataccacataacatttttggttttatataatcttttctaaattaggatgatttgatatgtttaatattagtggtcttaaaaaataattaattaaagatttaacccgtattaaaacggtggattaattatattttacttttttattaatgttgattcaaaaacccgtccctccaaattcgtcttgccaaaaaatcatttattttattaatattaattttattaatgatatgactctgaattatattctaaacattttagctaataacatcggagtgcaccatatttatttaataggggaatgtagcatatgacccgaatacacttttatccaaatccaccaaaaaagtcttgcaaaaatactatagagataagaaacgatagtcggttttgataggtataagattagcaaatatattagttagcttaaattagttaaagaatacaaattgaaaaggtatattacattattcgaatatagtatcaaaacttatataacacagagatttgataaaattttaattgttgaatacttttttttgtgctaatttttatgtgattaagatttaattgatttcatgtgtatgttttgttgatattatctatattgtttagtgtttaagattatacgcttgtagtttgattgttaatttaagagtttcacttgtagtattccatcttgtattaatatcgatctaaaccgtcaattctaggattttccagcttttattaaaaattgaatcacatctaatatgttattaattattgtagtatataagattataaattttcaatataatatgtatgaaattgaatataaatatttcaaattatgacccgttactcagtagaaagttttcttaaatctatttttcacccgttataatattttttcatgtattgaacagtttatattcgtttttaaaaattcaaattgtagcatatgcaaaataactctaattctttttttataatgatgatattatttttccgcaaaaataaaatcatataaagatgagaagtgaactataataattaataaaaaatcaatatgataatttagatatcaaatataatttgttgattttaattggttacttttttgaaaattaataatgtatttcgttttttaattaaattaaattaattaaaatttagatatcaaatcttatatgttgattttgattgattattatttttggaaaataataatgtatttcgtttttaattaaatttaattaattaaattagtatttgattttttaatccttaaagagataaattaatttactctttaaaattttatttctaatggcatacctatgtaattacttacaaaaattaaggttacatttaaaatgtacttcccaaataatatagtaggatgataggttcaataatttggcatatatattaaatcttgtgacttttctttaaggggcaattttttgtgtgtgttgtgttttgtatgaaatataacttaagaggggtaaaaagctttaaggtgggttatctctaaataaattatatgtgtgtataagccaaaaactaaaacgccgtcgtttagctaaaccctaacccccaaattgcgattttccctccagttccacacagttgctgaactttcccgttaagagcgagcgtgagattatgttgcgaaaggcgatgcctttttctcaatttcatgtctaatggcgataatcagctttgcagtctccagtaattgatacccgcgggattttcttcttacaaatttgggtctagggtttttgtttctcggtgtctcagtccgataatcctgagatgaagacgatcaagcccttgccggaaggagttcgtcactccatgcgttctggaattatcatgttcgacatggcgagggtcgtggaagaactcgtcttcaacagtctcgatgctggggcgaccaaggttccacatatatcagttcctccttcttcgatttcttctgggtttggaacaattctgcttatcgatatctctatattcaggtgtctatcttcgtgggtgttgtttcatgctctgtgaaagttgtggatgatggtgagtatatagcttcaaaatcattacttttacctttgtactaatcattgaatcctaatttggaaatatttcattgactttggtttcaggatcaggcgtttcaagagatgatttggttttgttgggagaaagatatggtaagttctggctcttttttgttctctcattatgattttcgatctgatgagaaactaatcatgagcaatgtgtaaaagcagctacttcaaagtttcacgacttcaccaacgtggagacagctagtgaaacttttggatttcgtggagaggccttagcttcaatatcagatatctcgttactggaggttaggacaaaagctattgggaggcctaatggttatcgaaaggttatgaaggtatgggatgtcttttgatgcgactcaacactcctacatagtttctgtggcgttggttatggttttaaacttctgaaaacgcttttcagggatccaagtgtctacatcttggaattgatgatgatagaaaagactctggcacgacgggtaatgtgtcttttgtcaccattgctttttctattatgcttaccaattgtgatagtgaagcattaagtacaattttcagacactatttgtgctatacgatagagaaatgtgttcgatttttggctaacattggcacatgcatgattaatatctgatcttgacctggttgatgcagtaactgtccgagatctattttacagtcagccagtgagacgaaaatatatgcaatccaggttcgtttcttagacacttactttttagattaagacatctgaattttaatctatcttcgccttgtctcaagtttttttgacatgcgaccatgttttttctttgcaatggtagccccaagaaagttttggaatctatcaaaaagtgtgtgttccggattgcccttgtgcactccaatgtttccttcagtgttcttgatatcgaaaggtgcgttcctactttcatttaaatatctttatgaaatccgcccttctgatcgtttccttgttacagtgatgaagagcttttccaaaccaatccttcttcttcagcattctcactactgatgagagatgcagggaccgaagctgtaaattcgctttgtaaagtaaacgttacagatggcatgctgaatgtctctgggtatgtatctggtcctggagatagtttaaaggtaggttacttgctccacttgtgggattcaatatttatctcccttttttgtcagatcgtaactttgagccttacctttctgaataattgtggtactttccttgcaggccttgcagtatatatgtatccatatttctgcatctttttatgtgtgactatacatcaactatcttctgaagtttagttaggcagtttctgtatatggttgtatggccttcacagcaacagatatcaattcaagattcattagcaaaggtcctattcataagctgctgaacaacttggctactagttttgagtgtgcggatgactggaagcctacggatgggcaacaaacaggaagacgcaatagacttcaatccaaccctggttacattctgtgcatagcatgtccacgccgtctttatgaattctcgtttgaaccatcaaagacgcacgttgagttcaaggtattagatttctcttggatctaaatttaggtagattttaatttttttttatgattgcaaatatttctatctgtggcagaagtggggacctgtacttgcctttatagaaagaatcactctagccaactggaagaaagatagaattcttggtatgccacacttttctcaatctctgattgtatccctgatatttatggggttttcaatgtatttccaacggttttcttagaactttttgatgggggagctgatatactggcaaaaggtgatagacaagacctgattgatgacaaaattagacttcaaaacggtacacaagtttttcaaaatgttacattatataacattaattcttctatatcggaacggggcagtattttttgtttgtccctttgacattcctaggcagccttttctcaattcttcattttctggatgcagattggccagaagctatggaacctgcaaaaaagaagctgaagagaagtaatgatcatgcaccttgtagttctctcttgtttccgtctgctgactttaaacaagatggtgattatttttctccacgaaaggatgtatggtctccagaatgtgaagtcgaactgaaaattcagaatcccaaagagcaaggtactgtagctggatttgaaagccggactgattctcttctacagtcacgtgacatagaaatgcaaacgaatgaagacttcccacaagttactgacctccttgaaacaagcttggttgctgactctaagtgccgtaaacagtttctaacaagatgtcagattaccacacctgtcaatatcaaccatgattttatgaaagattcagacgtgttaaattttcagtttcaaggattgaaagatgagttggatgtcagcaattgcattggaaagcatctcttgcgtggttgctcttcaagagtaagcctaacctttcatgagcctaaactatctcatgttgaagggtatgaatccgtcgtgcctatgatacctaatgaaaaacaaagtagtccgcgggtcctagagaccagagaaggtggttcgtactgtgatgtttattctgataagactcctgattgttccctagggagttcatggcaggatactgattggtttactccacagtgttcctcagataggggatgtgttggaattggagaagattttaacattacccccatagatactgcggaatttgattcttatgatgaaaaagttggtagtaaaaagtatctttcttctgtcaatgtggggagctctgttactggtagtttctgtttaagttctgagtggtctccaatgtactccacaccttctgcgaccaagtgggagtctgagtaccagaaaggttgtcgaattcttgaacagagtttgagactgggaaggatgcctgaccctgaattttgtttcagtgcagctaacaacatcaaatttgaccacgaggtcatacctgaaatggattgctgtgaaaccggtacagactctttcacagctattcagaactgcactcagttagctgataaaatttgcaagtcttcgtgggggcatgcagatgatgtgcgtattgaccaatatagtatcaggaaggaaaagttcagttatatggatggcacacagaacaatgctggtaaacaaaggtcaaaaagaagtcgatctgctcctccattttatcgagagaagaagagatttatcagcttaagttgtaaatcagacacaaaaccaaagaactctgatccatcaggttcatacttctggtctttttttcagatgtggttattttgttgctactgttgtttaagttttggggatgtggtataaaagatagtaatgaggtctaactttctgcagaacctgatgatctggagtgtttgacacaaccttgtaatgcatctcaaatgcatcttaagtgcagcatccttgatgatgtgtcgtatgaccacatacaagaaacagaaaaaagattgagttctgcctcagacttgaaagcatctgctggttgcaggactgtgcactcagagacccaagatgaggatgtgcacgaaggtaatatttatcttattttagctgtattctctttatctgaataatcatctccaagacactgctacaaaagaggagacattatattttgtcatatctcctagttcgctgtagactatagttgttagtcaaaacgtgctcctttccaagtttgttaataggaagtctttccttttttcttctcccctcttccatctggagtatttaagtatgttatctatctcgcagacttcagctcagaggaatttctggatccaattaaatccacaacaaaatggcgccataactgtgcggtctctcaggttaggcaaattgaaatggtttgtttgtctaacagtatgactttccgtttccatctatggaagacaactgagcatccatcatatttttcatcgttgtgcaggttcccaaggaatcacacgagcttcatggtcaagatggtgtatttgatatatcttcgggacttctgcacttacgatccgatgaatccttggttcctgaatctatcaacagacactcccttgaagatgccaaggttctacaacaggttgataaaaaatatatcccaatcgttgcttgtggaacagttgccatcgttgatcaggttcgtctttcgtctcatttatctaagattctggaaactttatatctgtagatggttgatgaatatattcaaactaagacaccataagttgtggaaactatttctcttaataaatgtcttgctacaagttgatctgagggaacaatttcttacagcatgctgccgatgaaagaattcgtttggaagagctgcgtacaaaggtaagagcatcttggaatctcaacttcatggaactacttttgtaatgtttcctagtttgaataatattgttcttctaatcaattgataaacaataaaaatatataggtcctggcagggaaagcgaggacagtcacctacttgagtgcagaccaagagttggtacgtttgaacatgatactagataatagataaaatcatctgctgaacttgatcagagttctctactctgcctcagtttattaatgatgcattattaatttttgtgttgacattaaaggtactgccggagatgggttatcagttactccagagttattcagagcagataagagactggggttggatctgcaacattactgtagaagggtcaacgtcctttaagaagtaaattactctttttcctttttcttaactatatgaaatacttgatcatatatgaggccgtatattcagttatgtgttttagattgggcttcgtgattcattgttttccttttctacagaaacatgagcatcatccagcggaaaccaacaccaatcacacttaatgcggtaaggcgattagtctacctctttcattcaacttactgcttttgcctgttaaaagagtttctatactcacttgaatcatcactctgtttaccccacttgtaggttccatgcattctgggtgtaaatctatcagatgttgatctattagagtttcttcagcaggtacacttagaatcgtgtatacacacatggctactcttttctttttcgtactttaaattcttactcaacgtttgcaaaccagcttgctgatactgacggatcatcaactattcctccatctgttcttcgagtcctaaattccaaagcctgtagaggtagtatattccttatctcttcagaattgttttgtatgtgcaaggatgagtaagtgactgccattcatcacttagtttctcggctgatactgtgtttttcttacaactgctaaggtgcaattatgtttggagatagtctgttaccgtcagaatgctctttaatcattgatggactgaagcagacctcactttgtttccaggtgcgtaagaaacatcaaatcctaccaaaggaattcatctctttaatcaaattaacccattaagtctgtgtacagtgtgctcatgggcgacctacaacagttcctcttgtcgatttgaaggcattgcacaaacagatagcaaagctcagtggaagacaagtgtggcatggcttacaacgcagagaaattacacttgatcgtgcaaaatcacgcttagacaacgctaaaagttaaaaaagttgcagctgtatcatagccttcccaggttgctatactctttagtcatactgtaaatcttctacttggatgtatagttgtattactcagcaaataactactttcttacagtacccgtagacagtgtaaagcttttataggttaatagtactacactagagagtttgtaagctgatataactcattgtactctttgcattcgatttaatatgtacaaaagaaaagttcattgacaaatgatatccaaatgttcaccactcaaagagtttttttcttttttctttttttgtgtcaagtcaattctcccattacagaacatattgtgtgatcatcttccaaacaaaactgccaacaacaagtaacaaatctacaagttctctaatcacaactgcagttaactagatacatcatgttcttcttcagctatcgtttcactttggtggtctgtaccgatagcagcacacaatgctttccaaatgggaaccaacatcttcaatggaggacgcagttcctgtccaaagaggaaattgaactcaaaatcaattgctataagtaatattcccgaattgaataattggtaactctagattgtttctcaaagttgtcagcagaagtttttctctcacaatgtaatgaaacaaactggtgccattaccttaaacaccaatgtaagttgttcttcaccacgaagaaataaagagagactccagtaacacgtaatgggagtgacacattcgaccaacacaggcttcaaaatcttgtcaatagggataaacctggagacagtttttccactgcaaagcagaagcatgcacaaaaaagtaggtacttgtatgattggtaaaacttaaaagcatagatcataatggttcatgataattacaacaaattcaaccattaccacctatcttagagaccactaatacggagtagttcaaagcattaagccatcatggagtgcagacaacagaatactaactaaatggataaagcataccttaaatattgagtttcaagttggatcccgaaggttggcaagattatcacagattctgaagaaatcaaagaaaagctagaattagttaaaacgtgaagctgatatcatttggtaagcctgtaaagcgtgtatcaggatgaaccaggatctcacctttcttgacgaacttgcgactatgtagcataaccaagaaaccacttaaaaggcagccccaagaaagagttctagctggattgtcctgtttcatgtgaattatccctttcaacttaagtgaagaagaaacaaatggaacaacaacaaaacaagcttgtaaagtaacacaaaaaaagaaaagtgcttttatacaaaccttgtcatgtattaacataatgctcacaacagaatgaaaatatcaaactatactccatcaccaatcctaagaaacaaaatggtatgcctttctcatgatatgtactagcaacacttgttctaagcaatgcatcagaatcactcaaatgtcaagcagattcacatcaaaataacaaacggcaacaaccaaattttctctaagagcataattacctttccaagcaaaaagtacatagaactcgccagaaacacaaggaagaaaccaagcccccaacgacgggcataaccagttccgctgcttccgttgataatcacatggtgaatatcaatggcttctctagttgacttacttccactttcgtgtatgtaagtgtatctcttattcgaaacagacaagctcaccatttcaaagctagtttagttgaaaaacagtcaaatgtatcaccgtcgttttactcccaactcatatacgaacctgcccaaggttagctttctcaatacccaagtaacaattttcaaactttgagtctcagtcaaatcggatagcaacaaaacttctctgcggctttccgtcgaacaccatgcgtgcgttataataacccctcttgaaatctcataaatctctctaactatctccacacaacttcctcgaaaacacagtagcaatctatcaaaaaggacgaagcaaggattcacccaacgaacgaaagccacaattcttcgaattgatcaaatctgaaaccggcttctcttaccggtaaagagataaaagacggcactatggtggaggagacaacaaaaagccaaaagagagaaaataatacaaactgtgtggcgtcctaaataaaacaccctggcgtttttgttttattcatattaacatcatgccgttttcatctcgacaatataaaaacctagcttatttttaaggaaaggtcaaatcttaattagttttgatttctctctccagtacttctcgattcgccggcgatccgaatctcattcttctgcttgtcggaaaaaaaaacccgtaatttaaagtgtgaagctttcggtttgaatcatgcgttgcaagagatgcaatggaagcaactttgaacgcgacgaagacacggggaattcgtattgcggtggatgtgggacattacgagagtatgataattatgaggcacaacttggcggcataagaggacctcaaggtacatatatacgagtaggcaccattggtagaggctctgttcttgattataaagacaagaagatctatgaagccaacaatttaattgaggagacaacagaaagattgaatcttggtaataaaactgaagtgattaagagtatgattagtaagcttactgatggggaatttggacaaggtgagtggttccctattttgattggagcttgttgttatgctgtggtaagagaagaagggaaaggtgttttgtctatggaagaggttgcttatgaagttggatgtgatttgcatcagttagggcctatgattaagcgtgttgtggatcatctagatttggaattgcgagagtttgatcttgtgggtttgtttaccaagacggttactaattcaccgagattgactgatgttgatagggataagaaggagaagataataaagcaagggactttcctgatgaattgtgcgttgaaatggtttttgtcgacggggaggagaccaatgcctttggttgtggctgttttggcgtttgttgttcaagtgaatggtgtgaaggtaaagattgatgatttggcgaaagatgctagtgtttcgttgactacttgtaaaacgcggtataaagagttatctgagaagcttgtgaaggttgctgaagaggtgggtttgccttgggcgaaagatgttactgtgaagaatgttttgaaacattcaggaactttgtttgctttaatggaagccaagtccatgaaaaagagaaaacaagggactgggaaagaattagttagaactgatggattttgtgtggaggatttagtgatggactgcctaagcaaagaatctatgtattgttatgatgatgatgctcgtcaagatactatgtctcggtattttgatgtagaaggtgaacgtcagcttagtttatgtaactatgatgataatatatcggagaatcagttgtctacaaagtataatgaatttgaggatcgagtttgtggtgggactcttgcgaaaagaagtcagggaagtagtcagagtatgtggcaaaggagatctgtttttggaatggtgtcaactgaaaattggtggaaagggaaatcggaattgagtaaaaggcttttgctcaaagacttgttggagaaagatgtagggcttgaagctttgcctccttcttacataaagggttgcgttgcagttgaaagacgaagagaaaagattaaggcagctaagttgcggattaatgcaatacaacatccttctgacaatgttagtgaaggtgcgttgtctttggagcttgaacatagcaagaagaaaaggaagaaaggatctgaaattgattgggaggatttggttatacagactctggtcttacacaatgtgaatgaggaagaaatagagaaaggccattacaaaactttgttagacttgcatgttttcaactctggagaggtttgaattgaaatgtttttctcttggaatttttttatttcttacagtataattcatttaaggatgtaaaaatcgttctgaatgcagaaattatcaaagcaagcatcacaagacgattcaacaatccatgtaaatgtttctctgaaaatgattaataagataaactacttgtttctttaataagccctgaaagaaacaatttaagaaaaacaaaagtctaatactgcttatgactgactaccaaatccatttcattgatctctctgataattagaagtttcctcagcttgtattcaatcagcctgacatgccataatcttcaacatgatcataaaggttgtaactttccgccagtcccatctttccaacaagatgctcatcccctacaaacacaaatcacaagaaattatctgagacagacacaacttacttgactatttcttcaaagccaatgtctctgtttttttcagttacgtgtgaactaaaaaggtatctttgttacttacttgggtttgatagaacatctagcaagtgaaggtctgagctaatctcagggctctgaaagcaaagatcttcaggcctaggagcagtagttgttgctgttgttgtccctaacccattattgttgctatttccatctggaagaccaagaagactctctggcctcactactctcttctcattcaatgcttcaacttcagtctctacctcagactcaccattattatttccagaagaacctccaccatgctgcttcctcttggatcgagcacgtcggttctggaaccagttatagacattttgttcagcaatctggccgtgttggctcagctcttctgttatgtctttgatcttctgcttgctcggtgttcccgtgccttgatcgaatatacgttccagaatctgaagctggactggcgtaggagtccacctctgtctagctgtcatcttatgacctaaagatgacatcattgggtctgcatatagtcctcccattctccctcctgttaccaacaacagacaaatgagcagagttgttaaaagttaaactaaataaaaaaactgaaactttatatctcaagaacacatcatcaagctaaaaacacctattttggtgggaaattctcgaagctcaattgaaagattcaaaggagtgattctagaattcctcaagaaccattattttccttattcttagctcaaaaatccacgaaaaggattggtctttgaatcagatttaagccaacaaatgcttaaaaggcagagaattttcaattacccatacaccaaagtgaagaagaatcactaaaaaatcaattaaaccacacaaaaattctgaatttttttaaaaatttcaaaaggagtcctttttttatctttagatgaacagagaagaagaaactaaatgatagaagaaaggatagaaacctgcaagatcttgttgagcagtgagagttttatgcatctcaacaagacgctcacaaatggtgccgtaaatagcaatctgtttcctgagagtttcatactgctcatcggtcatcaccttcacgtacattcctcctccggcgccggagccgccattaacgtcgatcccttgaagattagaagagtgatggttattgggttgtagctgattatcccattccatcatctcttttgtcagaatttcgctcagaagatttctctctttctctgtgtgaacgaaggaaacagagcaaagtcagtgctttttcgggagtagaaggaaaggtaaaggcagaaaaggacaaaaaaaacttaatttatgttattcttttgttctatattgaaattataatatatagtttcattacaaaggaaaagacaaataagaagacggtaatgattctttgacaatcgttaaaggaaactatttaaccaacggttattttagttcctaatttggaaattgaccgtttgagatttcacatacggttaaacggctacttccatatctgaatatttacattaccataatctaaatgttatttgatttatagttggagagagccgttgctattttattttatggaaataacatgtctggatgcaatcgacttgatacaaatattaacagctagtttgatcgtatcaatgaagtagattgttagtttttttttatagtcgttggttggtacttttcaagaaactgaattacttttttcttttcaatatccattcttcaagttatgtattttgtttacaccgaaaagttttttccttatgcttttttagtccaatttgtgttatatttttgggtcaacagtcaaaatggtggtatacaactttttaaaaatgcgataaagagcacttgtggcaaaataaataaacacttttaattgcctcttttcctgaccgattaactgacattccgttgattgataaattttggttgcgatctaacttttctgacacattctaggttatatttttctcaattattctatagaagagtattagcttcaccgtcttttgcaatccctatcatctaattcaataagaaacctttaagaaaaaccaaaaagaaaaaaaaaattgttgggccagtcaggacttataagttaaggagcggcgacccaaaaagaaaataaatagtttccacgtgtcgtttaaacagtagaatttgtaggtggtcggtgtccgccgcccatgttccacgggcgcacttagattttaatatgatctaatctgactcattaattgccaataaaattgatctctgtcgaataaccaggccaaacaatgaaatgtgaccatggtcgacaaaaacatgaagataaagaaaaatataatatgtggtcatgactcatgccgtatcgtagtcgggggcgtagtagtgttttgtcggaacgtgtaaataattagctcttctacttaattctgtgacttttttttttacactaatacacaaattattactttaatttttcagccaaaacttgaaatttatacttgcttcacaattctattcaagtcattgtcttcgtaacctatacgtaaaaattatcggaacttttgtttatttaattagtatcgtcgttttttctttaaatgatataacgcctcatcgttttttccggaaagtgttttcgtttcggtaatttttttaattgtcaacattatggaagaaaataatgaggtttgcatgtgcgaccctaagtcaagtatcgagaccaagcagaagcagtctatctaaataccaaaaagtccatattcacacaaatatagatacattttatttattgtcattagatgataggaaaattagattaatactcacaaaatttaaatattctaatacttgaattatatatatatatatatatatatatatattacagaaaagaataatttacattagatgattttttgattaattaagttgagattttttactaacaaagctcattaatttaaaaaatttaccagtataataatcatttatttttaaaattatacattagatgattattttctagtttatgtctaggagtagaacattcaaccaccgggacaatatagagacacaaacggaaatatccagaacaagacattatttacgtaagcattatcaatcgaccaaatgataaggaatttaaatatagatgaaaatagttgcatacaaatttgtccatatatatatacataatcttaattacatgactgacttagtgatgagccatattataacccattggattctctttggcccagctttctttggattcttcttttagattggagagtttggtgtacctatagcttctcttgtcttctatccttattttatgctttcttctctgtttcctatcattgaaatctatattcttaatcccggtttacaaatctacttactgttgttttttaccctgttgaccactgctaattattattatacgctgaatctttccctaccaaagaaaataaatatatacggtgaatcttacttaaaaacgtatatatatagtaggattgtgaaaagaaaaagaaaaaagcttcagtatgaacaaaacttgaactcaaagtgaagacaacttacttattgcaccagtacttaaaaaatgatttatccaggcctatatttattatctcctaacagcccatctcagcccaccaggttgacggtaggatcaattgttgtataatggattagtgttttttttgtttgtgtgtcattgtgtgctgctgtttactcaccatctagacgttacaaatgtgttgattttgatcaaatatcgaacttcgcactaataaccgaatctctgttaaagttttcacgttttttggtgtctcggtttttctaatgtcattacagaaaccgtttcactagtattacttatcttgatcttgttgtatatattatccttcttgatggtgaacgagaacaacgtttcactttaaaaggagaataagatatttcagttttcgttaggatggctgtagcttgtagagttgtagttatcaattcaaagtggataaataaagttgagaaatccaataatatataaaacaaaagctattcaaggaaaaaaaaaaaaacccacaaagttaaagagaccgtatcagaggaatgatatattcaggatgggtctaactttggttgttgctttcacatacaacccattctattacgctaagaatcgcaatagaaaatggcaattgcaaaatatatatttttagcttttatcaaaaagacaacaaatactaatgtttatgagtttttcttgtattttcatttatttatagatcaaaatagtcggtggtcagagcactcaaagaaaaaggcagcgtcatctcacaccgtccatctacatatcggacgtctctcgtgagaccacgttaaaaagggcagatcagatcaccaacttcatcttagagggacccctataacagattagcacttgccacgtgtactctattgacttgttttccacaacctgattcacataaaagagaaaagagtagaatatctatcaatttagctgatcttcttaccaaaaacaaaaaaatatgattaatctgatcattataaacacacaaaaacattgaatctttgttagatgcgaaaataatttttttttaattaattagattaaagtttctatgtaaatttttaattaatctggcctattgagctttcactctactcaaaaagagacctgcaaaagctccaagtcatgtgttggttggatgagttaataaggaccattgtcctacatatgtactcttatcgcatggattaagatttatgtggtagtaaattattttatttttgatcaatagaatatccgcgacgctagagttttatcagaattcaaaaatacttttaattagtggatatttagatttcatttgcaggttaattacaaatttccgactagaatacaacaattttaattcgttttaaaatgtttattatagtttagatattattttgtcacgaatactatatatatgccacctatgtgttaaaattttcataaattaccaagaaaaagtatgattttgtccttttgaaatgaaaatcaatcaaaaaatttatatacacatttgaatatctaatgaattttagttgaaattttggaaagacacaattcagtaataaaatgtgtatttctttgattttttttgttttgtgtggtcaaattcgttggaaatacttaaaaatgtgttgaaaattgaaatgattaatcttaattacatcacatgaatattgactaaaatgaaataatagtatatgatatgttgccataaatgttatgatgaattaactttataattttcgccgtttataataaaccgtcaaatcaaaggaaccgttacttctcaacactcacttcttcttcttcttcttcttctttttcttcttctttttctttctatctctctctatcttctctctaatgtccgaggaattgaaccagtgatttggtgatctcaaagactctcaaaaatttcgtgtttgatctttgtctattttcatttgttcgcttcgggttataagttaacttcaccgttggataaaagatgttcgtgaagaagttggtcgagatagcagccaagaaggtacacaacgatccgataatatgatttcttctttctaatcttcttcggctattgggtttatgagagattcagtgaacaatgatggttcaaaagtgtgattcgattcgaaatcctttaagtttacctaaatcgatgttagatccatttcttagaataatatttgtttttttctcccctgtgtcttattattttatagattcacagaattaatgtaacattaggatatgatttgattgattaatttttgtcggattattacacggatctattacttgtgaatgtgactgtgatgactctgtgtcggttcctggttagcccagatgtttaatccagtttgattagaaaaaaaaagtaatgatgacgtaagacgaattttgttgccaacgcatgtttcgtgtcctaaattttgaaatgttcaattaaaattcgcatccataatgctgtctatttatatttctaatcaccaattatcttttgacttttgtacttgtccatatagacattaagaccaaaaccggccggtttagtatcgtccaaccgaaccggccactctatttctaattttctagccagaacaaaatcttcaaagtcttaccatttcctccaatgttgtagcctggaggaagttcatcagaaggactgagagctaatgacgttgagccacgtatcgctctgcattacggaatcccttcaggttctcacttgtttgcttatgatccatttcagaagatcctcgccgtttccaccaagtaagagttttttattttatttttaaaagaagctttttataaattgtttcttgtgtattcataccaatttttggttcttggttctcagggatggtagaatcaagttgtttgggaaagatcagacccaggctttgctagtctctgaagaaacatccacaagcaggtttcttgaggtgtcacttcattatctctttcttctttctttctcttgtttctgtgtctgtgttacaatcacatagccgtgacaacaatttctccctctattgtcttgaattatccagtttgttcagaaccaaggaatccttctcaatgtgaattccaagaaccagattgaggtaagagatttcttgattcgactcaagtagtagagtagtagcctctgagctttggtctgaaagctaaatttctaataggtttgggacttagacaagaagcttctatctcatgttcatgttttcaatggcgagatcacttctttccgggttatgcaacataccccttacttgtatgtttcacttctcaatcttcatttggtactatttttgcatagtttcttgatttgctgataatgaaaacaagggtcatatttgattggcagttatgttggagattcttctggtaatgtatcagtgtttaagatcgaacaagattctaatcaagttatacaactggagtacaccataccttacctagcatcaaatggtaattaatcaaataccaaaaagagcttcttcggtttaccttttacatggatcgaatcgcctatcttgaaacatcttgttgttgcctaggctctcccattgaagcttctgaggatacttcagttgtgagcattctaccacagctaacagctgaaagcaagaggtaacaaatcaacaaatcttttgtgctagtgaaaagcctattgagtcatttacacttttcctcctccattttaggattctattggtatttagtagcgggtttatagcgttatgggacatcaaagaaagcaaaccgattctcaaaacaggagtacacggtatggtaaagcaagatacgaagaaagcgacttgtgcttgttgggtttgtccttcaggaagcagagtttcagttggctatagcaatggagatattctaatatggagcattccttccaaaggagaatgctcgccagagagttctgctatgatttgcaagcttaacctcggatacaaatccgaaaagataccaatagcttctctgaaatgggtttatgctgaagggaaggcaagccgggtttatgtcattggatcatcctcaaactcgttgcaggtggttttgttgaatgagcaaaccgaaactcggatgattaagctgggacttcatgtttctgagccttgtgctgatatggagatgatcatagctgatgttaatgaacagagcaagcataaacaagattttctgtttgttcttggaaagtctggacgtgtctatgcttacgatgattatatgattgagaagtatctgattcagtctcagtccaaatcatctccttccctcccaaaggaaactgtggttaagctgccattttcagattcaagcagcattaccgtaggaaaattcctcacaaatccttcacacttactcaatctatcagatgaggtaaatctaaattttcatccaatgaagtttagaatgaaatgaacagtcattgtgattctcttatgctgcaggattatgctcagctggcgaaagatgctgtgccgtttcttccttttcatacagttccaaaggaaagttcccgttctgcacattttcctggtttcacaaaggttaagaatgtttacatcacaggacactgtgacggaaccattagtgtatgggacatgacctgttcttttcccattcttgtcttgtttctgaaagaacaggtaagagttctcggactcttttgtgttttccgcaaaggcagatcttatgaaaagttgcatttgttgtgtgtgttcttagcagatagatcaagatgtatcttcacgcggaaatgcggcattgacagctttacattatgacagcaactcaagacttcttgtttctggtgatcataacggaatggtaaaaaagcatcttacccaaaatactctatggaatgtgactaacatatatacaggcttatatatgatcgattctaaacttgtgcaggttcgcctttataggttcaaacctgagccatacctaacagaaaacagttttatccctttccaaggtatgttagaacatgtagaagttgggtttactatccttcagacagtatgtgttttcaatgagttgatattctttgtttttcaggaagcttaaagaaaggaaataaccatattgttcaaagtgttaagtacatcaagcttactggttccataacctgtattcagaagagccaaaactcaaaacatctcgctattggatcagatcaaggacatgtaagcttgtacttcttccacttccttgtaggattctttagttgaggtgattgatgcgttaacaccggtttacttacaggtttctctggttgacattgaggaagcaaatgtgttatacacaaaacacattgcaagtgatatatgtccagggatcatctccttgcaattcgagagttgcattgtgcaaggcttcgagaagaacgtgttagtggttgctatgagagactcgtcggtttttgctctggacagcgacacgggaaatatgattggaaccaacatgattaagcctaaaaagccattcaaggttctgtatatgcagatcctaggtaggttcaactctcctttttataagtttaaatcaacaatcaaaatctcaacgattttttctcatactttttatttgcagatggaaagcaagatacttcaggaaatggatttgatacgagcagagagagcacagttgaggagatctcgataaggcagccttcggttttggtttgttcggagaaagctatatatatctactccttggctcacgttgtccagggagtgaagaaggtcctccacaagaaaaagttcagttcttcacccatttgctcagcttccacattctatggaacctctggtgttggtcttacacttgttttcacagatggaactgttgagataaggtgaaaatacatctacctttctttcttcatattagcaaaaaactctctctcaatgttttgtcttgtctcaggtctttgccagaactctcccagctaaaacaaacttccattagaggcttcacatattcttcaccaaaaccaaactcgttaccagagattaccatatccgcttcttgggatggagatctagtcatggtaactttgataacaaatactctgcaagtagtcagttctagagctggatttttgtatgatcatcttttttcatttgcaggtgaatggagatgatgaacttattgttagctcagttttacctcaaaaggaaacttttaggtaagacttgatgatcctttgattagcacattgatgaacagtccaaactgactcttttattccaggcttgtcgagtccatgaatcgagtttacaagaaagataactcggtttgtcacgaaggaatcatcacatcatcatctccaagggaaaagaaggttaaacattggctttatcgctttctgttacacacaaacagaagcatgagtactaatttatcttatcttgtttgtttcagagtatgtttggttctgttttcaagactaaatcaaagcgcacaactgatacagaaccagaaagctccaaggaaacgatcgaggagctgtctaaaatcttctctacagctaatttcccctggaacaacaatgttgagaatagtagagagatcaatacaattactagggtggaagatgaagaagagttggacataggtagggtccacttttgatgtcctttcgtgatgcaatatttgagtttggcgtatgtctctgatatttttctttttgacgttttgaagatgacattgacattgacgatcatcatcctaatcaacaacaacaagagaagcctaaagaacaagggatattgtcagggcttagtaaacagaagatggcgaataggtttagtaatttcaaaggtaagctgaaacagatggcagctaagaatgagaagagtgttgtaaccaatgacgagaagcatgaggagaaaaacggcgccacagttgatcagatcaagaagaaatacgggtttacctcgtccgatgtaagcttctataagccttatacaagcttgtagtttcggtttgcgttggtttcatcttcatttgtgattgcaggaaatgggagctgccaaaatggctcagagcaaacttcaagacaacctgaaaaagttacaggtacttttcatggctttttagatttaacctaatctttgattgattcatttctagggttaaaagcctgtttgtatgtatctctgcagggaattagcttgaggacgacggaaatggaagatactgcaaagtctttctcctctacggcaaaggaactactaaacgctgttgagttcaataaacagagctcaaaatcttagcactctttttctctggatgtcaaaattacctactgtaaatactttcttcaaaagttatacaagtgtgtttcacgacttctttcgaacactagacaatggatagttttatcgtaacagagaagtgatcttaatttcaatctcaatctctccttcagagatcccacaagatgacaaaagacaaccacaatatataacataagaccaaaacaatattctccttcagagaaacaatttcttacttttcagaaatgtgtttgacttttcaccaatgatagagagagcaaaataagattgcaaacatatgatatgatctcataaaaggtggaattgaagctcaaagctaaatccaaagttacatctgaataatcccacagttgacagaaaggataaaacaggaatgtaacaattgttctccctaaaagctagctaaaagttgacataaaacaacagatatagttgatacacaaatcactgatccaacttcctaatcatcagcagctttctcttgtttctcatcatctccagttgtcttgtttccattagcctgccaaaaacgttcatatatttgtcaacacaagaaaaagccaaaagaaagaaaaaagaagaacgaattttatgtttatgggttaccagttccatgttatactgttgcatagtcacagcatactcagtctttttgctctgtgattttgctacaaaaggtgctctttcctgtttcattggatttgttattatcaactttaagacattgagtttctaaactttaaaccaaatcaaaaacactaacttcttcagtcatggttttccatttctttccagctgctctaccaaccttgaaaaaaaaagaaaaaaaaactaagattcatataaacaaaaacaaaagcattaccagagattgtaaaaactgagattactactactttaatacttacattaccgacggatttgttgtcagggttagccagattaaactcctttcggaaatcgtccctttaaatcaaccgagagggtaattatttagagcatattaattactgtaatcaaattagtgaagaaaaaagaagaagagagattagtgatttttatttacaggaagacgaagaaaggacttggtggtttcttaggcctgtttggatcctttgttttctttccaactttgttccctctaactttcaatctgagaatcataaaagacgatttcaaaactacggaaacaaattgaatctaagaatcgagattacggataaatataaagatacctatcatcagtgctcctcgattcaacttccgtttggttatctttcatctcgagatctgtcacagagaggaacaaaagtgagaatccggtggggaaaaatagctgactcggagttgactcagatgaggcggcgagtaggagcgagcttacctctgtgtgaacacgtttaggttatttctttttttgaattggggagagacgacgattgagataattctttgatgcggtgttaatttaagatgttggtatttttaatcttgaccgtagataattaagatgttggtacatttaatcttgaccatccgtgtaaattcaacagtaacttttatcagattcctaaataagtttttaagttacaacacacaaacatgctaacattgcatcatccctaattacattaaactacatttgattctctctctctctctctttgtgtctcatgtgtcatgaactcaccagtgtcctccatatacccatccctaccccaaccatcacagccaccattaccgttgcaaccaccttccatcgcttccctcctcgtctctttctgctctgcacctgtacctgtaaccacaacaaacttctctttagacaaagatacttctcagtttcttttatcattactagctgatctcacatgctctactgattgctttctcttttttttctttctaattctatagtatttagtagagcttactactatactctttcttcattcatgtgtaaacaagttcactcattcttacctcgtcgtctgcaaatctctctccttttacttggcctatagttccccgcgccctgagctttatttgaggtttaaccaaagaaccactcttctctgagtatttagctgcagcttctttggcctgcacatccccaccattaacaacaaattaaaaagatgcatcctttatgttattgatgtctaagacacaacttttggaatcactagtctcgtacctcgggaataacagtgtgtccttcattcacctcctctcgttcttttacttcagagttagactgcagctgcagacggattctccttggagcaataccctggtttatcaatcctgtactctgccggttctgaggctgtcgagcccggatctttatccctctcccttctgtgaggttgttctctgtgttatgattgatcatttgctcttgctgaaccaaatcactatagtatgaattagtgtcacttggccaaccagaagctccaccttctgaaccatactgatcaaacaaaagataaaaattgtcattttacttatgtcaagagtgattgtaaagataactgatctagaggtttctagcctacttaaagcaaaataatttggatacttctaaaattgtataggcctcaaaatatgtatctttgtgctcacctgcaattgcgccatctcagcatctgtatcagtgaaagccatgaagtcgttgaagaaagcatcctctggtgctgcagactgcagcattttagcagatgaaaatatcccatttggtgagactgctggattctctcgactgatcgattcctcgcaagagaagtcatcagggttattgaacacctcctccaacaattctgttagtgatacatctggttcgctggtaccatcttgaaattggaatccaatctcatcgtaactgaaatcaccagcatatatagaatccatacacggtagtggtgccttttgatcttcaaggtcacaagataaccaaagattctcttcaggtgcctatgaacacaaaactcaaaattagtcaagtcactcaaaaaagcctaattaattattcaagagtttccattcatacctcaatcattgtcccatctgcggtactattactatgagcataaccgcatccacctgaataatctgatggtttctcaacagcagcatcagaggaaggtgtttcttgaacaagatcagatgatgtatcatcaggtgagtatttgttgctggccgtaaaagctgcttcatcggacttgacaccattaacccgatcatcaggcttgtggaagaggcgacaaagaacgtaagggctttggccaggggaagtgccatcaagatccttaagagtgggacgatactcgtgcataatccaattagtccgctcacctttaggagctcgtccacgatagaagacaagagtcttcttcataccgattaaagtcttcttagacttgatgctacgatctttaccagtagctttccaatagccagagtcagttgctctgttagagcgatgaccattagggtatttccgatcacgagggcagaaaaagaaccactctggatcatccgtcttaatcaccgagagagctgccgacaatcagatttgtttccaattgagtaaagaaaaaaaaggtggaatctttgagagggaaaacagaatctgagaataaaaggaatcaaattttgagagaataaagagacgaaccaggaagatcccaaggttcccatttgcagacatcgatatcagggatgacacggacatcggagtgacgtccgttgatcttgagacggaggtagtgattgacgagctcttcatcggtaggtctgaatctgaaacctaaaggaagcgactccatcgatacagcacccataatcctcttctttagggtttctttccgactttgaatacactctctgcttttttttctgctttctaaaaagtcttcaacactttgctttctctcatcttcttttttttttccctctttttttttaacctttctttagaccacgtgagaaagataacttccactttaaacacttgtcctcttctgtcttattgtcttgtcttgtcttttcttgataggcttccattattgtggctagggcccaaaaaggccttaaagcccaaagcttcgtggtttttcttctcttgtggtttaggctttacagtgatcagagaaacccaaaacacgttggaaacgtctaagcagagaaaaacagagcttccaacaaattcagcattgtaattcttctagacgttttatacaaattttacatatacactatggaactctccttgcatttctaccaaatctgaattgaaaaagggatttgtaagatatgaaaatgcgataacgttgcctagattaatcagttttcgacattttttttttcctgttccgattccatgtaactttttgagggccacaacttttcttaattaaaaaaataagaaaaataaaagctcaagtgacaatcagtttttgaaaatgatactaactaagctcttaacatttttacgcatgtatataaacattaatcttttatttggtcttaaatacaaagcatatatatgatgctatcaatctaaatggtctatttgtacataattaaataaaacataaaattaaagcctgcgcatacaacatgtctacaaccaaaaacttctttcgtttatatcaaaatcaacatcccaatacttcatcttctcttctcttctatttggcacttatagacgcgaaaggtttgaaccggcgggaaagtaagacaccataatcggagctctcggggatttgctttttggtttctttgaggacaggactttcaagtcactctcatcagttgagctaatctttgagtctgattttggaacaaagcaatcaaagacggaggcaaagagagaacacatgatcataggagtttgaaaaacgtgtttggagtctatatacgatgaatgatatgattaagatttgatctcaggtaattacgtgaacgatatgtatttataagacaacccatctttataaattcttggacacgtttctaggaaatgaccactaaatcttgctggccaagctttgccctattcttaattgttttctcttttgacaacacttgggcaccttttttgactctttgggcctaattggaccaactattgataccaaacatacgttaacatcacctccatatcactcacccaatcaagttttccaaaatgttatgattaaaattagggtcttcatgtcactatccaacaaaagttttccaaaattcaacattaaaattaggggaaatatgtacgaaatagaacttatatatccatgttaagaagaaaaaaaactatatatccaagcaatacaaaatatttaggttctacactccattttatacaaaatattaattgttttcgattagagttttattagaaagttctcactcagataaaatcaaaactagtactctgtatttttatatagagaaaaatccttgtaagttaatgttactaatactacccaagtacccagagtattttgacacattctattgacttttgattgaaacatgtccggcttaatttaacgcaattattcagtttagattttgaacaccttaaatgaattggcttttaacagatcataatatcaataccagttttagtccttgagaactcagcccatgacttaaaatatgaaaacttcagcccatgacttaataaatgaacaaagagaacccaaaaacagaaaatgaatcatggacatatttacatatatcataatctgaccaaattggaaattatgctcaaatgcttaatattcctctgattcatttaccaaattcaacctctgtagaatcattctaaacaaaattcaattaccacttttcagacatgcgtcgcgcgtgtgagtgtttagctacatgggcttggttcggtgcaacccgcttcccactgttaattttacataactaccctcgcacgctccgcttgcctacacgtgcgttccggaatattctgcctttttggtaatttcgatggtggaccaagggtaaaattttaacctacttttcttggagccttttcacttaatgacaaacgcttcaagtacataaaaccttggattcttctgcagatttttcacactaaaaaaggaaaaaaagaaaaatatattaataaaacttttttatgttaaaatcttgggcttctgcttttgcgactcttggtcttcttcggacatggcacattccttaacctcactcgccgttttccagagcgtcatccgcaaaggtaagtcaaaactctgactagaatctcgaatcgggtcggaatgactcgggtcggattgaaaaatggtttttattttgtttctatgggttttgttaatgcagagatggtgaggagtttgcatgtctatgaatcggtggagattgagagagagttctggttcaagagcaaaagctgttatgtagagaagaaagcgaagcctctgtttcgttcggaagatttccggcgaccggagatctcggaagggtcggtttttggcacgtggcgttgtatctttgtgttccggtttaatcactcgcttcctcggtttcctactcttctctgtctttccaggtaacgccagttttgactcattcattattcggaacgtttttgttttaaaaatttttggtgctgttatatttttcacataacagattgattttttttagaattaggtctcttgaatcgaattgtagattatatagtgttactgtcttattgactccaagactgtcaaattttgacaacaatggcacaaaaatagcaatggactatgtaaagtgaatgagttaagattacctaattgtgaacaaataggcttgtaacaataacacattgtagtgttgcatagaattcgatcttctgttatctctgtattcggtaaaagaaattcatagatgttctaaaacttaacattttactaaaaaaaaagcacattgtagtgttacttgagttgtgagcatttttagcaaccaaacatgtttttgctctttttattgatagaaatcccaaactggaggacatccctaatttagccaacgagctcaagtttatctccgagttaaaaccatcaaagatttatgaagaagaacaatgcagtagcagtacagagggatattataactctgatctgcctaaaccacgaaagctcgttctgaaacaagatcttaactgccttcctgattcagaaaccgaatccgaggaatctgtaaacgaaaaaaccgaacattcggaatttgaaaacgataaaactgaacagtcggaatcaggtaaatctctttcttcaaatgtcaatagacttgccttccagataatatataactctaggccagttttaagctctcttttttttggtacaaggtccagttttaagcattttggtgattaatttcgggttattgtaaaaacacagatgctaagactgagattttgaagaagaagaagaggacaccatcgagacatgttgctgaactatccttagaagagctttcaaaatactttgacctcactatcgtggaagcttctcggaatctcaaggtcggtctcactgttttgaaaaagaaatgcagagagtttgggattccacggtggcctcataggaagatcaaatctctcgactgtctcatccacgatcttcaggtcttctctctctctctctctctttatcaatcctaatacatcaattcactgaaagaagcattgatttgttttggtattgattagagggaagcagagaagcagcaggaaaagaatgaagcagcagcaatggcggtagctaagaaacaggagaaactggagacagagaagagaaatatagtgaagagaccattcatggagatagggatagaaaccaaaaaattcagacaagaaaacttcaagaaaagacacagggcttctagagccaagaagaatcaagaatctcttgtcacttcctcttccacttaaagactttaggtcctttaacagtaacatcggatatattagttagttaggggtttctgtgaagcgttttggtatttagaaatgttagttacaagtctaacagatgatgctaagccatgtttgtttttggtataagaagttccaagaagagaggaactcttgtatcatgattttttgtggtcggatatcagaattgaatcttttattttttcttagtgcaattaggtagcaattaagatcgaatttctttatataatggtgaaagatcaaacccaaatcatggtttaggaactgatccaaattaacccatccatagtcaagaaaaactttcaaaagtgtgatgaccagttttgtttaaggctattggttatgtgtgttcttgagtggtcccagctcgtgctttgaaaatctacgacgactctgtccacacgacgaagaccatcaattaacgtgtatcgtacaaagaagttcgaagtctacaagtgtgtatacgtgtgtgtgtgatcctacgtcaatatttacgaaaatgagaaaatgtttttctttgtttcattttccatgcaactggcattttgtacgtggtcaagtatcattttgaagtcattttcagtgtttttgatcaaaaattttttttgttattttttggtgaagatcattttttttgttttaatattaaaaaagaaataacaatactttattttctgatctaaaaggcctatatatatatatttgaccaaacaaaaaaagatctatatattatatgatcatttaaaaatgaaaagtatgatgttttgaaaaaaggccaacttacgaacatctctgacaaagtgaagaaatttttttctcttacgcattcatataaagaaaaatatattctaattttgccattggagaattttggtgtttctaattgtgaaacagctctatagactatagtagaagtcgaatgactttcatatttgtggaaatgaatgagaaatttccataaagacacaaacgtccaagcactgtgactgagaggatgacttttaagcattttgctggcacaagcaaaagtctttttacttcctaacggtttcacatctctactattttttgaatgatgtggacagtgattaaaaaaaaacatgtgaaataaaattacaaataattcaaagatttccaaagtaaaaacaaaattctcaattatttttttcagatcacacgatcataaatagatagaaaaggctcttaggctatgattcttctttttggtcccatcttcttggcattttcgtttgtttttttttaatttcttttaaatgagaaagaaatgcataaaaaatgaaaaggtagaccaaaacccttcttcggttcacgctagcaacccccaattttcctccctttattttattttgttatctaaattaagtcaaaattattttgcaacccatcgttgcctctttcaatagttctaaactcgagcaataaaaactcaaataaaccaactgacttgagatccatatccactagctcttgtctgaattggtaaaacaagaagaagaagaagaagaagaagaagaaagagaaggctcattagaaattgatgggtgcttgtatttcgttcttttcttcttcctctccttccaaaacaggtctccatagtcatggtatttaatctctacaagttgttgtttttctttctgggttcttgcataaaacctaaaagatctacactttctgatctctctctctctctctgtctttgttaatgataagcagccacaacgaacaaccacagcaatggaacagagttctcgtcaaccaccggcgcgacaacaaacagcagcgtcggacaacagagccaattctccgatatttccactgggattataagtgattccggtaaactactggaatcgccaaatctcaaagtctataactttctggatctaaagacggcgacgaagaatttcaaaccggattcgatgttgggtcaaggaggtttcgggaaagtatacagaggttgggtcgatgccacgactcttgctccttccagagtcggttctggtatgatcgttgccatcaagagattgaattctgagagtgttcaaggatttgcagagtggcgtgtaagattctttatctcttaattccaaaactacttttttgcgattttgacttcttcttttgttggaaaacaaaaaaaactagcccaattatttacgtaattcgatcaagatgaaagaagagttgactatttcaatcaagaaacgacttctacagaataatttaagaattataaagataatttgttttaataaacagatgatgttttctcctatgataacaatttttacatcaaattataactttttgaaattgaagacctcgtttttttccatttgaagatacttttccattgtctgctattgaattcggtgtagctaggaactttccgttgttaccggacttttgagttggggacacgttggtacatgttattagctcataacattgtagtcaaagtataattcattataatgtaatataattaatttaaaattagtaaaaggttattagaaagtcaacattatttctctgttgcctcgtattggatgcaaatctggattctttcattgagtttattgtatgtcttaattagcagaatagattaatccttcaagttatataggctaaatttgagttttatggctttgtttgttttttggacagtcagaagttaacttcttgggaatgctttcgcaccgaaatctggtgaagttattgggatactgtcgtgaagacaaagagcttctccttgtctacgagttcatgcccaaaggaagtcttgagagtcatctttttagacgtaattaagatctctttaacccacgaaacattattcatcgttataacaaagtcttgatcaccaaaaaaactttaatgtgctttgcatcatttataattcaggaaacgatccttttccttgggatttaaggatcaagattgtgattggtgcagctcgtggccttgcgtttctacacagcttacaaagagaagtcatctatagagacttcaaagcttccaatatacttcttgattcggttagtactctaatttaattactcgcgataattagaagaatctccttctatttttggctgatgagatttctttgatacatatgggtgtagaactatgacgcaaagctttcagatttcggactagcaaagctaggaccagcagatgagaagtcacacgtcacgactaggatcatgggcacatatggttatgctgctcctgaatatatggcaacaggtactatttgaaaaacataacccatatatagtcttttatctaaaaacgatatggacaatacctgtataataaacagtttgtttcttgtcttcatcttcaggccatttatacgttaagagtgacgtattcgcctttggtgtggttttactagaaataatgaccggactgacggcgcacaacacaaaacggcccagaggacaagagagtcttgtcgactggttaagaccagaactctcaaacaaacacagagtgaaacaaataatggacaaaggaatcaaaggtcaatacacaaccaaggtcgcgaccgaaatggcacgcattacactctcttgtatcgagccagacccaaaaaaccgaccacacatgaaggaagtagtcgaagtcctcgaacacatccaagggcttaatgttgtccctaaccgttcttccactaaacaggccgttgctaactcttcacgttcttcgccacatcactatcgctataaagctggcgcacttggggctgaacgcaagagagcaacgcctggacggtttggatcagtagaaaaataaatagttgtttggtatcttttttttccggcggtatgaaatgattttagagtctttattgtttcattctctttgaattaattcttgaaaggttttgtgtataatactgtttcttttgtaattctagataaatattttcattctatatatatttttttaaagtctatgtttacagagttgatattggtaaaaagtttgagaaagtttcatacaaaaagaggataatgatgtcgtttttcaaagattggtgaacatttgatggctctgagaagaatattttattgccaattgctattttcagatttaattatagtgggatttggacaaagtattatcttcatttcaatcatttagatcctgacaaaggtttccttttatgatcttacacattcatttttcctctgcattatttgcatgcactggaagttgtatgttttttgtttactattcattttgatgttgaatatttatataaatttatttgtactttttcacattgttgcagattaaaatggtgttaagaaataaaagttaatattaggtcctttaacaagatcttccttttcttcattgttgcaaaacattactaattcaaagaatcaacataatgtgttagataaatatatcaaatatgaaatatgaaaataataactatactatgtgttatagtaaattattaaatagtatgaaaaaatctttcacttgggtttgtcctcttcctcttcatcttttggtggagatttattaagatcgaacttggcaatacatccagattcagtcgcttcctctacttgctccacaggttccacattcaaatcaatacctgaacctctcccaccttcagatcctggcgcatcaccaccaccactgccagaaaaatcaccggaacttcttcctcctaccgctacaccaccagaacttcctcctccgacagtggcaatagtaaaagcagatcttagcccgggaatcacaaacctttcagcccccgcagagaatgtaggaggaggaagaaacccttgatagtttctatctctatgagccctcatatgcccaaacactgccttccacgaaccgaaacctcttccacagatatgacaaaccggtggtcctttcggtggatgagtcaattcctttgctttcttcttcggctttttcgcttctccttcacccaaaccatccccttcgtcatcggtttgcgtagatatccttggtctactctttttcttcccaccactcccacttccctcattcattcctttcataaccgcttcctctgccgcagccaaaatcaaccccgccgcaagaaccgcttgctcattcaaacgcgctttttctgcatcttcctcaacgacactactactctctccaaatattctactgctgatattcaaagcagggaggccgagaacaatttctctcatattggtttcttcatcgctccattgctcatcagattcctctttctcttcctcagtaacatccactttcgttttctctgggttcggattactcatactattttcgcactttagtctagggattgatgtttcaaaacgacattgaattagcccttatataaagttttctctgaaccatggcggttatgacagttaattcctctcccgccttttcgtttgaagatttgcatccgtcgtttgtgattggtccgtcctaaactctgatattacgtaaatttgggcttaatatcgtataaagcccattactagcccataagttattcgtacttggtaggttggttcaagagtttttcttgttttctgtttgtaatcgtttctcgtgcgtttttggtcatcgagattgcaagagtcgttgcaactgcactaatactattatgcatgtgacatccgacaatgacgtgacttgtaaacttttgttttgacatattttttctttatttattattacaataacattatcattttttttttttgggtggaaacattatcatttttattagccattctttatttattctatatgtttttactatttaaaatttaaacattgatgtataccggtaaacatagttttcaatgtcagaaggaagctcttgaagctatgtaataaatcacaaatacaacaaattgcaacaccaaaaaaaactaatgtaaccattgatgtgtgatatatgatatagcgaagccgcaactgtcttaaatattattttgaataatatctacacactagactctaactaaacgtttaacagttttctaaaaatgcagatataaaaagttatctaaaatatttcacatatttgaataagaaattagaaacacaatcaccttttgaccattctaaggaaattcaattacaataactatgaccagaatcatctagcctaatttttgatattctctaaattaaatatttttaaaaagcttgaccaaaaaaaaagaaatggcaagaacacttactacagagtcagcataattctcggtaacaataattcttaggaaagagagcaattcttagctctgtagtaaaacacagattaataagctaagattaagattaaagaatcaatatgttgactttaagatcttagagccgcgccttacggaggctctggctagtggtaacgagccttctttgtctgaaaaaggcaacaaaaaaaacacaaaaaaggaataataaatttgaaatgagaaagagagagccaccacacacaccacatggccaaaaaagttaccgttgggtttagacagacttagaaacaaatcgtttccttcatgatccaacggtcatcttaatcacctagccgttgctatttccttcaataataaaaaaaaataaaataaaaaaaggtagcaactttaattttaattgatttgatttaatttctctctctcgcttatttcatccccttctctgactcctactgattcattcaattgcatcagacgtatacacagagtcacagagagaagagagatccttcttcgtttgatgctcttcttcttcttctagattcttctccaggagcactatcaaatcgagtaaaataaacaatggttaatccagaggagaacaatcgtaatctcgttgtcaaacccattacagagattcttcaaggtagtagtagtaaaacgcctttgaaaaatctgagaattataggtctgacgaacagagagtctgatgttgttttgtttctgggttttgtcagatgatgataagagaagcagaaaattcggtgtagagatgaagagacagaacaggagagcattgggtgtgattaatcacaatctcgttggtgcaaaagcttatccttgtgttgttaacaagagaagaggcttatctcagtaatatacttaactctctcgaatcctaaagtttgtctctttgattcttggttttgggattttgatgattattttcttcaataggagaaaacaagaaagctgtgacaagaagaagcttgattcattgcatccgtcaatttcaaggttaataaagtttaaagctttcaaaaacgtttcttttgctgagaaagagagatctgatgttatttgaatttctgcagatctcaggaagagactaagaagctgaaaccaagtggaaacgagtttggtgattgcatattcattgatgaagaagaggagaagaatgaagaagttacattggaccaacctatgccaatgtcattggaggaaccatacattgaatttgatccaatggtaattaacaatcacttttcaaaagatctttagcttttttcttttaatgtgaattctaaagaaagttttttgatttggacaggaggaagaagttgagatggaggatatggaagaagaacaagaagaaccagttttggatatagacgaatacgatgcaaacaactctcttgcagctgttgaatacgtccaagatctttacgatttctaccgtaaaaccgaggtacggtttcttaatatgtctctgaaccaaaaccataagattttgaattcggactgagacaattttccatggattttggtaatctgcagagatttagctgtgttcctctagattacatggcgcaacagtttgatatatctgacaaaatgagagcaatacttattgactggctcatcgaggtatattcaagcacctctcaatggtaatggattattgtatatatagaggctaattaagaagcttcttggatgtttcaggtacatgataagtttgagctgatgaacgagacattgtttctaacagtcaatctgatagatagattcttgtccaagcaagctgttgcaagaaagaagcttcagcttgttggtttagttgcattgctcttagcttgcaagtacgaagaggtttcagtacctattgttgaagatttggtagtcatttcggacaaagcttatacgaggaccgatgttttagaaatggtaaaataagattgtttctttccaaaaactcggtaaaaagattatacatttgatctgatttcaataatataatctttgtgtgcaggagaagattatgcttagtactttgcaattcaatatgtcgttaccaacgcaataccctttcttgaagaggttcctcaaggcagctcaatcagacaagaaggtaaagaaacaaatctatcaatgtacacaataatataaatggattgtgaattacaaactaatcttgttattgaaacagcttgagatcttggcgtcgttcttgattgagcttgctcttgtggactacgaaatggttcggtatccaccatcgttactcgccgccactgccgtgtacacagctcaatgtacaatccatggcttcagtgaatggaacagcacttgtgaattccattgtcactactctgagaatcaactcctgtaagtctcttttacccattagcacctataaagactcatctttgtaactaatatgggtttgttttacagagaatgttgtagaagaatggtgagactacatcagaaagctgggactgataaactaacaggagtacatagaaaatacagctcctccaaattcggatacatagcaacaaagtatgaagctgcacactttcttgtgtcagattctcactaaagagtggaaaatagtagtttgtgtatagctcgctgctaacattttccctctcaatttttaattacaaacgaaataagttcaaaacattcctctgatttgatctgtaacaagtctttcttttattgatatctcagcaataaaattctcttataccaatcatattttttgtcaatagttacagattcatagaatatgtatgatataaggatgagagttttgatttgaactctttttcttctacaactttaaataaaacacattggaaatgagtcttaactatactaacaccgcagacaaaactagtaccacctaacacaaacgctgtcgttttcaagctacatttatatatctcccaccaactctttctcagatcttttgtctaagtaaaagcgaaaagggcaacaaacaaaaataaactcggagaatctcacaacaatcatggcggctacgacgaactctttccttgtcggaagcaacaacactcagattcctgctttgaaacccaaatcatcatctcaatcctttcttcacctcagcaaaccaaacaccgtcaacttcgtcagcaaaaccaagcccgtcgctgttagatgcgtcgcttcaacgactcaagttcaagatggagttagatccggctccgtcggatcccaagaacgtgtcttcaacttcgcggcgggtccagccactttgcctgagaacgttctcctaaaagctcaggcggatctatacaactggcgtggatctggcatgagtgtgatggagatgagtcacagaggcaaagagtttctctcgattatacaaaaagctgaatcggatcttcgtcagcttctcgagattcctcaggaatattccgttttgttcttacaaggtggtgccactactcaattcgctgctttacctctcaatctctgcaaatcggatgatacagtcgatttcgttgttactggttcgtggggtgataaagctgtcaaggaagcgaagaagtattgcaagactaatgtgatttggtctgggaaatctgagaaatacacaaaggttccatcttttgaggagttggagcaaactccggacgctaagtatttgcatatatgcgccaatgagactattcatggagttgagtttaaagattaccctgttcctaaaaatgggttcttggttgctgatatgtcttctaacttctgttcgaaacctgttgatgtatctaagtttggtgtgatttacggtggtgcacagaagaacgttggtccatctggtgtcacaattgtgatcattcgtaaagatttgattgggaatgctcaagatattactcctgtgatgcttgattacaagattcatgatgagaatagttcgttgtacaacacgcctccttgctttgggatttacatgtgtggtcttgtgtttgaagatctgttggagcaaggtggattgaaagaagtggagaagaagaaccagaggaaagctgatttgctttacaatgctattgaagaaagcaatggctttttcagatgtcctgttgagaaatcagtgaggtcgttgatgaatgtgcctttcacattggagaagtctgaattggaagctgagtttatcaaggaagctgctaaagagaagatggtgcagctcaaaggacatagatcagtgggaggtatgagagcttctatttacaatgcaatgcctttggctggtgttgaaaagcttgttgctttcatgaaagatttccaggctaagcatgcttagttttaagggtttttgcattttggttatgtttgttgaaagatgataagctttaaagatgataagctttaaagcttatgatttgtttttttttcttcttttcagaatgaataatgtttaacaatgtatcaaaatctttctccatcaattggaaaaacaagtttgttaacaaacaaagagctttgttatttgtttgaagtgattatgattgatgatgaaaaccgccttaaagaagctgcaggtgatctcatgttctctttttaatgtctcctttccctgcaactccctgaaactgaagatcctgttttaacaaaaaagcaaaattcaattcagatcccaaactatactcagatatataaatacacagttcactgtaggaattaagaaagtaagttaccatttggtattgtctctctataagcaacagctacattttgaaagaactctctggtagcatctgcatattcaatcaactagcatattggcacactacgaaagcctgagcaatggagaacaaaatcagaatactattttcacaatcaagactcaccatgctccattgtcatagatggatcttgctcatcaacaaacccgatgagttttgctggatttccagccaccatgcttcagaaacgcccgagagaaaatgtcaatttgagcaatgttcaaacaaaaaagctcaacgagattgatatttagatgcatgtcagtggtttcatacctatgcgaaggaacatcctttaacacaagcgaaccagcagctaccattgctccagcgcctatcttaatgttaccaagtatagtcacacatgctccaagaagagcaccgtcgcctatatttggatggcggtcaccggtttctttcccagttcctcctaatgtcacaccctgtaacatgaaaatataagctagcatttataacatcaacagttctttatagttttggagaaatgaagttagagaacggatttgtacatgcaaaattgagacacggtcgcctatcacagcagtctcacctatgaccacaccagttccatgatccaacaatattcctttcccaattcttgcagctgagcaaaaaaaacagaaaccaaagttattcagatgctagatgtaaaagcatagacaagctattagctatgaatctaaaatctttaccgggatgaatatcgattccaaaaacctgagagaaaccattgacatggatcagaggttaacgttgtacaccaagactataacagtaaccaaagaagttgtagaagttactcttacctcgcttactcggctttgcagtgccaatgctaatagttttcttccttgcttccacaacttatgtgctactctatacgcctgcagtgcaagatagccctgtggaacaaactattctggtaaaatacacatgaaaactcacttagcaatcattttatatcggtgtaagagatgttattgtctttaaatcagcaactatgatggttaagagactaccttcagatgtaaaatagccgaactatacgatagacaagcaggatctctgtctttgaatgccttcaatggaccaaaaaaaaaaaacattacactgcagtcacattctcagacaataatatcagtgtcaaaaggaagattcaccgatacgagatagcgtttttacctgaacatcaagacgaatcgagctttgaatacctctgtcatgtaccataacgttgcaaaatatatccataagctgagttgccaacaaggtagggttttggagacggttagctagaacaaaactcaatgcttgctctaaacagtcatgcgacaagatactagcatacaagaagctactcaaaaccggctcctcttctgcctgtaaaacacacaacaatattcaccattaaaggaacataaacacacacaaactctgttccttaacttgtccttcgtgtagttaatgaaaaattgacgctgaaaaagtagacgggtgagagaaatacgtaacagcaagaaaaatttaaaagctttaatcaagtagttaaagagacagagaaagcatttagtgagaattcgaccccacggttttgtcggattgatataaaaggtacacaagaatgtcattatcataacctttcaatgtagaaaatcgaagttgattaacaatatcaaagtttctgtctttgttgaattgaagtcacatatatgaaaaacgtataaatcaataataagaatatgattatggagcataaggagaaaacctcaagcttagcttcttctcttatagaatcccaaattgggtcataactagaattggtaaaatccagcaaaaccgggtcggccacgggattaagggttcctctagcgtaaaccgggaaaatcctctcgaaaggaaactcgtcaccggtctctccatcgtctctggcagaaaagttccgggagacaatcattggaagagaagacaaagatgacgaggaagaaaaatcacgattctcgccgtttatacaagccatgaccaaaaagagtgaagctattggtgaagagtgtagagaagatgataaaaaaaaggttaatgataaggaaactgagaaacccttttaaacacagtgattgattgtgttggaatcgaagtagcgacagtcaaaaagataaaagaaaaaaaaaagtaaaactgaagtcttgtgtttctgtcctcactgttttggaatgtttcatgcgaaatcagatgtggtctctctctctctgctcttgtttgtaatgcgtgtgaccgtgattcagtccaagttcttaataccaccaccattgcaagagaatccaaaactatttggaagtatcctttatctatattactttaaacgtaccacacacgaagtggacgtgaactttaggctacaataaaacatttctttatattatcataaaacaattttcatttttttacaaaatattattttagaaattacaaaaaaatgattgaacaaaataattttttttggaataaagctgattggccaaagaaataaaataaaactgacaaaggcataaacgctgcatgtaaatcgccgaaaacgaaatcgaccttcgttgctctgaaaccctaaaagaagctaaatctagcaatggcgagaagatccgtttcgatatttaatcgccttctggcgaatcctccttctccattcacatcactgtcccgatccatcacctacatgcctagacccggagatggagctccacgaaccgtaaccctaattcccggcgacggaatcggacctttggtgaccggtgcggtggaacaggtcatggaagcgatgcacgcgccagtgcatttcgagagatacgaggttctaggaaacatgagaaaagtccctgaagaagtgatcgagtctgtgaagagaaacaaggtttgtctcaaaggtggattagcgactcctgttggtgggggtgtcagttctttgaatatgcaattgaggaaagaactcgatatcttcgcttctcttgtcaattgcatcaatgtccctggattagtgacgcgacacgaaaatgttgatatcgttgtgataagagagaacactgaaggagagtactcaggtctcgagcatgaggttgttcctggtgttgtcgagagccttaaggtaaaccatatataattatagggattgtttttagtccaaattgtgatcccttttgtatacatgatgttgttgaattgtttgtgtaggtgataacaaagttttgttctgagagaatagcgagatatgcatttgagtatgcgtatctaaacaataggaagaaagtgactgctgttcataaagctaacattatgaagcttgcggatgggctcttccttgaatcttgtagagaggttgctaaacattattcggggattacttacaatgaaataatcgtagacaattgctgtatgcagcttgtcgccaagcctgagcaatttgatgtcatggtaatgctcttcttttcctagttacaaatcaaaatgagtcattttgaaatgtgacagacgatgaaaccatcattgatgttgttttgatgtctctcatggatattttttgttggtttgtttcaggtgacacctaatttgtatggtaaccttatagcaaacacggcggctggaatagccggtggcactggagtgatgccaggaggtttgtcaaataaatataatagttacagttataatctttcgtaaaatgacgtttcttgggtttgttggggacagggaatgttggtgcagaacatgcgatattcgagcaaggtgcatcagcagggaatgtggggaatgataagatggtggaacagaagaaagcgaatccggtggctctacttctctcgtcggctatgatgctaagacatctccggtttcctacttttgctgatcggcttgaaacagcagtgaaacaagtgattaaagaaggaaaatatagaacaaaagatcttggaggagattgtaccacgcaggaagttgttgatgctgtcatagcagctcttgagtgaaaccatgtgagcttctctgcttctgcttgcttcttctttcgtctttttcatttcaactaagagaaaagtgttggttttctctgttttgcgttgctattttttgtttcttgattcatttttgttctctttttgattaatatccgatctcacgtttgagcatgagctctatgttataaaataaaatcaataaggacagacagaagcaatgttgtttatcaagcaagattttgaactctttttgcatcaaaattaggtaaaaacactaatcaaattacttgttaaaaaaggcataataaatgacttgaagaaaatgtgatacaaatttagatttgttgaactcattgaccaggaggatattatataaggtctctgattactaaacaagcatgtagagaaccaaagataacagtagcaccaaataagaaaacagagcagtcatggataagaagcattttgctataattagggttttacagggtatgacgcgcaaagaccaaagattttgaacctcagaatgtttaagaagaaatgcgtaaagagaaatatcttgtctccgtgtttcatacgagtacattccgtaggaacatttcataacaaaacttctctgtttctgctttattgaaatcttccaactataaaatacaccctgagtccatcatcttttgatcaattagaacgatctcagaatagaagtcattgaaaaagaagaacaacaataaaaggaagaaaataatttgtttttgagaaattttgctctgatttgttgatcctgaagattgaaatggcatcgaatagtgacgcaaggcctttgccaaaattcggagaatgggatgtgaatgatccggcgacggcagagggattcaccgttatatttagtaaagccggcgaggataaaaaaacaggtcggagctctagcaaggcaccttcacagagaaaacaagacggcgttaaaccaaccaagaaatggctctgttttactttttcttgatttcctgtaaatttcttaaaacgtttgagaatggcattgagaaactcttaccttagaaccttttctcatttgcttagcatttctctttataagatgttgcagagacgagaaagtagatagtttcttgtatatcttgtttgatgtttaatgtttaatgttatgtttcgtttgaagcttaagactagattttgaaaacctactagttcagattttacaacaatgcacgttttgcaatgccacctccaaaaacaatcataatctttcttcttggtcttagttaatttaaaaacgaatagttacttgtttgacaagaaacccctcttctgctccaaagtggatgaatcaggattcagccaaatattatatgagatctgccggtttctgtgttcccagggcaaataaatgctgatgaaccggaatggattttacattccgcttaagaaaggaaaagagataaagcaatgagctgtctaacaatgcaaatttgataaggacattttgagttttacagtatcgaaaaaattgtcctgcttcaaaaaggcatgattctaataggtaatgtcatattaacagaaaagccataaagaacagtatacattgtcaatatattgaattaatggactaatacataattgctgagcaatgttaggctagctagcattagtgtctttacctttcttgtcatctacactcttcttacaagaaagaaattggagtaaaatatgtgaatcttatgaatgcttatactgtgcttgaccttgtggttgcttaagaaaacaaaatttgctttgtgtagatatccaaatctcaaccgaaaatggatttgttttctagtaaatcagacagcagtatctgatcaaagattgttctgttcttttcttttgtgaaaaagaagagaggcaagcgatactgtaatctcccattgaatactctctcaaatgacaagaggaaaaagactaaaggaagaatattttcttaacactaagtagccaagtgcagagtattgtgacgtttcagtgaaattagattgctaatcattgagagccaaaagagaagaaaatgttcatgggatcaattagagaagatttacaaaggacaagtggtcaacattatattaatactctattcatttttgatgactctcttcaaatcatttggctaaataaattcctttttttttctactctatttcttctctcttctgtcatattctcaatagatttgtgaattaaaacttctgtctccttgtctcacattaaaataatagatagctacggaaataactacacacatgactaggaaatgaaacgtaccacgaccttattgaacaagattctcctactactcgtattgttttaaaaacctagattcttggaataatggccttagctcttttttctctccacaaatatttctttataagtttaaatctctccttggaaaacgttctctgagttgttgtgtttttttttttcctgatgaaacagatctttgagtttgccagcgatgatgaatgaggcaaagagggacaagttaggagacaaagataatcaaaataaagcttgacgttgctccatttataaccacaaagagattattaaatttagcaaaaagggataattgtgcagatatcctctttataaggttttttaaacacatgcccaatttgctcttacattaaaacctttttaattaaagggttattttggatttatctgttaagttctcctctattatatacctttgaagtctctgaacctttataacccaccaaaacccatttccaagtttaaggctttttgacttctctgtttgcttcagagcttggaaatggctgaatcatcatcatcctctgtagcgactacgcatgtacctgctaggtctattagtttgcctacaagactaatccatcctaaagcacagagagttgaagaagaactgaaaaagattcaagctttaaactcttcttcatcagcttcttctcggatccaacttggacttgccaagctcgttgagctctatgactttgtcaatgaacaagtcataagttctcctcaaggccaacaagctcttcgcctttgtcgcaacaggaaacttgtggaagacgctcttgatgaatccatcgtgttactagatgtctctgacttcacaagagacttgataggaacactcatggagcatattcaagaacttcaatccgctttacgtagacgcagaggaaatctctcttccgttcagtccgagatccgaagttacattagctttcacaagaaatccaagaccgaagcagcgagacaagttaaatcccttgcaaggagacaaacaaagaaaaaagcttgggttatcaaacaatccggtggtcttgatgaacattcttctatggtctccaatattctaaggcaatcaaacgcatcgacgatctctattttacagtcactcttgcagtttctttctacttccggtgagaacaacgagaagaaaaatggtgaaattggatgtgtagataactcgatgatccgttctttctttggaagaatcatcggtaggaagatggtgaaggagattgatgcgcaaacaatcctcgggagattagctatggttaatgtgagccttgaggcaattaaggatgagttaagttacttatctagacgacttattcaacatagagcgtctctcttgaacattgttactctataacaaaaataattttgtataatttgtttttgtaaaaaccaggttttgtagagataacatttattatagaaaaacagttaatcgcatactctctcacatagtttcttctctagtaaattaccgagaacacaatggaacagtctcgctaagcccaaagtctattagaaaacaagtggaaagcccattagttgcccaaaacaaaacaagttggtggtttttgtaaatttgtctcattcttcgttagcgggataatattttttgggggcattttagagatgaagtgaaatagagcgatgaattaaaccgtatcaaagcgaactaaccaaaaaaatgaaaaatggagcatgtgtatatattcctaagcctatatggtggcatcatcaccatccattcatcatcatcgcttacatcacatgctgaacaacttaccaaacttgattattgttgtcttctagctacgtgtcgcttacgtcacgtgcttgtcgtggggaattagtctacatgacatgttattgtttgtgtacgatgataatccacgagagaacaacgcagaaacaattatttgtttcatccccgataaaattatgatgctttatatatttgtttaataataatgttttgataaatgttaatctattacaatacaaaagaatgtctaattttaatggccgactcacaaaattttaggtattctataactcatattctaccaaaaatagctaatttaagaatgtcacatgcattctaacttgctcacgaatcctgacattgccttaaccacaacctattgactattttgagatttctcctccgtgaactccgaccatttttttgccttttgaccaccacatttgttttttctctgtatctgtaaaatcggcgacttaagtgtagtctctctatctcctctttctttataacatcttcctaactttttttcactaatttattctaaagttgtggagagtgtgagaagtagagtatccaaattcttctctttttttctttctcctgcgtaatcttgtgaaacataccataatcttgtaacaaataaaatgtatgtattactttagaaatactgtatacaacattttttttacttcatctgtgtatatcatttaataagagggagatgtatatcatttattcaaatgagataagaatttagataatagttaaggtagacaatttagatttatgtaagagagaacaatatgtatgattcagatatacgtagatgcacataattgtgtatacaggacagaaacacatacaaaacaccaacactaccgtacctagtacttatacattcaatagattttcatcatcgccatttcacgatggtacacatcaaatcaatccacttttctaatcttttttttttttttgttacgtgtttattctaacatttttttttatgtgttttagaaaaccatattggatatttcgatcttgataaattttctctgttttggtattgtatacggcaaaaattacaacgtactcaattttgatgccaaaggagatggtcaaactgatgattcagaggtaaaatatgttttgactttattttctctctacccaaaatatgtgactttttgataaatacatttttcttgtaatcaattagtactattttggctattaatatttttaaaaataattatgttaaaaaggcttttctacaagcatggactgctgcatgtggcggagacggggacataaaaacacttcttataccttccggcaaaacatttttacttcaacctactgtgtttcaaggcccatgtaaatctagttcgataaaagttcaggtaagtttatgttatatatatagacctatcttattcatcatatatatatagacgactaatccacaaatgtatatgatgaataagtttatgtttaattaagaaaatcaatcaaatttgtattttctcatttgaagttggatggcaccatcgttgcacctagtgacaaattcgcatggtcggaccccatctcccgaatgtggatcaaattttcaactgtgtctggcctaataatcgttggttcgggaaccattgatagtcgtggttcatctttttgggaggtgacaatttgatatatcataatttatattaattttaaaatataattttgttcattgcaatatcaaaatcactgagattttttttttttttttgcagcttaatctgaaagcttctcaacgacctacagtgagtatatctattaattttactatacattttttggaaattttgtttctgaattctgattatgattgcttttaatttattattaaataaaccactttttgtaggcattacatatcagcaaatgtgacaaccttaggataaacgggataacatcgattgatagtccaaaaaatcatatatcaatcaaaacatgtaatactgttgcaatatcaaatataaatctttttgcacctgagacaagtcccaatacagatgggattgatataagtgactcgactaatatcaacatatttgactctacaattcaaactggtgcgtacttatctataaatcgctcatgcattttatcaacacatgaatactacaccaaacgaactataaattattcaactactaagttttactatagctccaacttttatgtatttgttaatttataatattttttagactatgaaatatagcatagtaaaaatcatttgaatttcaatgactaaattttcaggtgacgattgtatagcaatcaatagtggaagttctaatattaacatcactggaatcaattgtggacctggtcatgggataaggtaattcataattttaagcttacttgcacataaaaaagatatgacataatttattaaaattattatcggaaaacagtgtggggagtttaggagcaggtggagcagaagctaaagtgagtgatgttcaagtgacacattgcactttcaatcagacgacgaatggagctagaatcaagacatggctggtattttctttctttcttttatactacgtcttatagttacactaatattaatcattcaaaatgtgttacatgtattgttacttttgaatttagggtggacaaggatatgcaagaaacataagttttacggacatcacactcgttaacacaaaaaatccaattataatcgaccaacattatatagataaaggacgtcttacagaggtaaatacttttttaataatttataaatacaaatatatttatattaatactaattttgaaagtatcattaaattgtgaaaatatatgattgcatgtgtttatgttcaacaggaatcagcagtagctattagtaatgtaaaatttgtcgattttcgcggaacatcgtcaaataaaaatgctataacgcttaaatgtagcgaaactacacattgtgtagacgtcgttatggatggaattgatattaccatggcaaatggaggaaagcctaaagttaattgtcaatatgttgatggagagtccagtgacactgatttgatgcgagactgctttaaaaataacactagttcttgattgagaatgtacatcaatagtcaaaagtttacccacgttttcaatttctactgtcgtgaaatgatatttgaatgtcaattttttttattaattgttattactcatcacagaatgtctgtatgaaatcacacaatagaaatcaattgatgtctttcaaacggttgatttacagtcacagaatttgctgccttggcaatcaaaactaaatacttctgttttgttatatcattttttgtcttttaaggaagagaaaaacgagaaatatttaatcgcaactaacctgaagattcctccaattgtttacgcaactcttacttttaattttattaaagcctttgtaacataagacaagctagccttggttctttgaagcaggacacatttttagatctctctaaaccaaaattatatttatcgtgacacacacaaaaaacagttggtatcgaaacaaacgaacaagaaactgaatttaaaaattaagttgcgagacaaagttgtatagatgcataagaagaagacaagaaggaacatgagttccaagagtcactgaccataactgatgaatttattcatgttagaaacaaacagatcagattaagtgacccatgttcttcacacatgttcccacattgtttaacccgaggatcgctctgtttgtgagcttctttgcaatatatatagaaaccctcaagaaccctaatagagcatctcaatccaattaagagttctgaaaaaaatggaaggtctcgattcagtcttcttgtctaatcaaaccacacaccaaccggttcgatctgcgagtcttccttcaagaatccatccactctctgttaaactcagaacagctttgagccggctcagtatctggcggagatcttcttcctcaatctcggtttcagcttcgtttgggtatgagacggttctcgttggactcgtgaacctcactgagctctacggttgcgtgcatgagctacttgagtctccttacgtgaaacacactcttcttcatcaccaggaagggaaacttctggacgaatctttagatggatctgttctgttgctcgacgtgtatgaggggacacgggaggtgattgtagcgatgagagaacacgtgacgaatctcaaatctgctcttcgtaggaaaggtagcttagagaaggaggcgaaagcatactttaacttgcggaagaaggcaaagaaagaaatctctaaacagattaatgcactcaagaaaatggaaaccagagatatttccaccaacacagatcaagattcagcgatagcatccacgagtgttctgagagagacaatccaaatcactgtctcgatgttcagacatcttttgttgttcctatcaacaataccaccaccaccatcgcccgcaatattcaagactaccatagggcttttgtcgattcctttcgtatcgccatcattatcagataaatctctgattctgataaaggaaatgaagagtcttgatgatgtctttctgggttctattttggattcgagaaaaactttattcgaagtagaaacaatggagaacgagaagatgaggagagatgtagttgaagatggttttcgtgatctggaggcagaactggactctgtttccaagtgtctagttaaaaacagagttttgttccttaacatcctcagtaactgttactactgagatttttgtcaacagatgtaaatcttttttttatttaaacactaagccccataacaagcccataaggcccactcgtgacccaatcagattactccgaagatgggaggtttctgttgaccgaacacgtcccaatggaaaggttgagaagaggcgataaccctaggagaagatagagttgttgggttttggtttggctcatatctaacttagatcttgtttgtgagatatcgcagcaccactcaagccgtgaatttgggtccatgtcttggaaaggaggccgaggaaaaccaaaaggatatggcggcgattatggcaagcctgagccttttgtgattttccctgaaattacgttacctgatccaaaatcaatctcaacagactcgcaattagttgtagttcaaagctactttactttcaataagttttggatgaattctccttatcacttatgcgatggtggtgtttctaagaaagagaaagcgagtttagatattgagaggtattcagattcgtttgaagccgaagatgaagtctaataagtatggatctttctttgattttcttcttcttagacctgataacttctctaaagaacttgttggagatactcgaagagaacaacggcctgtgaagagagctaaatggagtcaagaagctgatttgcagaaattggatgtgtttgagaagcttgagtctaagtttaagactcaaggcaatgaagagaaagaagacggagaagatgatgaacaagttgtggaatcagaaggagaagaatcagataacggagattatgatcagaatcaagactttgatgatgatgaagacgattataatcatgaggaggatggtggatttgaagaggtgtattaagctgcttctccttttcccaaaagaatcaagttttccagtcaagagaagactatttggtgtaatttctcaataagcatataccatcttgaaattttacaccataaaagttagtagcactattatgggtgcagatggttgcatatgaatgatgatctttttagttgtaccaatttttagaaattgtagttggtgaaggtttcgtggacaaatcttattgtttgtagaaaaacattttctgataacataactttacttgaacactccttttcttctagatagatcttattcgactcataattggtgtaagattcttctaattttagcaagatatcattgacgtggtagttaccatcaataagtaaagatcattgacaattacgtggagccaatagctactgctaaaaaagaatgtttgttatagatcttaatatattaataagaacagtaacataatgtgatggaacatataattggtgtcaagacataaaagatgatttccaacaaacatattaagcttttacacgtgtactttgggtaaggaactgtgacaaaatacgatgaggctaattatatggatactttgttgatatgaatctagaaactattcatagcctttttataatgcattgtaacaaattagtactttagtctcgtagtaaccaattattggaaatttaaacattacgtctcgcaaaagagtatcttttaattatgacgaattcgtttctgttaaaatcagggtttttcattcatgagttatcaaattaaaatcttttcgaagatttctaatacgaaagtacaaatactttttttttttaataaaaaatttaagtacaaatacctgagagattagatgttttgaaaagaaaaaaaaaattcacaagttttattgtggtttgtatccctatcatttagcatataaaaaggttcaatatctgcatatatatggtagaattgtatatgttgtaaaatttaatttgtctccctgtgttaacttgccccacaacacgttgcaaagtgttattcatatgatctggttttaaatgaattgttataatttcttcaatcaattttggtttcagtaaatggaaaaaaaaaacaagaaatcgaattaatattgatttagttaccaatatatatttgataaattttcaaagaatttaagaaatctgtattgtgttcaattttttggttccgtttctgggtaggtcggccccgggtctttcttttcctgttgttctgttcctgccacgagaatgtcaaataactttgaagacagaagttatcctatcgatgctgtattcatgcctgttgaaaatgccacctaagaaaggacggaactgtcgagtaaggattggccgggcagaggcctttggtgtccactccagtcaagaattggagcctccaggtattagctgttagccgtcggactcatttaaaggatttagtttggtttctacgagcttcttatgattgctaataataagtaaacaagttaaataaaccattccaggataatgagaatctgtcaatcagatacacaaagtcagtgatatctcgcaagcaaatcatctcaaaactcgtgcacttctttatacgtgtcataacaaggaatatttttctttttttgataagatttggaacgtgagaaaaaccatgtagccggcagtttaaaaaatattttcgttataagcaacctaaaaatgatgattggataatagaagggactatataatatacagttgaggaagatctggatctcgttacctaccgagaccattttaacaccgtcgatcattttaaatttgagaaactcgaaaggtcaattgataatgtggcaaaacaggaggcaacacaaacgatgactcatcaggctcatctctgtggccaaataatttgaccaatataatagcccgacagctaagagagtcagatttgtcagtaataatcggaccaatcaaatttaaaaaatcaattattgttgaagttttgttggttgatacgcaaaaccctatgctatatatatacatgtgtagggcaagttgagtaaaacagatcgatcaagaaagcaaaatacaaagctcaaaacacatttctagaacaaaatcaaaacaaaagcatattatataaaaaaaaatgtcgaatatgctcgtcaagaatcaactaagatctataagcttaccttcaagctcgcatccaagcacgaccggtatcgaggaatctcttaacaaggtcaaaacgattaacaccatgacgggttcgtccgaatcagtcttgatgggcttggagggtttggaggagctctacaattgtacggaagattttctgaaaatgggctcaacgcaacgggttatgtcatcatctgatggatccgagtttatggaggagatgcttgacggttcgttgaggctaatggatatatgcagtgtctcgagggatctcatggtggagactcaagagcatgttcgtggtgttcaatcatgtgtcaggagaaagaaagtagtcggaggagaagaccaactcgatgtcgccgtcgcggggtatgtcggatttagaaagaacatgagaaaagaagctaagaggcttcttggatctttgaagaacattgatggaggtttaagttcatcatcatcagtaaataatggtgagcaagaagaacatcttgtggtggttgtagacgccatgagacaagtagtttccgttagcgtcgcggtgttgaggtcgtttttggaattcttatccggacgacgacaaagtaacattaagagcaagctggcttcggtactaaagaaaaagaaggttcaccatgttgaggagaccaagaacgagttggagaatttggatctcgagatattctgttctcgtaatgatctacaaaagaagcttgaggaagttgagatgagcattgatggattcgagaagaaactagaaggactatttcgaaggttgataagaacacgagcctcgcttctcaacataatatctcattaggttttaaagtattcatgtaatgtaaccttcaaaggcattcgactttagagaatctgccggagggatacatcatagacgcatggataagatattgtacactaattaaacataattttgtagagattaatttgtaaaaatatacacaataatgcattgatatatacacaaggcagactttaatacatgaacaaatgaaagtttaaaatacatatagcatatttataaatttacaattaaaatcttacagaaagaaaaacaaaagaactagactcttaatccaaaaaaatcatgatattcataagaagaggtgggaattcggaccatgggtcacatgtgtaccggtttagttattttccggttcataccaactgaagaaaccaagttataagcgtaagttctggcaggggcaatttcgtcaaaacgagattttgattggatcctacggacgcaaccttttaaagaaaaggcgcgagagagatctgagcgaacacgttagacacacataaaaaaataacggtcataaaccgccgtgtggtcatagaaactatataaagaccacttcgattgaaattgaagacgtggtattctaaatctctgcaaagaagaaattatgagtaatcccgagaagtctaaaattgctgaggaagagaatgagaattttgacgagagtgattatctttggagcgatgaagaaggagacatacgtgaaattgttcttggccttcctgcactaagacttagtgagagtctcaatgtggatgaaagcatccgtaacgaagccgtttccgcggcgaagttgatcgtggcagccgccaaggaagccacagggaatacagaacaaagtgctagtggtaccggtgacgttagtggaactccagaaatcataaaagttgggaaaccccgtgtattattggaagcgctggccgaagcatctggttgtacccctattggggtgaccactactgaaggagaggtagtcaagaaaccccgtaagaaaggttctactcagttgacacatctgccgcaaggccctcctatgtgtaatgtttgtgggaagggctttgcttcttggaaggctgtttttggacatctaaggcagcataaggatcgagggtatctaggttttcttcctccgccaacattcaatgctgctgaggaaggatttggtggagttgctactgcttcaaccggtggtgcagtagccactgctatttccgttggtgaagtccctactgcttcttccgctggtggactcgctacggcttcttccgatggtgaagggcttgtttcaagtatcggaagggcgaggattgacttaaatgccgatccagtcgaggaggaagacaaggtaattggagttggatctaagcgaaaatttgatctgaataggtcccccccaccagacggtgatgaagagaacgatgataaagtcgagtgatagttattttcttgttacatgcaaatcattttccttagttacattttttcttcggtttgtcgctgtgaaatgaatatactaactatgatattgttacttcttaatctatgttatttgaaaagataacttttttccaaattgcaacaataaatgcgcgaatgaaataatatattctctactattgatatgttgaaacactatgtaaacttataccttgagtgggaaaatgtgaaaagcgaatttatataatccatatcccatttgcataaaaaaataatttttaatcctattttttaaattatttaaatatatttcacttatgtcgaaaatatacaaaatgtaaatgaaaaaacaaaaccccaaaaacattttttgttaattacactgcattatcgcaacagtgaaaaaaggagacaagaaaatagcacattcaataaatttgcaaaacgttgagtctgaataaaacagaatatgcccaaatttagtttatatgccataagaaaaacgaagtattacaaatattagcgttaatgattggtaattaaatggaaatgtcatttgaccaatcagaatatgtaaaattgttaaaagtctactccacgattatcaaatcaaaccaccagtgacaactgacaagcaaatctaatcaaaatcagtgcccctcttgcacatgtcatagtgcgagacgttatgcagaaggcaatgatgtagtttttgttatatggaatatatctttttattcctgaggaaccgtaagtagcaaactacctaatatggtcggagaaagatccggatctcataacctaccaaaacgacttcaagaacgcgaaaggtcaattgataatgtggcgaatctgtaggcaacagagactatgactcatcaagctttctcaatttgaccaatataataatctgacaggtcagagagccacagatttgtcagtaataatcggaccaatgaaatttaaaacatcaattattgctgaggttttgttggttgatgacgtttcaaaaaccattgctatatatataggcatgtgtagggcaagttgaataaaacagatcgatcaaagaagaaagaacacaaaaacccttaaaacaccttatatcaaaacacaaaagatggcgaatatgatcattaagaaacagttaagatctataagtttaccttctagatcacaaccaagcacaagtgggctcgaagaatctcttaataagattaaaacaattaacaccacgacgggttcatccgagtcgatcttgatgggcttggctggtttggaggagctctacatttttctggaggagtttctgaaaatgggttcaaagcaacgggttatgtcctctggtgggtcggaattcatggaggaaatgcttgatggttcgttgaggctgatggatatctgcagcgtctcaagggatctaatggtggagactcacgagcatgttcgtggcgttcagtcatatgttagaagaaagaaagtatctggtggaggaggaggagataaaatcgatgtcgctgtctccgactatgtcggatttaggaagaacatgagaaaagaagccaagaagcttctaggatccttgaagaaagtcgatggagggactcgttcatgtgataatgatcatgaagatgaacaacttgtggcggttatagatagggtgagacgagtggtatcggtaagtgtcgtcgtattgaagtcgttcttggaattattgtccagacgaaaaagtaacataaagagcaagttggcgtcggtactaaagatgaagaaggataaccatgcgccagccaagaacgtgttggagacattagattccgcgattttcggagattttttatctcatgatgatcttcaaaatgagcttgaagaggttgagatgtgcattggtgggttcgagagaaatctagaagggttgtttcgaaggttgataagaacacgagcctcgattctcaacataatctcccattaggaagaagttaatatatgcaatgtaaccttcgtgagcattcggttttagagaatttgccggagggttgcattatatagaataatagaaaagcatataaaatattttgtacactaattacaaactgtgtgaaatagaatcaacattgcagttatatacccataaatcttatgaaaccatctacgactcataatttaaaatgacaaaattagtcagaaagtttcataaactcgaatggatgacttgaaacttatacatatcttgatttattatgtaaaaggagatcggagagttgacttctcagtgtaaactcactgacctaacgtgtatacaatttctagacaggaaaaagaaaaagaacgtgtatacaagtatcgttgctgaattttatgcatgctatagtattcgaatatcaaatcatgaacgtcaaagatgctgatatagtagctaaccatatttattaaaactgtaaatatttgttaaaatgtagattttcttttccatagttcacaaaaaaaaaaaaaaaaaaaaaaaaaaaaaaaaatccatttgtaaagaaatttcactttaaatataagatggattttttaaaaaagatctagaaaatctagcgaaatagatttttttttaattggtttaattaagacgctcattttattcacacatgtcgatcacagttgtatgaaatttgtttgcttgttaataatggcatctccattaatggtatctccattgtttttgatgtatctttttttttcatattacgttgggccgagtttgcaatagacatgaacccagttatatggttcaataccaaatatacatgtacccaagatcatgtaattaaccaacatctgaaaccgttttaacccaacccctcatccaattgcactattaatatctaaaccgagattttacgaaaatcctttacaacggctacactttcgaatattttgaccgaaggtatatttaatatttccatcaaaataagttgtagattttaaatcagtaaatgaatagttactaaaatttgaattagtcacttccacaagttaacattttgaaactggtaaaaagtcactcattttctctcgtcaacgattgtatcaaaagtgcctttacttttggtctcgattgacactttattttcaacgataatccttaaagcgaaaagatcccaaactcgaaccaaaaggtaatctaaacctgataaatggaaaatctgatatggacactcctaaattcatggtaacataattgctgacgtgtgacggtgttattcaagggaggcatcgatcgatcgtctcttgcgtgggaccacatcatccgtgcatacattacatatctcatatttttttacataaacaatgtaacaaaaaatcttccaaagatcttgaaattcaattcaatcgaggtacccaccaaaaaaataaagcattgtatttgtaaccttcaaaagaaacaaaatccaacgagactaaaatcaattaaatattaaagaaatgtaaatggacggtggctttggtgcatgaaaagaggtgtgaaaaaggtttcggttatagtaaccgaaaccgaaacatcgaacttcgacaacgattttaactcaataatcaatcgacatagcatttattgagccttacgtgttctgttttcttccttagtgaagtacccacactcacttcacatggtcttcacgtcttagctaagctaggccctactcattgacatttatgtcatttcttgtgtatttatataaaccctagagttaaaggacagaacaaagcataactcgaatagctaattttcgtcatcatttcttgagatgtatatggcctcactgtctccgagactccacaaagcgtacaaagctagatgtgttagcttaccggttcggtctcatccgagtgttaggaggattcaagaagtggtctccaaggttagagctttggggtcttcttcgttagactcgaggacaatagtccgtgacagtctctctggtctcaccgagctttacagatgtttaagtgaagatctcttcaagtcttcttctgaaactcaacaagcccttcttaatggtgatggtttgatggaagagcttcttgaagtatcactgaaatacttagaggtttgtggaggagctaaggacgcagcttcgaggatcaagaagattgttgtcgagcttcagtctgctttgagaaggagcaagaaaggaggtgagtttagcctcgagagtgacgtggatgcttatgtggcgtctaggaaagagatcaagcaggagatcaagaagtatatggtaatgtcgaaagagacagatgcgtctttggagagtgtttggtgtgatggcgatgatcaagagatgagtgctttagttagagtgatgcaagagacgagtgtaatgacttgtttcgtcttacgctcggtcttctcgttcttgtcgtcgcctaaagggttaaagactaagaatcatcatcaccacaaaggttgggggattgttatgaagcttgtgaagaaaggaatagaacatcatcaccaggagaaaagagattacgagacgggattttcttgtctcgtgcttgaagctatggaatctgagcttgggaagctcgttgtgatgatgacaagggaagatcaagaagaagagaaaaagattagtgaagaagtatctgagagggttcaatgtgcattggttagatccgaaggtgtagaggcagccatggaagagcttgaagagggacttgaaggattgttcaaggtaatgatacaagctagagtctctcttcttaacatcctctccacttaaaatggatcagattcgaatttcttggtctggattggaaataagttagttgctacttgaccagtcgattggttttaaaatcttggtttggtttttgtttgtttgttcttgtatgttgtgagagagagtttaaacatgcgtccatgttttagaggatgtgtgtttgttgtaagtgtgtaacccgttcaggtgtgaaaaactcttgtaaagttttatgtacgtaagcatctttattgcacaaataaaagaggtgtcttttaacaatattttaaaaaatttaaacaacaaaatattaatagttaaatatgaaaggtctttaattttaagacatctttttcaaaaatgtttccacaaagacacttaagacacagtgtctaaaatttaaggacacacaaacattataatgttatatacttttatatatattaattttattcgtgggaagaccctctctaatgatgtgggatggagatgacctaaatatctattattttaccacgtagaacgataaatttaaggagagaaagacgaaatgcaaaagcactaactttaatgtttagaataggataaattactgaatagtattattttttcgtaagaaaagcaatttagctatatagcatagcgttgaagtaaataattaatcaaatgtcacaattttctcaaaatgaaaaaccaaaaagaaatgggctaaaattaaagaggcaaaagtaatcatattaaaatgtcatccaaaaattacataaacaaacaaaatcatccattgatatcgagaatgtcatgaattttgctggtagacttttgacaaacctttcttagaattgataatgacaggaacttttgttaaatgacccaacttaacattttattttcttattttccttagaaaattagtcgataaatctttcactttcttttgaaataatgaaccattaaaaatagaattcagtggctaaaaatgggattgagagtgagcgccacatacggtggcagtacttcgaaagaatttatttgtcttagtttgattcacacaattctcacttaagtaggaaaccatattaaacactagtacttttacaatttagttggaggcgttaggacaaacgcaataacagcctgtaccaaaacataattctttgcattttggcgtacaaaaactaagctcattttgcttaatcgatagtggagcttcatgatgcacagatgcttcactagtggttagagattgaagattaggacaaacgcaataacaacttgtagcaaaacataactctttgcattctggcgtacaaaaaccaactccattttgtttaaccaatattgaagctttaagattcagagaagttttttcagataagagacgtttcgcctcagcaatctgaactgtcacggataccatcactacaagatataaatgtagtaaacattagtaacacaatacaattctttataaccatatcattatactacaaaaacattaattttaccagtaaaagctaaaaggatgatgaaagcagacttggatgaaaattttcccatcgtcgtagaaagattatgtttcttcttgataacttttttagacttactagaaagagttggtgaagaaaacgatgtgatatagacaatgttgtataacgttttttataggacagagaaagtgtactaatttaggaagattaatatcaaattgttgctttgtggtgaaaattaaaatgatatcgataatgagataagataagatcaaatctcctaatatggtcgacaatccaattgacaattgttacctaataagatttctactattaatgagaagatcttcaaattattcgctgtattgataaaagtttttaaaaagttagtttgactcaaaagaagcccattaccaaagcccatctaagcccattatgtaatcaatcaacaagccacggtgttgcttaggatgctgctcgttgggtttttggcaacgtgtgtaagatacaacggctatattttgacatggtccaagtccagctatcataagtcggtgtgttcttgtgggacctctaaaagagcgttactttcctaatttcagcggaccgttacatacacactcgcacacactagccttcgtcttcttctacatctctttcttcttctgtgtcagagacgctgtggtgaaaagaaaatgacggcggccgaagtagcttctgcgcagaccaagaagctcatgaagtttagtctttctctcttccgtcgtggctttaactcctctaaatggtactcaattttatttgatttgatgcttcttagattcctaaattcactcaatctgctacactgcgaagaaaaatcttgtattgaatgttttttccgtgtttgattttgggaagttggaaaaagttaggtttttttagtgtgttgatgcttcttagttctgggtattctcagtttcttaattttgtagaaaaaaacaaaaactttgatctgtgtttgagaaatttccgatctgggcttttctaagatgtaagtatctgattaaagtctgtttttttttcaatcggcaaaaagcaaaacggcggcgaagatggctgtggctcgtataaagcttataaggaacaagagattagttgtggtgaagcaaatgaggcgtgacatcgctgttcttcttcaatccggtcaagatgccactgctcgaatcagagtatttcactttcctggttcactttgttagagttttccctggatcgttcaattcaatgaagattttgctttttttgacaaatttaggttgagcatgtgataagggaacagaacattcaggcagcaaacgaaatcattgagcttttctgtgaacttattgtttctcgtctcactatcatcactaagcaaaagtatgttcatatctactatcagttttcatttgtctctttgctttgcttcagtttggcttcttatatgtgtatgtgtttggctttcttttaggcaatgtcctgtggatcttaaggaaggtattgctagtttgatttttgctgcgcctagatgctctgaaattcctgagcttggagatcttagagacatctttgcgaagaaatatgggaaagattttgtatctgctgctactgatttgcgtcctagctgcggtgttaaccggatggtaactaaatcattcatgtttctgattagtctaacttgaactgtgattcgtttttagatgcaagatgaaatcgaacttgttttcttctttcttgtgcgtttgtagttgattgataagctttcggttagaaatcccggtggagaatacaaactgaaaatcatgaaggaaattgcaaaggaattccaggttgattgggatactacagagacagagcaagaacttctcaaacctcaagaagaaagcatagtatgtctcttaatctcccctctcaacttcctctttcattattcaaaatcagaatcttagaagctgtgttcttcttgcaggacgggccacgtaagtttgttagcgcttcaagcttaccagttaatcgtgcagctatcaacgagcctattgatcctaccaaagcagtgccaaggtatgtatccattccagtcgttagcttgaaataagggatctgaaacaatgaagtcttattgttgttttgctcatcagatcgactagtagcatgagcatcaacacgcattatcatgacaccgagtcagcagcggaagcagctacagaattagccaaacaggcagttgcagcagcacaagtagcctccttattagctaccagaagagacagcagcaacaaggagttctctgtatcttctgatcattcaacacaccagaaggattcacagtacatggatcatcatcatcatcatccaggttcaagaagacaatcacgagactccgaaacaagttcctattacgcaaaacctggtgcagaaaacagaggaatgggtaggagacacagctacaacaatccgggtattaatgaatctgactacgaggaagagtataccaataccgaagcagaagcaaaagaaacaatgaggaggagacacagctacaaccctcgatcagttcctcctcctgcaacttctgagatcaagtttgatgagtcagactactacgaggaagagacagagccagatgaaccatcacagggtcgtgtttcttctctcccgccaaaccgagcaccgcctcaggctcctcagtccggtgagtccagacaggactcgagcggtcaccaggttcacccaaaactgcctgactatgatattttggctgcacgttttgaagcaatcagacacagtaaagggccattgatctgaagccaataacttccactactgctatatacatagaaagaaatcatgtacgggataatgcaactatcatgtttagttttgtttatgaagaggaagaagaaagatgcattttttgtttactgagtactttactatatataacggttcggttttgttatgatcttgtctaaaagactaaaactatagttaaaccggtccaggaaatctaaattggaaactggcttttcagaaatccaaagtattgtatagattcagtgcaaaactgtaaccggaacaattagttattaatcttcatactagggaatgcttatctaatttaatggtgctgcaagagtggagacgaaagtagaattcggacaaaaatcagaaaccaagatgaagatttcatggacattatacttcacaggggacaaatctgtgccttaaacttaactggcgcaatttggtggattagtttatcacagctcagcctcgttgaattcacaccttcaactccaatggactactactacgaatatgatagttgcaaagacaagagattcgtggagtattgtgaatttgtggagatctatgcattattaatcaactttgcgcaaaggaagcttatatcgagaggaccattggttttaaggtttttattagatggaagaggatttggcaaattgggttgaggttagttccttggaagacaaggctctcattgtagcaaaatcttttatttcatttaatgtcatttataatttattaacaaaaattggccgaactaaattaagaaaactttatataaatattaatatatatataatgtcattggtataaaagagacttttattaagaaggaaaataaattataaacttcaaaaagtgcatcttaacatttaattttttttccacttattgacacttttttggtctatatagaaatttggactagacaataaataaaaatattcaccaataaactaatcttagtcaagtcaagaagtgaaaattaattgttaacaatactttcctatataaagggtattgatatattatggttgaccaaggaaaaggtaagttcctatattttctacaagagatttattttccttgtcacatttataatatatatacataccttatttcgatttgtccatagatttttcagattattcgaatcttagggtttcaacaaacaaagagagatgagtgaagccaccgtgtggtctgatttacccggagaactcctcgatcatatagccaacggtctcttctccaaagtcgagcttctccgattccgtagcatctgcaaaaccttccgttctgcggttgactccgacaagaattttctcgaccacctcaaacgcaaccgtagacgccttctctctccttacagtactggtaaaacgtgttcgctctctcccgcagctttctatcgagtggttctgtcgtcatatccggacaaaggatggcttatcaaactccaagatgcctatgtctcctctcaaaagcagctcctttctcctctctctcgtttctccatcaaatcatctggcaaaaccctagatctcttggagttcacggtttcagagattcatcaatcttacgacgtggaatacttatattataattcgactagagcatcgtttaatttcgctagagttgttctagcagaggactttgttttcatagttgataactacaagaaaatctggttgtgcaatagtaacgaaagtgatagtcattgggtaagaatcatggatgaagaagttaaacttttctcggatattgtatttcacaaaggttatatgtatgccttagacttaacaggagcagtttggtggattagtttatctgagtttggaatatttcaattcggaccttcaagtactccaatggactactgtgacattgatgagtgcaaagacaagaggttcgttgagtattgcggagatctatgcattgttcatcgattttctaggaaatttcgcataaagcgagttgatatagatatgacagttggtttcaaggtttataagatggacgaggaattggttgaatatgttgaggttaagtctttgggagataaggcttttgtgatggctacagatagttgtttctctgtcttggcgagagagtactatggatgtttggagaattcgatctattttacagagcaaaacaatgttaaagtgttcaagcttggtgatggtagtatcactaacatggttgattcttcttttcagagttgttttcagatgcttattcctcctttagtttgatcatgtttttctcttgaattttgatttctttttctcttgtgtccattagagtaaaaattgtattcttggttttagttttgcttgttactctttttttttctttcatatttttctgattttgttatttgttacttactttgctaagtaaactaaaattacaaaaggaacaagtgaaatttgcatactctgagagaacttttttagagtatacttggtgcatcgattacagaaccttctgcatgttactcagggcgaattgactccttattaataaccgatcaaaacgatgtgatatgtgccatgcacaattgatcactactataaaccattagattgttatcaatcattttttctagacattatagatttccgattagtaaaaccaaaactttaacacaaccaggaattaacgattaccaaaaagcaacagggaaaaaaaaacatttaccgaaaatatcaattatcgtttattgtcgaccggttgactaaattatggttagattgatcttttttggtttggttatcgagtatcgaccgataggtaagcagtcaaacggcgtcgtttctacattccgagaatcgccttcttcactttccgcgagcgtctagaggaagctgtcgacagattctttgaaatttgcccagaatcgatgaaacaatcataagcactcgaaatatcgtctctaaaaattttttagtttcctccaggcgttgataggtgatcagagatatgaagaaatcgccgttgccggtgcagaatgtgcagagctccgataagaacgttgccggaaaagaagcattggtgaagcttttgagatggcatttcggtcatgcagatttcagagggaagcaattggaggctattcaagctgttgtatctggtaagtcgtaatttttctcttttactccggagaaaattagaatgattgttttagaattctctgttttgtgattgatgagattaggaagggattgcttttgcttgatgccaacgggaggaggaaaatcgatttgttatcagatacctgcattagctaaacctggaatcgtccttgttgtgtctcctttgattggtaaatctgttttttttccctgattcgttaatggagaatctctgttttgattggtctctctaacgatgtgctttgtttctcgtgtttttcaacttctcagctttgatggtaagtgcattgtccttttcttattgtgttcttctcttttaagcttttttttgttaatggtttttgaagaaacgttttttgtttctacttaggaaaatcaagtaatggcgctgaaggagaaaggtattgctgctgagtatctctcatctacccaagctacacatgttaagaacaaggtgatttggctattgtgtgttttttggtctctgtgtatatatctatatacgacctgactctatgctttgtctattatctgacctctttcaccagtactctttcttaaaattctaaattcattccatgtgctttgctataacattgataaaatcactgggatgattgttttacttgagtattttatgttgataattccttgactttggtttagatccatgaagaccttgattctggaaaaccctcagtaagattgctgtatgttactccagaattgattgcgacgaaagggtttatgttgaagctgagaaaactccattccaggggtttgctaaatcttatagctatagacgaggtaaggccttgtaatgcctatactagagtaaccaggaaagcttaaggtgtttgacgtgaatgttggctttaattttcttgagtgtttatttgatttttcaggcgcattgcatctcatcatggggccacgacttcaggttcataattggtgattatgtcagtattcttgtccatgggcttactatagtctaacttgtgttctcacattacagacctagttatcgtcaactttcaaccttgagagattctttggcagatgttccggtgttggctctaactgctactgctgctcccaagtaattttccatttcagtgcttaaaaaacatgtgcgtaaattttagatctttttctcaacatcaattctttgcagagtacaaaaggatgttatcgactccttgaatttgcggaatcctttggtcctcaagtcttctttcaatcgcccaaatatcttctatgaaggtttctcatcgagctcctagtttgtttaatgatattttctctctgtaaactgttatgaagtattccaaatattgttttgttttagaatctttcattactatagaaaggattttctagatttgctttcctatcatctaaataagtttttgttcgtgcagttcgttacaaagatcttttggataatgcttatactgatttgggcaacttgctcaagtcatgtggaaatatttgtgcaattatctattgccttgagcgtacaacctgtgatgacttgtctgttcatctttccagtattgggatttcttctgcgggtaaaaattcgtcccatctacctctatctgcttcaatattgagtgacaagcgctgacatttacttatccatatatatgcagcctatcatgcaggactcaatagtaaaatgaggagtactgttttagatgattggctgtcctccaagaagcaaattattgttgccacagtggctttcgggtatgaataactctgtgaattaccttgcatttggttcctgggttcattatgatcatcttctttacgccttattatgtttgggagctcgttggggcacgtggtaaacttctaacggtttttcttcagaatggtaaacaaagattctttctcatgttgcatctgtttaattgtgtacttcttatgtactgtagcatgatgagactactgactttctagggcatagataagaaggatgtcagaatggtttgccattttaacattccaaaatcaatggaatctttctatcaagagtctggtagagcaggtcgggatcaattaccttcaagaagtgtattatactatggtgtagatgacagaaagaaaatggtaacgttaaacgggttatgacaagttttggcttcacaagtttcattctacgtgtaagttctatagcttactctactaactctttgctaggaatatcttctgcggaattcggagaataagaaatcctcatcctctaagaagcctacatctgactttgaacaggtaaatgctttcttgtttcttctagcctctatgtattttagtttaaacttatttctccatgtatttagattgtgacgtactgcgaaggttctggatgccgaagaaaaaagattcttgagagctttggtgaagaggtgtgatttgtattttactgatgattcatgaatcaactatcaaagtaagctgctgattttctagttgcaaacagtttcctgtgcagcaatgcaaaaaaacgtgtgatgcatgtaagcatcctaatcaagttgctcattgcttggaggagcttatgaccactgcctcccgaagacacaattcttctcgaattttcatcaccaggttttgcttttaaccgaatctaaatgtgctgcgaggtatacagagtctaactgaaccccatgcccattcttttgaaagctcgaacaataagaccaatgagggacagtactctgagttctggaatcgtaatgaagatggaagcaattccaatgaggaaatatcagattcagatggtaactcctttattgatatttacttgcatgcatatccaatcttttcgagtaaacttcttgtagctttaatttctaactcacatgttgagtcatctacacccagatgccactgaggctgccaatagcgtaacaggacctaaactatcgaaaaagttgggactagacgagaaattggttttactggagcaagctgaggaaaagtactacgaaaggaataaacaggtttggtaacaaattcacctcatcttctttagaaacaagaagttaacatcatttccagtttaacctatcaaagcctattcgaactaattgcaggtcaaaaagtcagagaagaatgcaatatctgaagccctaagggattcgagcaagcagagactcttggatgcgttgacacgagtacttcagctgcttgcctgtgtggaggagtaatattctctaacttccgcataagtctgtctattctagtttatgaagcttatgggtctctctcttatctcattgattgacccgaaattaatattttgcaggattgattcccagaaaggatccgagtttcttgaaaatgagtgctatcgaaaatatagcaaagcagggaaatcgttttactactcgcagatagcgagtactgtgagatggctaggaaccgcaagcagagatgagctaatgacccgacttagctcagtggtcagtttggctagagagcaagagccattagaagagccgttgctggctactgaaccggtggagaacatagaggaagaagatgatggtaagactaacacggtcgagtcaagggttgatgaaccgacacaagagctagtggtgagtccgatcctttcgcctataaggcttccacaagttccatcattctcagagtttgttaaccggagaaaaataaaacaaaacacattgatagataaatcttctgaaggttttgatgacaagaaaccggcaaagataatgaagcttcaataaataaaaatgtgctaaaccctcacgatttttgttcactagccaaaaacgttttttccagtttcatttgtagtttagctttagcattggcccatttgtctcttaaagtcgtaacatacacaataattagtattccacctgattgaatagacttactgaaggtaaaccagttaaaccgatgtaaaaaccaaattagaccaaagcttaattgatttttgtgtaaaaatagtttgaatcccaatcttagcatcacgacgacaacactaaaatttaaattataaacctacaagtcgccataatttgggtgagagaacttcatatttgctgctgtaaatttaaaatgactttttttcaatttctaattttcccttgatcatcttacaaaaggacttattattaaattcacatatgacaatatacattttacacactaactcacaaccaccaccactaaagaaaaaactaatcaagacaaaagaaaaacagattaaagaaaaaatctaaagattctcctccttccctttatccagacgccaactgctttcttttcttttcttttccataaaaaacgctcactaatttcaaaaagcacacctatttccaatctttttgatatattattaatcgtattcgtatattatatggtttataagatacgatccgatatctagtgggtggagttttagccttttacgctatgagatacacctcatggagaaacttgagactgatgaatccacggcggctccggcgaaaaccctcgcgtgatcgctttcttgaccgtaatccatcatcggacgatactccagatcatcatcgtgatcgtatacaaactccggcatctctatctcattcctcctcacatgttcccacagataatcaactctgcttatgtacctcagcttcccgtacaacctaccgcagccaatcaccacaccaattaattaatcaacgtttttctaaaaaaaactatagtatcaagaaaagtcgttgaccagaaaattaaaaaacgcggcggttagttactcacccgccggaaaatagaaatcggccgcaggtggcgaggaagagacgtgattgaagacctggatggaggaagtaaacctcctgaagattgtctctgacgtttaccggaattgcgtcgtagatcgctcgtagagctgagatacctgggaagttctcgcttctctgtacgccggtgtggacgtagagtacggcgaatggttttctacctaatcgaggaaatatcttctcctctagatacttcttcaacacatccagtgacagaaatcgagctgatttcagaaacaaaaaaaactcaaatataagaacaaatctacacagagagaaaaagaaacagatccgattgatatatcagtacctgggaagaattttccgataatacgaaggatcttacggccacgtttgtctctgccatggatcttgaagatctcaagcttctcgatcagctgctcttgttcaatctccgaaatctgagaactcatcgtttctctctctctctctctcttttttgtttcgtcggtgaaattcacagttgaattatagaagaagaagggaacaaaaattgaggcgagtgaagaagaagatgatgatcattttaaaaagggaaagacaaaaaaataaaaaaaatagtgtattaattggagggtaatgggagaaacgacgggctcttacgaatattctatagcatcttcctttttatcatgatcttcctcacctctttgtgggtcctacattccaataattattacctttttcgccctctcttgatctttcgttgttaagcaactaatctggtccatccgtttttgctacatctaacggctactgccttttttgactcttttcccgccccccgccttaagcgttacgtctcatcacatgattcatgtagattattggataagatgggcgttattttggatcatcccatccgatgttgagttaaactaatctgagcttacaaattattaaagattataaagatctctatgttcatatctatccaatgcccaatggaatcttttaaaaaatataaggaaaaacattatcttctgcatattaaacggataataacagcgaaacttgtggatggatcattacaatagaaaaataccgaggaggcacattcaaggaaggtattcaatagggcaccaaatattgtaaacgtaattctctaagtttcccatacatcatatatctgctactactctacacgcatatatatacaaaatacatgtgtgactctcttatatagaccatacttttagacattatacttacataaagccagtactagatggctgtagattctcgaattaatagtaccctaacattctttggaagaacctatgaatctttcaattataaaatagtgatgctctggtgtaggctaagtgatacagatgaagttgtaacctcctatggcaacaataagcactttcattacttgaatttgtatagaacaccctatagctatcaggaggatcaagtaaacaacatttacggattcaccttaatattttctgcaccaatacaaaatttactgaagttgattggtctcatttgcctgatcaaggctgaatccagtcatctccgctagttcagcgagttctatttctccgcttaagacctaatttataaaagaggtgaaataggtactgacatgtgatgaaatgtacaaggggttcagaggatttactcaccttatcatttattatccatgttgggaatccttcgatcgcagcatctgcacatgccttgagtatcttagttcctttcttatatccatccggaaaacattccacgtagttcagttcttttgccgcttctcttccaaacatctgtagatggatggaactataatgaacatataataaaagcataaaactgattcttggcaaacaggtgatgaatgaactaactacctctttttgctctaagcagtgagaacaccagaatgccccatacattttagctccaatggagtttagatgttttgctaaagcaatagcataagggctcgatgatgaactgatctctgttctaaaatatggcagttcaatgtcaccagagctggaaggagtgaaacaaaaaacgatcgggattaaaagagaccacctgataagactcatacatctttcggaagctatttgttcactactcgttacaaatgactaaaatttctatcgggactccccaaagaaaactatgaactttgattaccgtgaagggattggttgagcagtactgtaagaagcagtcaaggaggcaactactatgattgctaagcatatctgcaatcctacaacttgctgtatttcttgcaacttcacatcctaccacatgcatggagcacattatcataatccgaagtttagaagttatcttgagtcaacatcaggaaaaaaaaagaaatggaaataaagggatacctttacagagaggaaaaatagactaaatgataagaaagcagacaccagacaatacaggcatgatgatcctgagagttttgtgctaaggatatacaggaaatatgcactagcagatgccattgcagtcgtgatcccaaataacgcgaaacgcccattgctcttactgattccaaaaggtagattcccttccccaagctctgcacttagagcggttactacgccatacataacaaatccaatcactggaagaggaacacctggcaaaatgtaaaaaaggattttcattgagttcaacttacctgcaatgcaatgttggacaaacaacgaagacaaagcactacatagagtggagtgaagcatgctatttaactctaacaattctatgcatactaagtaccaaagctcctaaatgatatagcttcaagcaaagattcacagagactatcacatgcgagtatttaatcatgcctactataaaagagaggacaattagctacataaatcaaacgctataatcaataaagcgatggataataccgaaaacgacggcataatcgctgttgaggacatcaccgcaagtgccaccaccaatagggcaaaacgcatcggagccagtgaccttgaggtaagtcaaatacgcagtgtctaacatcccaataccgccgattccggtgtaccagttgtatgtcgaactgttactagtagatacttcacttgtagacgatgaggaggaggaagacagcgacggtgccgaatcctcaccgttttccggctcagatgaagaacatttaatcggaatcgcaggaaatctccgatcagagacctaattcagaacatctgacttcaaatgaccgatcacacactactgtcactgaagaaaacacatgacaagaatttacctcgaatcgtctaggataagaagttaccgacggaggagaaacctcacggaagccgaaatgaaactgacaagacgacacagaaacaaacctcgccatcatcgtcgtcgaagaatcgctattccaccattgttaacttcatcatcttctctcctccgctccactatctcagccacttgtttcaatattgggcctaaacgaggcccaaatacgataatttggatccataattagtttatcacaattgggccttacggtcttcttatccgtccgagtcagcaagttatcctcttcaacacgactcacgaggcaccgagttggacttatcatgattcattatctacgcattgtttacattttggaatcgactttggtacataattgaatttatccatagaaatgatagagactcgaagatcggacataaaacttgctgacgtgacacccatacctttgtgtctgtatgtattatataaacgctatagaactaagagaagaagtatctaagtagcatcaaagcattctaaaagaagtttcaaagaagaagtgaaaatggaaaccactgcttttaacacaacatcacgaattggaaactggtcatcggctatttctccacctctacaaacatgtggatctttcaagtgccaattaccaacacgaagaggtgttattgtagctgatcttcgaaactcaaacttccgatggtaagctagcaatcaacgacgagaatcgccttctctatctgattttagattatgaataaatattaaatctgagtattaacttcttgctcaaggaggaaagcaacgacaacaagcagaggaaatgttgcagcagaggcagttaaaattcctacgtcagtaccagtaagagtggcgcgtgagctagctcaagcaggataccgctatctcgacgtgaggacaccagacgaattcagcatcggacatccgactagagccatcaacgtaccttacatgtacagagtcggatcaggttttcatcaccgaccttaaggttcctcttatgagaaagagtgaaaatgaaaaacaacttaaaactaacaccaagccaaaaccgttgcaggaatggttaagaacccgagttttctaagacaggtctcgtcccacttcaggaaacacgatgaaatcataatcgtaagtttcagttttgacattcagagactaaataaacccctatgaagacaatcccttgtttcacaaaatctctgatgcacgtaataaactacttctgcagggttgtgagagcggtcaaatgtcatttatggcctcaactgatcttctcactgctgtatgtgtgtaatatcacttcaatttatatagccgttatccggtttaggacaagcgggtttaatgtcgccacatgtacagggcttcacggcgatcacagacattgctggaggatacgtcgcttggacagagaatgagctgccggtagaagagtgaaaacaatcatagccatatcacctcctgtaattatcaataaattctgtagatgttctcaacgcaagtatcaatcatcattattattctctaaaacatagtttaactgtcaaatctatattgggtgaaagctttaccgaacttcgaacaccacaaagtttacggaccaattaaggacggggatgcatgcctacacacgtttagttttcgccgttttaaaattttaatacttaaactaatttttaaatgataatagtgaaattaacattattttagttaaaaattattaattactttcttaaaatttaagttttaaattggttttaaattattattctttaagtttaagtgttaaatttataaaatgatagaaaaacatatttatacatggacaagatcaaaccgaaaggaaccgaaactaatattatgaaaactaatatcaatctcaacacaggtgtttctgtatctgaatcgtttacgatcagttaatatgattacttgctttgattaacaaagaaatccgtagccgctcttaagaatggcttcaaaagaatggctttcactttattgagttgcaatccaaatcaatctctgcagtgataattgtatcaaaaggagattgttttttaagaaaattatacatggacaaaaagagtgaggctctaagaaactgtacaacgaaaaaacgagaagtgagtagagctctatcaaaccgatcaaaccaaatttttcagcgcacccgagagagtcaacgatggcctttttttaggcctgaaaagtaaccaccatgtttatccttgtggcgctcatcatctccaacctggtggtttcaaaacatattaatgctaagaatcgtgttggttagagagagagatgcaatgataaatcaattacctcgcggattagttggttaagcatttctatgatttctgcaaaattgggtcttagagctgggtcttgctgccagcatttctcaagaagttcagtcagttttgggtgtgtttcctttggaatttttggtctaagtccctgtaaattaattacaagtcattgtgttgaaggccgttaatcaaagcacgagaaaaataactataaagtcctatagacatgataccttttggacaacgccaacagcagcttgcagtggagtcaagtaagaatatgggagctgttttcattcattatacaccagtaagaaaaaaaagtgtgttaaacacatgagatttactgagtttagcaactttcgactaaaatccagagagagaaaactaggagtcttacttccccagtcaaaagttcccacagcacaatcgcgtagctgaagacatctgccctgtgatcataaggtttgtgctcaatgacctgggttcacagagtctagtgtcaaaagcatggaaagtcaaaaaaaagaacaagacaaagaagtaatacctctggagccatccatcggtatgtccctgtttccgctgtcataacccctgactcagtctgcactctggcaacaccaaaatcggcaactttgacaacctgtccaaaattatgtagaaattaaagacatgtacctctgttctaagaagattaaaagaattttgtggagacggaaagaggaaattaagttttttgtagaattttaaaggtttacaagctgaaaagactacatgatcagtggccaaagattgagacttacttcatgttcgtccataagaagattagcagtcttaaggtctctatgaataatattgttttgatgcagataattcattcctttcgagacgtcgagtgccactttgagcaaagattgaattttaaaaacccctttgtgtttgtgaaggaaatcataaatgctcccccgagtcatgaactctgatacaaaaggataaaatcatccgaccatgaatacatgtaaaggccaaaactaggaaatgaaatgttacggtatttactaaacaatactctatagaacctcaatgtcctgctgaaacaactttctcaccacgcttgaagatacaaaaccaacaaaaaaaacgatctagatggaaccagtctcctattcataatctactgacaacttacctgtcacaatgcagaggtttggtgatcgtgtacatgcaccaatgaactggacaacatttttatgccgaactttcctacaaatagggaagtatcagtagtggatgtttctgaatattaactttgttcaatggacactggttgttagaaaatgagggaaactcatgcatgtttctacgtatacaccatgaaatggaatttttggagatttattagaatacatatactataagagtacgagttgcaattagaatcaaattgcagcacacctcattatatatacttcctgagaaaactctcgtagcatttccgcattaacacgctcaggcttgagaattttgatagctacttcctgactacaataggttcctctaaatctgcatagccattaagaatatatagctgttaatttcctcatatagtattaaaaacaagatttttgaatatgaaaactcacagttccccgtatgatccacatgccacctttttttcaattttgagctgcttcatgtcaatttcccactcatcagttccatccgtaggtatttcaacacacgcaggtagcagctcgttggttgatttgtcatgctcaaagaaagtgatagatttctgttttgaacaaggttgatcctgcagagcagccagtgtggaatatggagacatgacgactatcaaaattgattcaaaacatagcaaaaaaaacatcagtacagtggtgcattcagtttcggagtgagctaattctaaaccattacttgcactttcggaatttaaattatgaatgtggcatggagtctaatataaggaatctcatgaagataaggaatgctcatgacaatagactaacaaaagataccttaaactttcttatctccttcttcaatgcatcttttaaaccttctgtttcctgtatttcaaaagtgtataaagttgcaaccagtttagatggcaggggcagaaaggtcatcaatggtcaatatctttcgaagtcatttacttattacataagtcacaagtcatttactcaatggtcaaaatctttcaaagtcgtttacttaatccatcagtcacaagtaacatgatggttctgaaagatgttgtgaaccatacagaaaactgaaactatacctcctgcgaccagccatcaacaacaaatacatcgagagagaaaccatcggcggtagagaaagcatgagcctcttgaatattcaatccaagttcaccaagcatggaagttagctggaaagaaaacaaaccgattctcagtcagataatggcttaatagaaacataaccacccattctctacatgactgtatctaatggatccttaaaagtagagagggaatcctatacatcactctactcaaacgaagagaaaaagcaattgtaaaagaacacaaagtcacatgtttccaatatcagagctgacataaaaagaaatggaagaagcaacatcaccaacctgactaaggagtttcggcctgtcgattgtagaaaaggtgatttcgtgcatcggtctataagatagacaacaaaggataatatcaccacacatggttgtaaaattaaatcaaataatcctgcaaaacagacgataccatgctacaaagaacgcctcttcaagtatatgcagacaagaagactcaagtaagttaagtgtcaaaagtatatatctcaccgagaattaggcaactgtgcattgacagcactatcatcgtcttgagcatgatctttgtaagcttgagtaagagcttcgaaattcggagaagaaccaaaagttggaggtgcaagagacctcgagttataggagctttgagcatcttcattgaccgcaggatccgaaggatcaacgtcaccagaatttccattcaatgtgggagaaacctgtaagaaaagtggaagtatgaagaagcaagcaagcaagattaaaaagtggtgaagatggttaaatgatcacacctgcacacaacgaacttcgaaaacaggtctagtagcaggatcttcagccaatttcaacaatctctgatgagtaagtacatcttctgctctctcaacatttacatccaaagcatatctatacacaaaatccatttcagcaggaagtcaaatttgaaaacatttattatcataggatccaaaaagattaccgagcaggaagacgattgaagtgaagccagaggagatcatcaaaaccagggaaattagcttcttcgtaattggattcctggattcgttgaagaacctcaccgtacacctccagtttcatacggtgctgtctagggctttctttcgttattgaagctaccacggctctgcttccgcaactctcctccgtctcctctttgatcgccatcgcaaaacagcagatcagaattgaaaaactctctcaagtaaaaccagaattc

SEQ ID NO: 674 - DNA, 99461 bp, Arabidopsis thaliana
gaattctctgttttgtgattgatgagattaggaagggattgcttttgcttgatgccaacgggaggaggaaaatcgatttgttatcagatacctgcattagctaaacctggaatcgtccttgttgtgtctcctttgattggtaaatctgttttttttccctgattcgttaatggagaatctctgttttgattggtctctctaacgatgtgctttgtttctcgtgtttttcaacttctcagctttgatggtaagtgcattgtccttttcttattgtgttcttctcttttaagcttttttttgttaatggtttttgaagaaacgttttttgtttctacttaggaaaatcaagtaatggcgctgaaggagaaaggtattgctgctgagtatctctcatctacccaagctacacatgttaagaacaaggtgatttggctattgtgtgttttttggtctctgtgtatatatctatatacgacctgactctatgctttgtctattatctgacctctttcaccagtactctttcttaaaattctaaattcattccatgtgctttgctataacattgataaaatcactgggatgattgttttacttgagtattttatgttgataattccttgactttggtttagatccatgaagaccttgattctggaaaaccctcagtaagattgctgtatgttactccagaattgattgcgacgaaagggtttatgttgaagctgagaaaactccattccaggggtttgctaaatcttatagctatagacgaggtaaggccttgtaatgcctatactagagtaaccaggaaagcttaaggtgtttgacgtgaatgttggctttaattttcttgagtgtttatttgatttttcaggcgcattgcatctcatcatggggccacgacttcaggttcataattggtgattatgtcagtattcttgtccatgggcttactatagtctaacttgtgttctcacattacagacctagttatcgtcaactttcaaccttgagagattctttggcagatgttccggtgttggctctaactgctactgctgctcccaagtaattttccatttcagtgcttaaaaaacatgtgcgtaaattttagatctttttctcaacatcaattctttgcagagtacaaaaggatgttatcgactccttgaatttgcggaatcctttggtcctcaagtcttctttcaatcgcccaaatatcttctatgaaggtttctcatcgagctcctagtttgtttaatgatattttctctctgtaaactgttatgaagtattccaaatattgttttgttttagaatctttcattactatagaaaggattttctagatttgctttcctatcatctaaataagtttttgttcgtgcagttcgttacaaagatcttttggataatgcttatactgatttgggcaacttgctcaagtcatgtggaaatatttgtgcaattatctattgccttgagcgtacaacctgtgatgacttgtctgttcatctttccagtattgggatttcttctgcgggtaaaaattcgtcccatctacctctatctgcttcaatattgagtgacaagcgctgacatttacttatccatatatatgcagcctatcatgcaggactcaatagtaaaatgaggagtactgttttagatgattggctgtcctccaagaagcaaattattgttgccacagtggctttcgggtatgaataactctgtgaattaccttgcatttggttcctgggttcattatgatcatcttctttacgccttattatgtttgggagctcgttggggcacgtggtaaacttctaacggtttttcttcagaatggtaaacaaagattctttctcatgttgcatctgtttaattgtgtacttcttatgtactgtagcatgatgagactactgactttctagggcatagataagaaggatgtcagaatggtttgccattttaacattccaaaatcaatggaatctttctatcaagagtctggtagagcaggtcgggatcaattaccttcaagaagtgtattatactatggtgtagatgacagaaagaaaatggtaacgttaaacgggttatgacaagttttggcttcacaagtttcattctacgtgtaagttctatagcttactctactaactctttgctaggaatatcttctgcggaattcggagaataagaaatcctcatcctctaagaagcctacatctgactttgaacaggtaaatgctttcttgtttcttctagcctctatgtattttagtttaaacttatttctccatgtatttagattgtgacgtactgcgaaggttctggatgccgaagaaaaaagattcttgagagctttggtgaagaggtgtgatttgtattttactgatgattcatgaatcaactatcaaagtaagctgctgattttctagttgcaaacagtttcctgtgcagcaatgcaaaaaaacgtgtgatgcatgtaagcatcctaatcaagttgctcattgcttggaggagcttatgaccactgcctcccgaagacacaattcttctcgaattttcatcaccaggttttgcttttaaccgaatctaaatgtgctgcgaggtatacagagtctaactgaaccccatgcccattcttttgaaagctcgaacaataagaccaatgagggacagtactctgagttctggaatcgtaatgaagatggaagcaattccaatgaggaaatatcagattcagatggtaactcctttattgatatttacttgcatgcatatccaatcttttcgagtaaacttcttgtagctttaatttctaactcacatgttgagtcatctacacccagatgccactgaggctgccaatagcgtaacaggacctaaactatcgaaaaagttgggactagacgagaaattggttttactggagcaagctgaggaaaagtactacgaaaggaataaacaggtttggtaacaaattcacctcatcttctttagaaacaagaagttaacatcatttccagtttaacctatcaaagcctattcgaactaattgcaggtcaaaaagtcagagaagaatgcaatatctgaagccctaagggattcgagcaagcagagactcttggatgcgttgacacgagtacttcagctgcttgcctgtgtggaggagtaatattctctaacttccgcataagtctgtctattctagtttatgaagcttatgggtctctctcttatctcattgattgacccgaaattaatattttgcaggattgattcccagaaaggatccgagtttcttgaaaatgagtgctatcgaaaatatagcaaagcagggaaatcgttttactactcgcagatagcgagtactgtgagatggctaggaaccgcaagcagagatgagctaatgacccgacttagctcagtggtcagtttggctagagagcaagagccattagaagagccgttgctggctactgaaccggtggagaacatagaggaagaagatgatggtaagactaacacggtcgagtcaagggttgatgaaccgacacaagagctagtggtgagtccgatcctttcgcctataaggcttccacaagttccatcattctcagagtttgttaaccggagaaaaataaaacaaaacacattgatagataaatcttctgaaggttttgatgacaagaaaccggcaaagataatgaagcttcaataaataaaaatgtgctaaaccctcacgatttttgttcactagccaaaaacgttttttccagtttcatttgtagtttagctttagcattggcccatttgtctcttaaagtcgtaacatacacaataattagtattccacctgattgaatagacttactgaaggtaaaccagttaaaccgatgtaaaaaccaaattagaccaaagcttaattgatttttgtgtaaaaatagtttgaatcccaatcttagcatcacgacgacaacactaaaatttaaattataaacctacaagtcgccataatttgggtgagagaacttcatatttgctgctgtaaatttaaaatgactttttttcaatttctaattttcccttgatcatcttacaaaaggacttattattaaattcacatatgacaatatacattttacacactaactcacaaccaccaccactaaagaaaaaactaatcaagacaaaagaaaaacagattaaagaaaaaatctaaagattctcctccttccctttatccagacgccaactgctttcttttcttttcttttccataaaaaacgctcactaatttcaaaaagcacacctatttccaatctttttgatatattattaatcgtattcgtatattatatggtttataagatacgatccgatatctagtgggtggagttttagccttttacgctatgagatacacctcatggagaaacttgagactgatgaatccacggcggctccggcgaaaaccctcgcgtgatcgctttcttgaccgtaatccatcatcggacgatactccagatcatcatcgtgatcgtatacaaactccggcatctctatctcattcctcctcacatgttcccacagataatcaactctgcttatgtacctcagcttcccgtacaacctaccgcagccaatcaccacaccaattaattaatcaacgtttttctaaaaaaaactatagtatcaagaaaagtcgttgaccagaaaattaaaaaacgcggcggttagttactcacccgccggaaaatagaaatcggccgcaggtggcgaggaagagacgtgattgaagacctggatggaggaagtaaacctcctgaagattgtctctgacgtttaccggaattgcgtcgtagatcgctcgtagagctgagatacctgggaagttctcgcttctctgtacgccggtgtggacgtagagtacggcgaatggttttctacctaatcgaggaaatatcttctcctctagatacttcttcaacacatccagtgacagaaatcgagctgatttcagaaacaaaaaaaactcaaatataagaacaaatctacacagagagaaaaagaaacagatccgattgatatatcagtacctgggaagaattttccgataatacgaaggatcttacggccacgtttgtctctgccatggatcttgaagatctcaagcttctcgatcagctgctcttgttcaatctccgaaatctgagaactcatcgtttctctctctctctctctcttttttgtttcgtcggtgaaattcacagttgaattatagaagaagaagggaacaaaaattgaggcgagtgaagaagaagatgatgatcattttaaaaagggaaagacaaaaaaataaaaaaaatagtgtattaattggagggtaatgggagaaacgacgggctcttacgaatattctatagcatcttcctttttatcatgatcttcctcacctctttgtgggtcctacattccaataattattacctttttcgccctctcttgatctttcgttgttaagcaactaatctggtccatccgtttttgctacatctaacggctactgccttttttgactcttttcccgccccccgccttaagcgttacgtctcatcacatgattcatgtagattattggataagatgggcgttattttggatcatcccatccgatgttgagttaaactaatctgagcttacaaattattaaagattataaagatctctatgttcatatctatccaatgcccaatggaatcttttaaaaaatataaggaaaaacattatcttctgcatattaaacggataataacagcgaaacttgtggatggatcattacaatagaaaaataccgaggaggcacattcaaggaaggtattcaatagggcaccaaatattgtaaacgtaattctctaagtttcccatacatcatatatctgctactactctacacgcatatatatacaaaatacatgtgtgactctcttatatagaccatacttttagacattatacttacataaagccagtactagatggctgtagattctcgaattaatagtaccctaacattctttggaagaacctatgaatctttcaattataaaatagtgatgctctggtgtaggctaagtgatacagatgaagttgtaacctcctatggcaacaataagcactttcattacttgaatttgtatagaacaccctatagctatcaggaggatcaagtaaacaacatttacggattcaccttaatattttctgcaccaatacaaaatttactgaagttgattggtctcatttgcctgatcaaggctgaatccagtcatctccgctagttcagcgagttctatttctccgcttaagacctaatttataaaagaggtgaaataggtactgacatgtgatgaaatgtacaaggggttcagaggatttactcaccttatcatttattatccatgttgggaatccttcgatcgcagcatctgcacatgccttgagtatcttagttcctttcttatatccatccggaaaacattccacgtagttcagttcttttgccgcttctcttccaaacatctgtagatggatggaactataatgaacatataataaaagcataaaactgattcttggcaaacaggtgatgaatgaactaactacctctttttgctctaagcagtgagaacaccagaatgccccatacattttagctccaatggagtttagatgttttgctaaagcaatagcataagggctcgatgatgaactgatctctgttctaaaatatggcagttcaatgtcaccagagctggaaggagtgaaacaaaaaacgatcgggattaaaagagaccacctgataagactcatacatctttcggaagctatttgttcactactcgttacaaatgactaaaatttctatcgggactccccaaagaaaactatgaactttgattaccgtgaagggattggttgagcagtactgtaagaagcagtcaaggaggcaactactatgattgctaagcatatctgcaatcctacaacttgctgtatttcttgcaacttcacatcctaccacatgcatggagcacattatcataatccgaagtttagaagttatcttgagtcaacatcaggaaaaaaaaagaaatggaaataaagggatacctttacagagaggaaaaatagactaaatgataagaaagcagacaccagacaatacaggcatgatgatcctgagagttttgtgctaaggatatacaggaaatatgcactagcagatgccattgcagtcgtgatcccaaataacgcgaaacgcccattgctcttactgattccaaaaggtagattcccttccccaagctctgcacttagagcggttactacgccatacataacaaatccaatcactggaagaggaacacctggcaaaatgtaaaaaaggattttcattgagttcaacttacctgcaatgcaatgttggacaaacaacgaagacaaagcactacatagagtggagtgaagcatgctatttaactctaacaattctatgcatactaagtaccaaagctcctaaatgatatagcttcaagcaaagattcacagagactatcacatgcgagtatttaatcatgcctactataaaagagaggacaattagctacataaatcaaacgctataatcaataaagcgatggataataccgaaaacgacggcataatcgctgttgaggacatcaccgcaagtgccaccaccaatagggcaaaacgcatcggagccagtgaccttgaggtaagtcaaatacgcagtgtctaacatcccaataccgccgattccggtgtaccagttgtatgtcgaactgttactagtagatacttcacttgtagacgatgaggaggaggaagacagcgacggtgccgaatcctcaccgttttccggctcagatgaagaacatttaatcggaatcgcaggaaatctccgatcagagacctaattcagaacatctgacttcaaatgaccgatcacacactactgtcactgaagaaaacacatgacaagaatttacctcgaatcgtctaggataagaagttaccgacggaggagaaacctcacggaagccgaaatgaaactgacaagacgacacagaaacaaacctcgccatcatcgtcgtcgaagaatcgctattccaccattgttaacttcatcatcttctctcctccgctccactatctcagccacttgtttcaatattgggcctaaacgaggcccaaatacgataatttggatccataattagtttatcacaattgggccttacggtcttcttatccgtccgagtcagcaagttatcctcttcaacacgactcacgaggcaccgagttggacttatcatgattcattatctacgcattgtttacattttggaatcgactttggtacataattgaatttatccatagaaatgatagagactcgaagatcggacataaaacttgctgacgtgacacccatacctttgtgtctgtatgtattatataaacgctatagaactaagagaagaagtatctaagtagcatcaaagcattctaaaagaagtttcaaagaagaagtgaaaatggaaaccactgcttttaacacaacatcacgaattggaaactggtcatcggctatttctccacctctacaaacatgtggatctttcaagtgccaattaccaacacgaagaggtgttattgtagctgatcttcgaaactcaaacttccgatggtaagctagcaatcaacgacgagaatcgccttctctatctgattttagattatgaataaatattaaatctgagtattaacttcttgctcaaggaggaaagcaacgacaacaagcagaggaaatgttgcagcagaggcagttaaaattcctacgtcagtaccagtaagagtggcgcgtgagctagctcaagcaggataccgctatctcgacgtgaggacaccagacgaattcagcatcggacatccgactagagccatcaacgtaccttacatgtacagagtcggatcaggttttcatcaccgaccttaaggttcctcttatgagaaagagtgaaaatgaaaaacaacttaaaactaacaccaagccaaaaccgttgcaggaatggttaagaacccgagttttctaagacaggtctcgtcccacttcaggaaacacgatgaaatcataatcgtaagtttcagttttgacattcagagactaaataaacccctatgaagacaatcccttgtttcacaaaatctctgatgcacgtaataaactacttctgcagggttgtgagagcggtcaaatgtcatttatggcctcaactgatcttctcactgctgtatgtgtgtaatatcacttcaatttatatagccgttatccggtttaggacaagcgggtttaatgtcgccacatgtacagggcttcacggcgatcacagacattgctggaggatacgtcgcttggacagagaatgagctgccggtagaagagtgaaaacaatcatagccatatcacctcctgtaattatcaataaattctgtagatgttctcaacgcaagtatcaatcatcattattattctctaaaacatagtttaactgtcaaatctatattgggtgaaagctttaccgaacttcgaacaccacaaagtttacggaccaattaaggacggggatgcatgcctacacacgtttagttttcgccgttttaaaattttaatacttaaactaatttttaaatgataatagtgaaattaacattattttagttaaaaattattaattactttcttaaaatttaagttttaaattggttttaaattattattctttaagtttaagtgttaaatttataaaatgatagaaaaacatatttatacatggacaagatcaaaccgaaaggaaccgaaactaatattatgaaaactaatatcaatctcaacacaggtgtttctgtatctgaatcgtttacgatcagttaatatgattacttgctttgattaacaaagaaatccgtagccgctcttaagaatggcttcaaaagaatggctttcactttattgagttgcaatccaaatcaatctctgcagtgataattgtatcaaaaggagattgttttttaagaaaattatacatggacaaaaagagtgaggctctaagaaactgtacaacgaaaaaacgagaagtgagtagagctctatcaaaccgatcaaaccaaatttttcagcgcacccgagagagtcaacgatggcctttttttaggcctgaaaagtaaccaccatgtttatccttgtggcgctcatcatctccaacctggtggtttcaaaacatattaatgctaagaatcgtgttggttagagagagagatgcaatgataaatcaattacctcgcggattagttggttaagcatttctatgatttctgcaaaattgggtcttagagctgggtcttgctgccagcatttctcaagaagttcagtcagttttgggtgtgtttcctttggaatttttggtctaagtccctgtaaattaattacaagtcattgtgttgaaggccgttaatcaaagcacgagaaaaataactataaagtcctatagacatgataccttttggacaacgccaacagcagcttgcagtggagtcaagtaagaatatgggagctgttttcattcattatacaccagtaagaaaaaaaagtgtgttaaacacatgagatttactgagtttagcaactttcgactaaaatccagagagagaaaactaggagtcttacttccccagtcaaaagttcccacagcacaatcgcgtagctgaagacatctgccctgtgatcataaggtttgtgctcaatgacctgggttcacagagtctagtgtcaaaagcatggaaagtcaaaaaaaagaacaagacaaagaagtaatacctctggagccatccatcggtatgtccctgtttccgctgtcataacccctgactcagtctgcactctggcaacaccaaaatcggcaactttgacaacctgtccaaaattatgtagaaattaaagacatgtacctctgttctaagaagattaaaagaattttgtggagacggaaagaggaaattaagttttttgtagaattttaaaggtttacaagctgaaaagactacatgatcagtggccaaagattgagacttacttcatgttcgtccataagaagattagcagtcttaaggtctctatgaataatattgttttgatgcagataattcattcctttcgagacgtcgagtgccactttgagcaaagattgaattttaaaaacccctttgtgtttgtgaaggaaatcataaatgctcccccgagtcatgaactctgatacaaaaggataaaatcatccgaccatgaatacatgtaaaggccaaaactaggaaatgaaatgttacggtatttactaaacaatactctatagaacctcaatgtcctgctgaaacaactttctcaccacgcttgaagatacaaaaccaacaaaaaaaacgatctagatggaaccagtctcctattcataatctactgacaacttacctgtcacaatgcagaggtttggtgatcgtgtacatgcaccaatgaactggacaacatttttatgccgaactttcctacaaatagggaagtatcagtagtggatgtttctgaatattaactttgttcaatggacactggttgttagaaaatgagggaaactcatgcatgtttctacgtatacaccatgaaatggaatttttggagatttattagaatacatatactataagagtacgagttgcaattagaatcaaattgcagcacacctcattatatatacttcctgagaaaactctcgtagcatttccgcattaacacgctcaggcttgagaattttgatagctacttcctgactacaataggttcctctaaatctgcatagccattaagaatatatagctgttaatttcctcatatagtattaaaaacaagatttttgaatatgaaaactcacagttccccgtatgatccacatgccacctttttttcaattttgagctgcttcatgtcaatttcccactcatcagttccatccgtaggtatttcaacacacgcaggtagcagctcgttggttgatttgtcatgctcaaagaaagtgatagatttctgttttgaacaaggttgatcctgcagagcagccagtgtggaatatggagacatgacgactatcaaaattgattcaaaacatagcaaaaaaaacatcagtacagtggtgcattcagtttcggagtgagctaattctaaaccattacttgcactttcggaatttaaattatgaatgtggcatggagtctaatataaggaatctcatgaagataaggaatgctcatgacaatagactaacaaaagataccttaaactttcttatctccttcttcaatgcatcttttaaaccttctgtttcctgtatttcaaaagtgtataaagttgcaaccagtttagatggcaggggcagaaaggtcatcaatggtcaatatctttcgaagtcatttacttattacataagtcacaagtcatttactcaatggtcaaaatctttcaaagtcgtttacttaatccatcagtcacaagtaacatgatggttctgaaagatgttgtgaaccatacagaaaactgaaactatacctcctgcgaccagccatcaacaacaaatacatcgagagagaaaccatcggcggtagagaaagcatgagcctcttgaatattcaatccaagttcaccaagcatggaagttagctggaaagaaaacaaaccgattctcagtcagataatggcttaatagaaacataaccacccattctctacatgactgtatctaatggatccttaaaagtagagagggaatcctatacatcactctactcaaacgaagagaaaaagcaattgtaaaagaacacaaagtcacatgtttccaatatcagagctgacataaaaagaaatggaagaagcaacatcaccaacctgactaaggagtttcggcctgtcgattgtagaaaaggtgatttcgtgcatcggtctataagatagacaacaaaggataatatcaccacacatggttgtaaaattaaatcaaataatcctgcaaaacagacgataccatgctacaaagaacgcctcttcaagtatatgcagacaagaagactcaagtaagttaagtgtcaaaagtatatatctcaccgagaattaggcaactgtgcattgacagcactatcatcgtcttgagcatgatctttgtaagcttgagtaagagcttcgaaattcggagaagaaccaaaagttggaggtgcaagagacctcgagttataggagctttgagcatcttcattgaccgcaggatccgaaggatcaacgtcaccagaatttccattcaatgtgggagaaacctgtaagaaaagtggaagtatgaagaagcaagcaagcaagattaaaaagtggtgaagatggttaaatgatcacacctgcacacaacgaacttcgaaaacaggtctagtagcaggatcttcagccaatttcaacaatctctgatgagtaagtacatcttctgctctctcaacatttacatccaaagcatatctatacacaaaatccatttcagcaggaagtcaaatttgaaaacatttattatcataggatccaaaaagattaccgagcaggaagacgattgaagtgaagccagaggagatcatcaaaaccagggaaattagcttcttcgtaattggattcctggattcgttgaagaacctcaccgtacacctccagtttcatacggtgctgtctagggctttctttcgttattgaagctaccacggctctgcttccgcaactctcctccgtctcctctttgatcgccatcgcaaaacagcagatcagaattgaaaaactctctcaagtaaaaccagaattcaacagtaggagtgatctcttcttcgatcctaaatccacaaaaaggtagaatgatcccagagattcaactaaaggcgaaaagattagagagtgagaagacggaaattgaagagaagagagagagagggtgtaatgtatgagtttgggttgaaagccagggaggacatgaacgtttcgttgtgtaacacgtaggactcatccacgtcattatgtagggtccatatgagtgtgggtcacgagaatactcttatttttttagttattgtaatgctttaaatggataatggacagttttgcttttttggcttcgagataaatgtatggtggttttcatgtttatgaagcaaaaagaaaaggagatgatggtggatggtgatgacttttttatatatatttttttttatgttttgctacttatgatacaaatatgatgacatattaatggacatgtttgtttttatttcactatttgttgtataacactataagtttaatattggtaattacataaaagttgatcttgttacaaccaataggcaatagcaatacgtacgaggtacgagtgagcctaaatgataataggcctttcaaatttcaatcctaacgcaacagatcatttttgtcgggccttgtggcccatatttgcttggtgttggtattttacacactttaacacaagtaaataaagtggcaagtgggcaacgttcgcaaagttaaagacaaaatgaaaatggcgacaacaatatccatatgacgacgcttataaccatatcccatatctggttcggtaattaaaatcataaaatgtatccagaaactggaaaaatgatcagccgaaataaaaataagaaaatgaaaaaaatgatttttattctttttgtcaagaaaaaacaagaagaggggaatattatacagctgtgaaaggaaagtgtgatgacgtggcgtaaaccaatcaagtaccaatgattggtcactactgccttctcttcttccagatactttattctcttccaccagttcatgctgacgtacgttgcttttgcgtttacgaagaagcccttcttataactaaacttagggtccgaatggtgactgcattttgcggtgcggaaaaagtgcagtgcggttcaaatagtaacgaaaatacatagatacatatgtatatgtagagattttgatactgttacagcactgttgcggtgcggttttggatgcggtttaccaaacaatttcaatcctatttgatctttaatttttctccaatatgaattcatgcaacatacttgtcgagaaaaaaaaatggcgtaagaaaggtttaatcaaataagtaacgataagaaaagtcatacaaataaattaaaaaagtagcttaagaaatgaattgatgaccataagatgcggttaattaaggtaaaagtccattttacacgtatgatataataccaaccagaggaagacacgtgtaggaaaaagataagccagttgcaacgtcgggtacgctaaaaccacctgagacgcgtttttggttggtttatgaatcaaaatccggaagatactaacaattaattaataacgaaaaccaaaaataattacaatatatgtgacaatgttttgtctttcattacatgatcaccattagttctccgatccttacattatagtatatctttaataagccacaataaatgatttgaaatgtaacatacgaattaacgttaaaaaacggaagggatgatctagtcatatgaagactttagtactatcttttatggtattagacacaaagacaattattccactaataaacgatttaagtaacaatgataaagcgtagtaatgtggaattgtttaatcgcgtaagtacatatgcaaaatgaaataatatattttctttacgaatacgtaaataaatgaaagaacttaatgatgttgaacgtcatcgcatcatcattgctccaccactcctctatttatagtcttttttcattttatttttcctctccactcttttcacatttggtccctttaatattgcttcttcttcttcttcttccatttgtcttttataacgaaaaatcatctctccgtagagcacaaaaagagcaataacgtaaaagtgtgaagaaacgaagtaatcaaagagaagagaacaattatggggcaatgctcatcggcgacaaagatgaggagaaagaggaaaagggaagaagaatgttgcagagaatcaatggagaggaggaataaaggatgtttagccatggtgaaggagagacgttctaggttttatatagctagaagatgtattcttatgttgctttgttggcacaaatacgccaattcttgatgaggtttgtgttagtattcgataattaaacaagtatatacgattgattatttttgtctctggtcacaacttggggttttgtttttagttaagtttcaactttcaagctttaatttggtatctccacctttttgtttaacaaaaaattgcgaacaatctaaagattctaatcacataagatattctgattcattcaaaaacaagtagagtagagacataacagagaagctattacagtttttagttttcacttcagagagttccgacagaataacacgttaacaacagaaaataaatgaaacccaaagcgttgcctgacagaatctttgtgctattttaaggatgatcaattacacaacctaaatcaacagagaagtttttgaatcctttgtcaaaaggatgaaaacaggtcatctcgagccacggggttcataccttctctctgacctctcagaccttctctctgatcttctctctgggcttcttccatgaggagagtaagaccgatctcttctagaccttctttcatcacgaggtgaatagtcgcgtcttggtgacctacggtctctgtaatcatcacgatcatagtgcctccctcgactgctacggccttctcgatcttttttatcaaaacaacaaaaagattacggaacagttagcaacctttcatctgtctagagagagactcaataataactacgaggtttgaaatgttcaattaccgctgtctctggagcttttcaagccaagatagtggcctggggtgggagttctcgggcgctttctcctggactgaagaaagcacaaagtacataaagctcatgtaatggaacacaactttcaatctagaaaagccataggtatattcaaggaaacaagatgcatcctaggctggagaaacacttgactaatagttgttgatacttgataatgtcctttgactagttgagagttgagagttgaggcaatatagttgcttatgattatgtttaagctggcgattcgattgatcaagctgtgtttcacttaatgatgttgagcaaggatgagtactcttatcatctctgattgttgcttgatgcaatattttctgaatgatcagaaaacctccaagtcaacaaataatgatctcaaactaccaccaaaatcagtagagcatgaaattttaccctttccacagttattatcggccttctagtacagactggttgagatatttaatgcaccgctcagcatctttaaggctgctcattgtaacaaaggcaaaaccacgagacacacgggtgcgcggctccatcacaagaaaacaagacgcaacctatggaaatgaaaatggtaaactatatgatcaaagattatatgcccaaaaatgcagacacaaaatagacttaaactggtagtatgagaaatgagaatcaggtatagatgttatcacctttccttccttggcgaaatgtgcttcaagatccttgtcagtgactcttgtagataggccagtcacatagagagtggtaccagggttttcaacttcacttctgtcaaccaaaattcaaaatatcgcaaaaatatcaaacgaattacagataacaagagaatgcaaactcatatggagaaagctggaactaaccttccacggcttcttgaccttgacctacaaagtgtacaggtaatgaaaaaaagattaccacgcaatattcttcagaaattttcagtgacatacccaaaatctacataagaaaaccctatactgcgcaataactaaccttccacggcttcgtgatggagaaacaggccttggcaaagatcttgacctggacctaagcctgggcctggatctagacctggacctagacctggatctggatctagctcgttcttttcggggtgaaggagatcgtgaatccctgatgcagaaatcaagtaaaagattacactgagacttgttacttagaaacatttagctctttatcagtcctctgagctacaaatacccaatcaaatagcatttgcaacaaaacataattaagaagaactacaactacatagaaaaagactccaatactagatcttaaaaagtcaaaattcccaaaatcaattcgtcagattcacaaccctacgcaaatgtaatgcaattcaaaattgttgaaacatgtaaaaaaacaaaagagaacgatttaggaacaataacagctccgaaatgcgaagcaatagaaacttgaatctaaccttcttctttgaggagaatccgcctgcaaaacgaagtaattacctcaaatttctcgaagatcaagaagaacacagagacttagtcgtggaagcttaccattgccgaagaaacagaggtcgcgatcgagacggagagaattagggttttagtgagagcaataaagcgtaaaatcagtctttcttttcccccttgtctacagatgaattattcaataaaattttatactattacaagagtcaataattgcatgtagcaagactcacgtttcttatggtgtctgcaacaacaaaagaaaataacaataatcgtaatcagtcccggattgatatttccggtctgcggtctggttcggtttaataccgctaattaaatattttgatctgtctaagtgtccatgaatcttcggtttggttcgggtaaacagaaccgataggcacatctaatcttaacattaaaagtcgaagcagaaattttgttttgaacgcagttacacagcatcattatccgattttgaaaaagaaaaccgagaaaaatagaatatcctcaaattattttgcctcttcactcactcacgatctctacattttgcaccccaacaaatatttgacgacaatcacaaaagaatgtataaaaaagaaacaacacagttaaatgtacaacaactcaaacaacactttcagctaatattattcaggatcaaaagaaaccccaaaacaaatgctgaaatttacattgaacattcacattacgtggttaaagtgtcaggaagagccatggaatgagctccaatgatcttaccaccaacatctgggaaggtctcgtaatcaggaagagggcttactttaccatcaacgtctacttgtagaggatactttattaagtgaccttgtagctctgagaatttcgggtctatgaatcttttccagttttcttcagagattgtgttcaccttcttcagacattccagatctgatggctccacaaactcatctccagttttgcctaaatgctctgcccatagtgacattctgtatccatacacctgtgtagatagatagagatatcatcaagctctttatgtcttacgaagactcaatatatataatggttcaagaatctgggagtagaaacacaagttctctcaagtatctaagaacgtgatttttttcgcaagatcgaatgctatcccaaatttctttactgtttttaaatccaggattcaggaatttgaaactttccccatgtagatatagagacacttttgaggtttggttatgatatagatgatgatgatgaagatgttaggaggaaggcaaacctggccacgtgggtgtcttcccttgtgagcccatgtatgattaggttggtatgcgcccatggcgatttcagtatctttggtgcctgccatagatctttggttgatattagcagatcccatgagtacatactcatcatctactatcatcccttttgcgtgcacgtaaatcatgaaacgctggaaattataagaatctgatacctgaaaaatgcagttaaaatgatcataaagaaattgttccactgattactacaggaaactttatgtatgatttatctatctgtaagctacagtttttgtgaatgaaacattcttagtcttagaagtttgaagattataccacactgccattggtggctggcatatcatctggaagctgctctcgtttaccaaggcagtaaaagttaaggtaatcgagaggatgagcatctgattgcaccgctttcagttcttttgctataacatcatacatcatctgcatagtttggctctacgaaatgaaaagaacagaagatgtttagcagaatgtaagtttctcttttaaagaaatggaacaacctattttggtattggcacttatcttacactcagctaaacaaagttacctgccaatatagaatttcttgcacagggccagactttgggtcgccttcaggccacaatggtatgacaacatatacggcaaatctttccttagctctgattttgctaacaatctttagtgccaactccataggaataagattgtcagctcctgctcatacaagacgaacacagaatcagaaaatccgcgggtgaaaaagttactaagctttatttaatacagttcaggtaactgtgaggtgaaaatagagccacaaatacaaaactagtaactgagaacaattctagacttcatgctgtctgcaatgtgagtattttatttcctagtctaagaactgtactcaaagatcaaaatgcacctgcgtctctataagaaggccaagcataagaagaacccaggaaatactgattctcgatatatatgaaatgctgagcagatctgattgtctggatgtatgcagtctggatgcttttatctacaacaagacgcttggcacattccagatgctgcagttaaattatattgaagactttgtaagtagtgcaatttctataccatgtggtggcttataaagagaaatttcattgaataaacggtgattcttcaaggaagataattaataatagcaaataagttgattgaccaacctgggcctcagcctcatcttcatattttggaaatcctttcacggatcctgagtcgatagaacggaatatctagaagtcaaagaaaccgcgtggttagatcaaatcaacaacatttgttaacatgaaataagtatagtttggaaggaatcaacaaggacctgaacatgccagttctctggatcatcttctttagaaacccaaacacatggatcgtcctctggaattatcgaagtaccatccttcagaaatttaaacactggactcagaatccatgatatacgccctatccggatcaaagcatcatcttgccagtgagttttcccctttaaacgtaagctaaactccttccatcgtgttgcctttctccatcgctgctcaaagtttatgagaacatcatatgccgcaggcccatctatcctacagtgcaaatcgtgccaaggttgtcttggggccttggtaccagcctgaggaagtaaaaacagagtatgtatcagtaataactaaagaattaggattcaagcttgataacagccggtatataataataaacttactggaaatgtaggattgtggaaatcatccttaaatacagtgtcaagatcgtggagtatcctatgctcaggtgtgtcataacggccatcacaaagatctagacctccaataaaagcggtgaccttgcgattattaccaacagcctgagtgtctacaagaacacacttttgatggtgcgtgaagagagttccaacaacctggccattaaacatcagatatcaaaaaagatatcccttggaaagataataactatgccaaagccgaaattgacataacattttgatacccacatgttgaaagagcctttaactaaacaatcgagaaacaatggtgcgacatggattagagtcagaacatctcttataattgaaagtaagcatccacattaactaatttccaactttgcaataaccctcatcatgcgggactaaacccccttagctaaaacatatcaacatcataccaaacaaaaactgtcatgatatatatagaagagctaggacttgcctgttgtttgaacaacccaagcttactgctggcataccggggtgacaaaacgcatatcacagaagaatgcttgaagaacttcctagtctcctcatcatgtgtccccataactccaggctgcaaaataaatgtcacacaacatcttaatgtcaaaaacaccaaataacctgtcaaaacataaattatcctcaccagaaactccaattaacattacaactagtaatccaaaagctcaaaaatagcaatacgaatccaaagaacttgtgaaaacactaaccgtttttatcccaaacttatcatgagaagtcttatcatcccatacaagtagcaaaactcgaacaccttcctgggatttgtatttgagcaattccccaagcgtcatatccttatctcttggaacttttgtttccctaacaagcttaatcttatggaagatagaccaaccaacaatgtaaatcatatggtgagcctcagatatagcataacatatatcttcccaacacttcccatgctcataaactttcccgttatctaacccaatcgccggcaacgttccgtccataacatgagcgtcctggtaaagcctcacctgacttcctttcctcacagggaaataagtccgtctaacacccctacgctccggatctccggcgattccacatcggtagctatggatctggtcaaacggagtaaatttcatatcgatgaaaatagcagtttctgccttaggcggttttcccgaagcaccgagtacaggaaaccaaccagaaatgcgttctcccgatgcgatgtctcgaaccgggatcttagccgtgccaatgatttgagcaccgaaaacatcgtcgtctttgacctggaactcgagataagcaaacggatgcgctatagaaatgttgaatttctcgtcccaaagaggctcttgtgagtttttcaaaacacgtgttcgagctagagtcgcttgaggaacgacgacggtgacgtaaggatcgctggtgataaccttacggtggctacggatgtttttatcaccgaattcgcctttatctctgggatcgacatcatcggtatcggtgggtctagcacaggcgttacaggcggtgaagagacggcgcaaatgttctgagaacatatccatgttaggtaacctcctagccttaacaattttcaaatcgaggtcaccgtgtagaagcataacgtcctccgatactttctccgccatggttacaacaattcaggtggaaggaaacgaagaagaagaagaagaaaagctaacaaaaaccgaaaaccctaacgaacagggctcggttgttgttgctgctgcagaaaccaaagatgaatttgaaaagttttttttttttttttctttagaaaacgaaagatatttattatttttaggtgaaatgatttgagagagaaagacaagcaaggaaggagaagagaggacaggtggagggacgacgtgatgggagttgtttgctcactgacgacattattccgtgtagatctcagaggagtcgttgcacacgttcttcatctagcttctttaatcactgaactttacttaattagtttacaaaatctactgatgacgaatttgattttagaacgttgtaccaatagctttgtagacgtaaagaaataaaaagctaatacaataatgctaaagttgacaatgatgatgtgaagagttcttctctttttctggacaaataattaagaagacaagtcaaaaaccagctatgcgaatctggtgatattaacccaccacatccattggatagttttccaacatttgcttcatttattatatacaaaataaaatttggaaaaatgattaattatcacataaataaaaatcccaaaaaccattctttaatggtgtggataaaacaagaaataaacccatattggaaagtcgagctgtttaaacttttaaagtggtcacacgtcaatcgataattgtcggaaacaaggaaaaaaggcattctcgattcgtatctactcaatgaagcaacagcagtaacataaagaatcctttcatggattacaaatgaaccgtttcacatgtttactttctgaaatagaacaacacagcaaaaagccaaaaactaaaccatacgaaaagcccaaagtctgatatgttttcgtttttctatgtttatactattttctttttgggggatgaggattggatggatttatggatcagtttggaataatatacaactcacgaaaaaaggatctattaagaaaaccttgttcacaaagttatccacagaagatcactttgaaacggtcccttccttttctcagctttcactgtctcttaaatcatgacctgcgggttacacgatatcccaagtggctaagttcgtgagctagtaagacttgtaaaccccaatggttccaagagatttagacgttacctaaaacatggattgccaattctcactctctttcaagggttgcctttatcatccttactggcatctttttttccagtcttgtcctttttatcgccctcatgtggggtatactgacccgttgatgacggtgaataaccgggaagtgttggcgagtagcctgcgcttgggctgtagtctgggcttgctcctgagctgtatgggctgagacagatttaataacaacaacccagttaaactttttgcggaattcaattgagatggatgcattacaacagatccaagattttcaagcgggtaaaagtcaaacctgctgggactgtatgttggacttgaaggtgaataagatggagatgtgggtgagtatgatggagatgtcgggctgcagagtaaatttttaataagagttaacgattagagaagatgacacaatatcaccacaacagataagagaagcttcatagaaagtgtaaaaattaagatattactacttacctgtagttgggagatgtaggactgtaggggctagctggtgatagtcttgcattgctaggagagtaagctatagatgggctatatttagcagactgagggttgtagcttggagacgtaggaccgtagcttggtgatgttggactgtaacttggtgaagtagggctgtagccaggagatgtggggctatatgcgggtgaagtagggctgtaagacggagatgttgggctgtaagatggtgaagtagggctgtaagaaggcgatgttgggctgtaagaaggtgaagttgggctgtaagaaggagaggttgggctgtatgctggtgaagttgggctgtaagcaggtgaagtcgggctgtaagcaggcgaagtcgggctgtaacttggggaagtaggactgtagctcggagatgtcgggctgtagcttggcgacgttgggctatagcttggagacgttgggctgtagctcggagaggtaggagaataggaaggacttgtaggagaataagcagggcttgttgggctatagccaggagaactgggactgtaggtaggcgaagttggactgtaaccgggagaagtcgggctatatccaggcgaagttggactgtaaccgggagaagtaggactgtatccaggcgatgatggactatatcctggagaagaagaaggcgaaaaggccattccaccaacatatggagaaaactgtgcatctgacattggggataaacgcatatttggacttaacaggtagtttggagacatcatgccttcatggtaaggagtgcctgacactggtgaacgagcaggagtcattccaaattcaagaccatccatatagctagggagctgaagttcaattgcattcttcagcatctcatcattcagatacaactcacaatctcctgtcccaattggtgcaagttgacccaacattatattctcagtaacaccccgtaagcagtctgtctcagcataagccgcagcatctagcagaatatcaactgtttcttcaaaagagcatctcatcagaggcccagtgtcatttctattgataccgtgtcgagtgatagccatcagatgaccgcgataggtcatagtatcacacaagatggcaagatgacggtaattcacataagaaccatcaaaggatatcacaacacggagttcatcaagcaaagcacgacgaactgcctcaattccgagaacttcaataatttcaatcaagtgattgcttgttgtcctctttggatccacatcttcgtgacacatgacagctaagaggttcacaccttctgtatccaacatccactcctcagatgtcttgaagcctccctcctcatcaaacctgctctttctaacctgttttataaaaaccttgttgatgtctggaatacctctgagtgccatttctgtcagcatgttgctctcaatctttttgaggaaaacatcatcttcagccgattcatcttgcaactctccctttgggccctcatcgttcataatgcgaattcgaaggatcagtttttgagcattatcatcattgaatatgcaagttaggtcatcatcgaactcaaggttgatcttctccgcaatatccgccatactcaatttcttatcaaccatcatctcgcgattcaactctatacgaagtagccacggagatatcttatctggggaaacatcttcatctggcatttcatagtaggacctcacaaattcaaagtcctcttcaattattgtactcattggatctgggtcataccagacttccgtagcttgagtaacactcctgagagtagtatactccaaagcacactgaacagtcttagccccctcttttgatttgctagcttccggagtgagatagactgatagggatggtgttttgatcctcttagctacattaataatttcacgcaacctgggaactccgagcgtaacgttctttgcactgacaccagcataatggaaggtattcagagtcatctgcgtagcaggttctccaattgattgagcagcaacacaaccgatcatttcccctggggccactagcgattgtaaaaaccttgattcaatctcaccaatgacccactcaaaagcctcgcggctgagcttgtattcttccaacactcttttactagcaagagtgctgcgaagcaaaatgttaaagaacaatgttgcgtttttctgtgcttccacactcaacgcatcatcaccaggaacaaccaacagcctctcctgtagtttatcaacagcatcaacaatttcaacagggtgcatatctgaaattttgcgcaagtcaattttgaaagtcttctgcgcattccagatatgcctcttgatgttaacaggcaatggccaagtgctatcaccatttgttgcaatttctgtcccgagttggaatctgtcagtctcaagtttcgaatattccgcatcgaatacatcacgcaactcccgaatccccttcaagtcttcaagatgttcatcacttaggtaagtaggattccagttttcgtcgtcaatctcatacttaaaagtcctatcaaactctgatttcttcattttcaaggaatccagcttctgtgattctatccatacagcatccataccatcttctccatagagaaattgaataacatcacccaaagagtttctgactgtcccatcatacttaaccataatatcctccatagcctttaccaatcgcctctgaatgtatccagtttctgatgtcttcacagcagtatcaataagaccttctcgtcctcccatagcatggaaaaagaactcttgaggagtcaagccacgcaggtacgaattctcaacaaaaccacgactttcaggaccataatcatctttggtgaaatgtggcaatgtccgcccatcaaatccaaatggaattcgcttcccttcaacattttgctgaccgacacacgctgtcatttgagaaatattgatgaaacttcctttggatcctgctgtcaccatggccttaaggttattggtttctgctaaactcttttgagcactacttccagcatcatcacgagctttattcaaaacctacaaggaaagtttatgagtcagcacatataaaaactgcactgacaaccaaacgaaaatcaactaattattgtcttgaatatacctggttaaccctgttctcaaatgtatctctcatagttcggccaggctcagggtccaattcctttccctggaactgccggataagatctttcacagcagtttttgcattggaaatagtttcattaattttctccattgttgatgaatcggcaattgtgtcaccaattccgatggtaaaaccattctgcagaagccagtaattgacaagccattgagtatgaccgaggaattttctagctgcatcaggaccaacctcttccctggaagccaagtaaaaatgaattaaaacaaaagagctcatgaaactaattactacatttagatattcccaacaatgctgcatgtgatgtgaagttaactaaggtaccaaaatttagccagtaagcaaatgtgacaaaccggaataaacactctaaaatcttgatgtgcaacttaccaaatgacatgcacgagacttccattagatgtaccaagggtctttttgcaaagagttccggcaagaagttcccctctttcaattcgcacttgagtatcccccggagttataaatccagtctctgtatctgcgtgccaagcagagtacctcaacagatttatctgttttggtatgataagattaaaaacttgtttgccagtccaaagaggacgaggcttcaagattgcaggagccggaactttcccatcgaagtcttcccaccacatcagtgtgttcatgaatacatcctgaaaatggataagatatcagcataagagttggtttatcctctcatcaatatcatagataactttaaaaagcaaccgctgatgaaattgctaccttctctatgaaagtatctctctttgtaattttacggcaccccaagagggtatcctgcacaattcccatcacaggacgattcgcctggggggagacaatacatttaggaaccatcatcagctctaacacctcggctctggtctcgaatgattgtggtacatgcatgttcatctcatccccatcaaaatcagcattgtacggagacgtgacagacaaattcagacggaaagtggaatatggcataatcctaatcctgtgacccatgatagacattttgtgcagacttggttgacgattaaacagaacaaaatcaccatcctgtaaatgccgctccacctgtgaccaagaaagcataaaaatgacgacttccagaaataaccttttgtgcgttgagtggatagaataagaaagtagtacataccttgtatccaagttccaaatgttgatcactgctcttcttaagataccgaagatctagtctttggccatcatctcttatgatatatttcgctccagtcttcccaggtggaggatgtggtccataatcaacaagctcctttaatctgccaaactaaattgttagtaaaacacggaaaaattactctcagaaaatgaaataaacaccagacgtactaacctttcaatgttatagggagtaactgtttctgggtatgtgagattcagagcaatactccacggaacaccaagttcatcaatatttattgttggatctggagtaataacagtacgtgccgagaaatcaacacgttttcccatcaagttacccctgattctgccttcctttgccttcagcctactacatattgatttaataggcctccctgatttctgagtagcctgaagaaaataaaagccaatccagataaagcaatatccgtatgtatcataccagatatctggaaggatacaaaagcattacccttggctgtccaggcaactcgttatcaaaatacgtagctatatgaaactgcaagagttgtgtaaactctgatataatatgagctggcgctccatttttttcctgccttttcaagttttcattgtgtcgaataatcatagctagctgatgggtcaagtcatcctgcatcaacaataagcataaactcaggggcacacactatgttggtctaagaaaagttttattcagaaaaccgtagtcgacttacctcactcctggaagtggcgtccatcattacagatggtctgacagggggtggaggaataggaaggacttcaagaatcatccagtcaggacgagcaaacttagggttgaaacctaggagttgacaatccgcgtcactaatccttttcaaaacactcaaaacctgcaagaatatcacatgccatcagattacgccaaacaagaacaagaggtaaaattcattcgaaagaaaagacgaaccctatcagcaccaagtgtctgtttcctttctgcaggctcgggaagctgatctggctcatcatttttcttcctttgaattttgtattctgcaatcatcttcataccctcaatagtcagttttggttgttgtgcaccacatccacctcggctcttttttactggttcatccgtgctgtggctttggacatcgtcaatgtcatcaccaccatcacatttggtcttgtttttgcaggcatccagaatcttcttaagcctattcttaggattcttgatcttcatagcctgcttaaacttatgctcctccttcataaaaataatcaattgaagaacagctacgtcaaacaaagacataagcaaaacaagcaatgctgacacgaaataagctcctacatacctcatcagctaaaatcttggagcaattgaaacagacacatctcatgatacttaacactgtcttcataaaaccgacatgatacattggcttagcgagctcaagatagccaaaatgtcccggacactcagccatattagccatacatgtctcacacttcaccttccgatcaatcgtaccaagacgggtatcactcaatcctcccaccttaggtttacccttctcggtcgtctcactatgctcaacatgtataacagacatttgcctctgaaaaaaaagccattagcaaccagtgaaactcaatttcttacttgaagcttccaattaagatcaatagatagaaaagaacatgctccctaactaaaccaatctactattcatgccaatatccccgccagctaaacagacggcggagcaatggacctgaaagagaaagagaaagagaaaggagcattacgatctcatcggggctgagtatgccaaactggaccacccggactttagagacctcggccggagagaacggaaacctcgtatccatggcggctaagctccgatcaaagacgaatcaaaaatcgaaaaccctagaacgtgaattaaaaggggaatcaaaaattaattaaaccctcttttgccaatttgtttgaatctgtgagtcagtagtttacagttacttgagctaaacttttttccgttttttttttccctctctgggttttgacacgaccagatctggaattctctcgtctcttcacgaggagagatgaatgagcaaaagaaacacgatccatgccctaagcctctatttatagaaaaataggcggctcaaaggtctgttctggttaattgggctgtaactgtctcaggcccagttaaacggattaacgggcctgcgtcggcactgaccaaagaaacgtgttgtaacgaagaatgctagtaagattggtttatatcggttcagttggtcaaaccgatatatcaaaaataagatttcttcttattttccgtcaaatagatttcttcttaaaagagcaaaacgataatagttcccttatttcaccatgtttggtaaagtggactgaaaaatctgaaccattaaagttttaactgctagtggccgaagctctaaaggaagaggagtccctacgctaaaagaaatctaatgtgtaatttagattgaaacgattaattatcttcatttcatcttcggaatagtaaatacctaacttcttcaatatcccaaaagtgagtaatgaatgagttgggagttaataaaatgaaattattcttctactctagcaaagtagggtgaacccattattataatacggaaaactaacaaataaatattacacgtacggaggcatagtctcaagttatgtgaagcccactttgttatgtatataacacacacgctgatacaaaaacaaaacaacgaaaaaagaaagaaaattatttatactttatagcttttatcttcaaatgcatgttttcgttataacttcttttgttcttttgattaagatcgctcaataggattcttcaaactatctagatcatcaaacaaaaatggcgaagaaaccgaagcagctccgtaacaagccgcgtaaatctttttcgacgcaaactttcacagttgtcgtacttgtactctttgtcattttgatccttgtcggtctcggaatcttttcactacccagcaccaacaagacctcttctatgccgatggatttgaccaccattgtacaaacgatccaggagaggttagggatatgattctctgatgttttgtgtttttgcttgttgttacgtaatagtttttgaatttattaagggagagttttggagacgaagaagacggtaatggtgaccgctggctggaagttatctcctgggagcctagagcttttgtttaccacaacttcttggtaactttttcggattaatttcttatcaagattttgttttatgcgtaatcacaatttaacatcttcatgctagttagttcatatagtttttaagtgtttcttgtcagacaagctaacaaaggtgtggaatttatatgctctgtttctgtaaattttgtaagacaaatgaagaatgtgagcacttgattagccttgcgaaacctagtatgatgaaatcaaaggtggttgatgtgaaaaccggaaagagcatcgacagcaggttctgtactctaactagtgttgttgtttttacctttcagcttaatttggaaagattcgagaattctaaatttgcaaatccttcgttatgcagagtacgaaccagttcaggaacttttcttaacagaggacatgacgaaatagtggaagagattgagaataggatttcagatttcaccttcattcctccaggtaatgtttatatcggtttctctgtcttggaactcattgtggagttaatgtaatggaattacagaaaatggagaggggctgcaagttcttcattatgaagttgggcagagatatgagcctcaccatgactatttctttgatgagttcaatgtcaggaaaggagggcaacgaattgctacagtactaatgtacctgtgtgtagcctttaaacccttacaataatctttcttattagccacaatgtgtttgttaatcttctttctttgatttgtacttattagctcggatgtcgatgaaggcggagaaacagttttccctgcagccaaaggaaacgttagtgatgtcccatggtgggacgagctctcacaatgtggtaaagaaggactctctgttctgccaaagaagagagacgctttactcttctggagcatgaagcctgacgcgtctctagacccttctagtttgcatggtgtgtctttcttgaaacttttttaaatctcaaggaacccatttgatatctgaaaccaaacctctcaaaatcttttctgattggtataggtggttgtccagtgatcaaaggaaacaagtggtcatcaactaaatggtttcacgttcacgagtacaattgacttgaataaaaaagaagatagatagcttttgaagatgtaaagctcttaaacctcactttagtgatgaaagctttgtattgtctcaagattgtttcaatgtttctgtcgtctttggcaggtctctatgatctcaccaacatgtactaatatgtgtgtatcattgtcaatttcatcctgatacgtctctcaggagctctcaaacgctacaccaacaaaatcacgttatggcatttaagttaaaatcttattgatacacataatatataattatgtacacgaacttttttccttttgtcgtgtttagtatgaaggaaaaaaaaaaacactgttaaaattttattatcttgcggtatattcaacaaacaaataaatatacagttgagtagttagactatttcaagtacgataattgttttattccacaccacacttatgagttgaactctttccaacaatctactgttgagatattttacctagctgcaaatgtatttaatccactgataaacacaagatatacacctgcatacatgaggtgaagagtcatcatttataaaattgaccaaaaccataatgataacaaaaatgaaaattaaaataacttgccgacaggtgtcactctattacttgctgacattcattattagttttttttccaatgattttcatattctagttgtattgatttatttatttttgttctttggacttgtataaaaggaggatcagacggcaaaaaaatatatattagagtttgtattttatgaactcacacaattcataaaaggaaaaccctagattcgtgttctctctaagttttgttacgagttcatgtatattttctgactcacttgtgaacgcaatgtctaagtcgacgtcagtgtctaccatactgtatctgaggcagaggttgcaggggctgaagatatatgaaacttcagatctaatacagcacatcaacacgttcgatgaattagtcggtgaacaagtgtccgtggatgtgaaaattgaggaaaaaactaaggacatgatcttgttgtgttctttgtcccctttgttaacaacacttacttgtagcatggtgaaggttgctgcttcgttacgctttccaaacgagcgttggctcgaagtcataacgaaggagcctagagcttttgtttaccataatttcttggtaattctctttcactcctccagtaaacacgcatatatagctagggaacacatgtttctctcatgatttatatgcaaatgtttaggatttgatcttaggctctcttctttaaaatttgtaagacaaacgaagaatgtgatcacttgattagcctcgcgaaacctagtatggcgaggtccaaggtgcgcaatgcgttaactggacttggtgaagaaagcaggttatgtactctattttcatttgattttccctctttaattaagtttagtttggaaagatttgagatttggaaatatgttaatgtgcagctcacggacgagttcaggaacttttattagaagtggacatgacaaaatcgtcaaagagattgagaaaaggatttcagaattcaccttcattcctcaaggtatgtggcttctgtttttaaactggccatagtttggattttcttaccaaacaaggtctaagatcattacattattgtgaagttttatgtaatttatgtgcagaaaacggagaaacgcttcaagttatcaattatgaagttgggcagaaatttgagcctcactttgacggatttcaaagaattgctacggttcttatgtatctgtatgtaaaccctttataatctttctcatcagccatgtaaaaattttacaatatttgcataagttaatcttgttttcttttctcatcgtatgactaattagctcggatgttgataaaggcggcgaaacagttttccctgaagccaaaggaattaaaagtaaaaaaggagtctctgttagaccgaagaagggagacgctttactcttttggagcatgagacccgacgggtctcgagacccttcgagtaagcatggtaagaggcattgcctttctctaaacttgttttaaatcgtaataaacccttaattataacttgtttgagatcatgagatgtaaaacaaatttctcaaaaatttgtctgtttgatttaggtgggagtccagtaatcaaaggaaccaagtgggcatcaaccaaatggttccgctctcataagttcatcaactctacacaacattccaagaggtaatctctgaccatcacttcgaatgtgataatcaatcctttggatcatctcagattttttttaatgtttttgtacaaccttcacaagataattttcatcctctagctctttagattactttgtgtatttgtgtttattttctaatggtagagtatacttctatcaatgcagcattgacaatgcttatgaacaacaacaacaaaaaaagagctcgcatgtttatttgaaagaaaaaaaatgactcgacagtgataatgtttccaattgactagcacgaagcaagagacgaagaagaacaaaagcaaaagtttaaattaaagtcattctcgtcctcctccctgcaaacatttttattgcaacaaaccttgggatatataactcaagtctctggtgttaccagatttattgtttgatcaagttcctgataacgtattgcaaaatccctccgtgatcgaaataagccaactccacctgtcgattccaaattcctcttacttatctcatctcattttgttttagagctaaaaaaaaaactcaaagacgaaaagacgaaaatatatcatctagagataacttacctctgtgtcaaatcggagtgtacatgtgaaagatttgccattgtttgtgacgactgttacatcttgtcctggtttgatctcactaacattgtttgggagctcaatggtgtaaagctcctgacccgttaggccaagggtctcagcatcttctcccgccttgaagcacaaaggtatgattcccattcccaccaaattgcttcggtgaattcgctcgaagctctttgaaatcacagctttcacaccctgttgtcacaattttttaaagaaaccgcataaaataagtgtaagaacgtgtttgttaaatacagaaaatgtaccagaagcattggacccttggcagcccaatcacgagaacttccactaccgtattcagcaccagccaaaatgattgtgtcgcgtccctcgttcctatatttctggtacagcacgaggagagaataatctgattaaaacaaagctatgaactgctattctaattccaactgaccaaatcagagaatcaaacaacaaaatttccacccccaagacaatctgctgagacattattattacctcagccttcactaactgttctataaaccaactcacaacagctctaatctactacattcagtcctaggctagatacagtagacctatagctaagagtagagctgtagtgcttattcaaagcttatcgtaatcctaccccaacctcatgaccaaagagcttgaatttgatgttttcaaaaggataaaaaaaaaagtgagattataccatggcagcatcgaaaacagaaagcttctctccagtgggaatgtgaactgttttgggaccaacttctcctttcaagtgtttgttgacaatacggatatttgcaaaagtgcctctcgccataatctcatcattaccacggcgactcccgtatgagttgaagtctcttctatccacacctcgttccatcaagtacttagccgcaggactgtccttgtggatgctaccagctggtgagatgtgatcagtggtaatactgtctccaaaattgagtaaacagtatgcgtctttcacaccatgtggaccgggtggagacatggtcatgcccttgaaataaggcggctcgtgaatgtaagttgatttcgggtcccactcatagagagtacctgacgccacagataactgattccacatggaatttcctttggtgattgcttcatatgtagctttgaacatatcaggaaggacactagattgaacaacctgaaaaatcgaaacagagaatttggcatcccctccacttataatatctcattgtttacgtattacacaagtagcccatatatatttacctcagcaacttctttgttagagggccaaatgtccctgaaaaatatctgttttccatctttcccagttccaatgggctgtgtctcaaaatcaatgtcaacctacaagaatattcatgtgaatgattctgtgcttcatataacaagaatgcttgaatgttgtgaaatggctttagagttagcattaacatacagttccagccagagcataggctacaacaagcggtggggaagctagatagttagctcttgttaacgggtgaacacgtccctcaaaatttctgttcccagacaacacagcggatgccaccaagtcttgtacatatatgagaaatcttttagtttgaccttcgaaaattcaagtgaagaagcattacttcattaactacttaaggaattaccattatcaactattgctgaagccacagcttcatggatatcccccgagtttccaatgcatgtggtgcacccataaccaacgatactgaagccgagctgattcaagtacttctgcaagccactgcaagacttgaaaactcaggaccacacaatacaaaggataaggaaataaataacaaaacattcaacggtgtatctgcagcacctctttgccaagtactttgttacaactccagagcctggagcaagactagttttgatccatggcttaacctaataattgagaaatttcaaacacttctattatttccattgcacataaagatattaaatcactatcacacaagtagtcaaacctccagtcctaggtcgcaggccttttttgcaactaaggcagcgccaagcattacactagggtttgaagtatttgtgcaactggtgattgctgctataacaacatctccatgtctaagctgtgctgtggtcccgttaaaattgaactctacagccttactctgtgcttctttaggtacagcgaaaccctggaaaatcatggataagtagtatcactaaccactatttttgaaaaaatggaagtaggttataaattcagaagtgttgcagaacgtacaagttagtttattggacccgcttaaagactcgaatacgtaccattctttcaaaattacagtaacaatagctagaggtgtcataatttcctacaaattaagctctcgggactgcaagcattcacatcttctcaacagaaaggagagtactaaccttgaatcctactctattgtccaagcaagaatgccagtccgctttcatttccttcaaaggaacacgatcatgaggcctgtattgtgcacagagaatagacattgtaagtagaatggatcctagataattttctgtcgaatcattcactaatagtacctcttgggaccagaaacacaaggttccacatcctcgagattcaattccagacatgaggaataaactgtcttactctccggctgagatgtgcaacaagttccaagtgaagcatatgttatgcaaatatgatatatgacaataggcataagaaatgaagtattaaggatgcccaaggtttacctcactgtaatccacaaacatcttgtttgctcgtaaatacgcctctatcatggagacctgcaatccaattcacaaatcaataccattatgaaagtctttaacacactaaataatgaagattttcccaaatgtgacattttgtgcattttcttacagtgtcatcgctcctgcctgtcaaccttagatactgcaaagtgacatgatcgactgggaagaatcccatggtcgcaccgtactcaggagacatattggcaattgtagcacggtcagctaaagacaattctctcatcccttcccctgtgtatgaaaaagcagtcgatgcatatgtgagctagcctaactcggtaaggtactatgtaagtaaataagagacatatatgaaatatgatatcaaatcttttatcaacgtaccgtggaattcaacaaactttccaactactccatgtttcctcaacatctgagtcactgttaagaccaaatcagtagctgtcattccatctcttaactttcccgttagcttgaaacccacaacaccgggtaggaccatgctcattggctgcatataaagagatggaaagtctattagaattattgaaaggatgtagtttagaaccaaagtttcagaaagaggttagacagttagctatgagttctcgaccgaaagagcatctgatttacctgaccaagcatggtagcttccgcttctataccgccaactccccatccagcaacacccagtccatcaatcatagtggtgtgagagtctgtgccaacaacactgtctgggtaaagaagtccatttgtgttgaaaacaactctggcaaggtattctaggttgacctgtcaattgcaaaattatagaatttagcataaaaatactttaagtttccaagcaataccgttgtccctgaatcctctacttacttgatgaactattccagatccaggaggtacgacaagcatgttgtgaaaggcgttggatccccacttaagaaaagcaaatctttccttgttacgctggaactcaagctccatgtttgcctgcactgcgttctctgatctcgccacatccacctgaacggagtgatcaatgacaagatctacagggacctgcaattatcaaggccttgtatcaaaccttatagcataccaaaagaacacaaatcattaaccaatctcagtaaaaagcgaggaaactaaccagcggattaattttattagaatcaccaccgagattattcatggcatctctcatgcaagcaagatcaacaacagcaggaacaccagtaaagtcctgaaaaacaaatagaaaaaatgatatcacattctagcattttcaggaaatcagaaacatcattatgtcatcaagaatgtgtatagcaaccaatcattgtctacctgaagaagaacccgagcaggcttgaacggaatctcaacctgcttgggagaagtattctcccaatcaagaatcttctcaacatctttgctcttaacttggaactcatcacagttacgtatggccgattcaagaagtatcctaatggaataaggtagtttatctgcatccaccacaacatttctctcataaaactctcaccaacgagatcataacaacgtcttctaacaaaatattataatatctatcagagataaaaggaaactcaccgatcctgggatcgttcaaagcaggtaagctgtagtagttaccgaattcaccaccatcaggcttctctaacgccttcaatatgcttcggaaaggattctcggaagctgaaaacacatcagaaacagagatccacacagcaaatcaaaatacagaaccagatttcaaaaaaacgaaaaatagctggaaaatcagcatcggcgagaagaagaaataagaaacatgaatcattttggatcgtaaacagataaatcgatacccatggatgatagatacaagtcgagtgaagaagcaaagtagagagatctgttttcagaagagagaaagtttataagcggagttggtgaggctacacgagcctgagccgattcagattttttttatatgtaagaaggaaataaatctgacagatccgtggtgggctcttttcgtcagaactgatggctgtttgatttttatttttattttatattctattttcttaattatccaactttttttttttgtgaatatccattctttgcttttttttgtatcaagtgaattatatctgttcaatcatgattttattttcacaaacttataatccaccaatctgatatgtgcctcttctctatagtatctagttttatgtaatccaattttcttcaaggtttctcaatttcacatggcattgattgattaaaaaaaccttaatttctgacaaacatatacaatcaatgatcgtcgttacaacacaccaaaaaaaaatacacacaatgacacaaacatatacaagacaccaaaaatattcaatgatcgtcgtttatttcaccaccacctggtgacaaaaccaaaaaatatcgccaccaacctgcatgcaacgatttaaaaaaaaaaaaaatatatatatatatatatatatataaaaaacatttttttattttggaaatgggtcgctccgttcgaaatttatgttctgattaatttgggcctagcccagtttaacccatctttgtacccagttcggtctagcccagtttggttagagattaaacaatgtcgtttagctgaatggtgtgtccagatggaaagctgctgagatgattaattattctacccctccttgtttagtttttcaggccatgattaaaatgtataattaaatttactcttaggaacacttcaagtctcttaaattttatagtctgtatttaaatattgtccatcaatatattactatccacctaaaaatctactaactattaacctgaacgtggtcagtgtatatatctgcttttaagaaacctcactagtttcagtcccttgaatctgaagcacctttttatatttttaaaaaagttaagaagatgtacgtatatagattacgaattacatcgtctttgttgataaatatcgagaactatatatgtttaacgaaatcgttttagatttggcgtggctcatattttttttttatgtaaggacaattacatactattgttatctctttcatttatcgtctctttttagtttgtttgtttttgataaagaactctcttttttagtttgtttgatcgtatataagtttgtttatacgatcttttaagctaatatcaataagaaagaagttataaaaaaaaaaaattgtttattttaatatggacgaaagcttataaagtatcttatatttatggagttgatttgatgatgcttccatacaattacaaataaattaaggagcagatgcaagtggtggccgggttaaattatcaatcacgccaacacaaagacgcaccaccggtaaaaatgtgactttggtcagcatgtagataacctaccaatcataattatatcttctttgtctatttggctttttcttttcctctctctttatattattatacatccttataggtaaaacattctgttactttcacttacccattgttaatatttcccttagaaaacacttaattctttctcacaagatgcaaatacgtactcataaaatattatttaatttgtatcatgttcaataatatcctctctcaaatatagaattgtttgtaaaatgattagaggagagtggtgtggagaccaaattttagtccaagtaccagtaatacgaatttttctttcaagagaaaaactagtaaaacacgatcggccaagttcattacagtacatagagaaactcactctcagcagtgaaactaaacaatacaagacatgtatgtaagtgacacgtaactatatatcatgcaaatgcttagatttcaatttaatcactcatgggaccagcttctggaccattaattgccccataatgtctataaattaaaatacaggtgaaatatattggggtagatatatattttttttttatcatgtcaactatctaaggtagatagatatttttaagaaatacagtatgttaaaaaaaatcgtcatagagccttgtcaaatatattcagtaaacataaatactatatgtcattatttctgtccatcttttgaaattttacatatcaacaatattattattattattttgactaaataaagaaatatgaaaatttcaaagttatataaatgatccgatcatgcaaatactcattagatgagacatacgctgcaactaattatctcttgaaatgattaattaatcggcttaccactgtagagatcgaaaaacacagagtcttggaatacaattatacagaaacggtaagggtaatcattcagcttctcgcacgtaatagcacaataacaaagtctcaccgtacccattttagtttggtataacaataaagtattgctcatattaaggttcttactataaaaggaaaggaagaatcaaaataagattttgagatttcctcaaatagttaacatgtatagaaattatttctgtttcgtatctaattgtttcttctgattgcttgtatgattcgaaaatgatcgaccctaccatattttggtattattcagacaatctaaatatctcccgtagttttcttataattaaaatctaacacattttaaaaatttatgtaaaaaacgaagaagttattttattaaactataaataaccttttctttataactctctgcttctatctttcgagcattgaaatgattaaaaaaaaattagtggtgttttcaacatagatcatgacaggcaaaccctagattttacttcacctacttgaggttaaaaaacttaattgcaagtaggccagacatcggatcttctctcttaagggctaagcaaaacccatctctcctctttcttctatcttctttctcttccttctctcttctcttgtataaactccactgagctctgtttttgtttttaccgtagatcgtttcgagtctctttaatctttggcgggttccgtaaaaaaaaaaatggcctcttctagattccaatctgggttttgtcctatctcttcgtgtccctctcttgagaatttcatcgaaaggattaaagacgcatgtcgtttcaccctctccgctgttctagggacaattctctcggcggtcttgactttcttcttcgctttaggtcggtctcttgtttcctattacaatttcttgattcttttcaagaatgtctctccacttcttggaaacttttatgaagctttttgtcctgctttggattgatttgatcattgatatcactttactgttgagtagggtagaatctgcaactttgggtttttatgtagagctaagaaagttgtttccttcttcagtgggcacattgcttggagcacttactggagctttgataggccaagaaaccgaaagtgggtttatccgaggagcggcggttggagccatttcgggagctgttttctctatcgaagtctttgagtcatctcttgttctttggaaatctaatgagtcacgttttggatgtctcctctacttgtgagctgagatcttcatttgaactactcatctgctctgtttttttccagatttgattcgaactgattcttgtttcttgttaatctttgtgtagattgatgtcattgttagtctgataagtggtagacttgtgcgggaacgaataggtccagcaatgctaagtgcggttcaaagtcaggtacagttttttattagcaatgtgttattggttccattatcagcaatgagatctcctctaatcatattcatctctcttctcactgatcagatgggagctgtggattcaactttcgaagagctctcgagtattttcgataccggtggctcaaaggggttaacaggagatttggttgataaaatacctaaaatcaaaatcactggcaaaaacaacttagatgcttctggcaacaaagactcatgttctgtttgtcttcaggttttttgctcatttcagctcaaacgaaatcttaattccccaaatgcagaaccaaaaggtttagttcttgatcttcttttgtgtaactttttgcaggattttcaacttggtgaaacggtgagaagcttgccacattgtcatcacatgtttcacttgccttgcatagacaattggctcttcaggcacggatcttgtccaatgtgtagacgcgatctgtaatctcttttcttaccatttgcacagcctcttccctctctctccttcttcttgtatggtcgtaaattcgtaatcatgtggttagagtctctatatatgtacaaagaaatgaaaaaaaaaaagttttgaaataagttgatcttaaccaaacccattaaattcaagactttagattgtgtgttggtctcaccaaactttgaagtgagtgattgaattttcgtaaatacaactacattcagtagttatgacgtgaaggaaagaaattgaattctatgtgtgaatctatggctcgtgtgggcctccaggagataaaatcatgccaaatcacatttcttgatttggtttgttaattagctcttcttacatctaaacaaaacattaataatactcaccaacacgtaattaattacaatgtcaattttggctagtgcaattattacgagagctttccgtgttgtaacttgtcatttggttaaatgttttacttaacaaacaaagtgaataataatatggttatgttgatcagtctctatcttttttcatgatgctttttctaggtttgcctataagtcctctatatttggggggtcttttgaattacatggaactttataaaaactttaaacatttatttcaagagtagtctgttgtatttaaagtttagttaaaagagtattcaacgttgtatctggtcatctggcactttaattacttaaatttataaaatatgaaccacaggtttttaatcacgggaagcagtatcgactgaacaactactacaaaattctacaagtgttgtcgtgtgttgattgaaaagtgtttttgaaattcgttttcgaaaatggaattgcacgagctttgattaaaataaaggtttcttttggtcaatagttctcacttaacgcaagaagaacaaatattagttgtcttcacgtgatcttccgacagattcaaagttttaattagttgggacatcccccaactgtaataatatctttttctccatcatcatcgtttcttcttcggtacacgtggcagccacgtgaaccactcgatagccacgtgatcatcgtcaactggttctgcatattaagcccaataacccatcaaggcccatacagtgagcataagcttttaaaattccgatccattaaatcaaaccggttaactcccggttagatctgtatattttccggtttatgtttattccctaaaccctgaggcctgagctgatgatatatccttttttccgacggcggaactcgattatacagttttcctctctctcactctctccgtagtctgagactcgccggaaaagcttgtattggcttctcttcgatttctggcggaagtaaggatatcacgtgagctatgaagttcctcatgcaatccatttctggtatgcttttatggacttttcatcctcgtgactaactagatagatcccattttgcatctgtcatgaatcgatctttatccttttgattcaatcgactgcacattcgtccttaatgttagtttttgattcgacggaaacagggaggaatcgatctctggttcgagctctagttagtcggcgttacttcgcttcatcgccggaggaaatcgcaaagagaaattacgccaacgatctgtcggaatacaacaccgctgtcaactccgtcacagctcagcgcaggtttattttccccccttgatttgtattgctcattgtgttcagaacatggggggatccaatatgaatgtgatgagatattgagattgagaactcttttgccatgataatatatacttggttacttcattggtccatgcttaaatatatgataaatcttttcttttttgggtaggcactatttgctgagggatgtttatgatgatatgaagcttgatggtgtgcagcctacagctgatatcttccattcatttgtcgtgggaacgatgaagggtgctcggttaagcgatgcgttctttttccgggaagaaatgaaagccatggggattgctccagatgtatgtcctatgatcttgttgttttttactcttacattgcatagaataaactcgtcttgttgatttatgttcctaagaaaaggtgaaatatagaaaatctagcagctgattgagcgattccttattcaatgatttagactttacagaatgagtccgtccatccgtggcttgtgttgttcaccgtgcgttcattcttgtaggtgaacttgtacaactttttaatttccacatgtgggaaatgcaagaatggaaaggaggcaatccgagtatgttatcttccacttgctttaatggaagaccttttttttttcttttacattccttgattttcattcattaatgaaacttttggttgtcttactgtaaggtctatgacgagatgaagagatatgatgtaaaaccaaatggacagacctttgtctgcctgctcaatgcctgcgctgtttctggccagttagatcttgtgtaggttaccactgcttctattgtcttttgagtgctcactaattgaaatgatactctttgataagcttttatcccacttttctctgttttaagtaagtacttgtttatctcttcagcgctatctaagaagtgatctaatctttttcttatctgacatcaaataaattgttagatatgcgatagttcgggatatgactgctgctggtgttggtttgaaccagttctgctatgcgggactcataactgcacacttaaacaagcagcccagaccagataatctttctactaaggtaacgtgtaaaggtttcttgttcagatttccttttattttttttaaagtaggttttctcacagcctcctttttgctcaaaagattctcgagtttgtggagcagtcaaaaggctggtcagcaattgattcatcaaggaagagtgcagaagatgtgatgtttagcatcagtgaagaagagctgtacaatattccaaccgctgattattcccacaggaccaggtttctgcagaggaatttgactgtgtatcacgtagcattcagtgctctcgctgatctgaaggatgtaaaagtaagatgatctgtctatctagattccaaaatgtcctgaacttagtgggaataaagataaagataagaaaagccagtttcggagtttatttttgcatcttaccagcaattcctcatggcaggcaacggaagctcttcttgagatgcttaagaaagacggaaaagatactgacacttactgcatgctacaaatcatgaggtacaatagaacacacactttgatgttaatttgcatctagatgttaaaacataggcagtctttagctacgaaattaacttttgttactagtatactacactattaactctcgttgagaatcaaaacatgattaacgtatatgcatcttattttatatctacgcaggtgctatctacattcgcaagactttgagaatggtctcaaactgtttcaagattacatgagcgcagacaaaatccctgccatggaactatacacggtaacacaatgatctgacctcataactggtgttttctatatttgctttgagagtgaacgtcttctttactatatatgtcttatagttgttgattctcaattgtcaaaccccgcaaatgtatatacaaataaatctaaattctcaactaacgcattagtcgaagagaattatgcttctgtcctgtttcccatacttggttcaacatatctttgggtgatatgtatatgctgaagatgtcaatttatttgttttatttttacagacgcttatagaaggagctatgacaggatacaccgataatggaatgaagattgctcaggacactctggtaatgcttattggctcgagctgtactgaaaaaaagaatctatgaagtaaacaaaacacgggccaatagtagagcctgatgacaatttgtttgtaaatgcagatccaaatgaacgaacgcaatttcttcttagacccaagaactggaagcaatctgttactcaaagccgctggtgaaaaggtaaaaatcttgaacttcccctaaaaactttggaaatatcttactgatataaagagttggcttagtgaaagttaaaaaaaaaaaaacattttctttatggcagacgggagggtacacagttgcaaatatgatatgggatctgatgctagctcggaatattctaccaacactagctgctgttgaagcttactacaagggcttgaaagtaataaaaaacctttttcttatttgaccacaaactttctttctcttggtattagttattgatggtttttgtggtgtggtaatcataggaacgcgaaataccagaggatgatccgagactgatgttagtgacgcgaacatacaataacttgcggcttagggaagggacattacctaataggcgttaaagcaaagggaccaagaggaagaaagatggtatcatggcttcttcgttttctacttctatttgcttattgggatctctgtgaaccatctgggtattttaaaaccagttcgtttagatgaataaggaaatttcacctagatgatgactggatattattctgatttgatttcaattacttaaccttgagagcttcatacaaagcgacaacgttttaaataagccaacgcctgtttggtttataaagatcagcctgttcactcttaaatgcacccgtttggttttttgataaaagacaatctgggaaaaagagaaaaaaagaaagaaagaaagagaaactatacattctggtgtatccatttgcagaggtaaatagaagcaatagtagtttctgaatcaccagattacagcagatatgtgacacctctctcgaggattttttaaccacaacagccacctccctgagagatcgtaccatctcttcctccagctgcaccttgagtacgcccgtaaccaatcttgatacctgatgactgcaaaatttagagagaccaagggaattgaatcacattgtaacacaatcgagggattagagaacaccagaagactaagtatattgccagattcaacaaggaaattacctcgttggatacatcaaagacaccatcctgaatgttctggaggatcttggcagcagtctctatgaaggcctgttggaatccagaaaaagaagacaaaagtctccatgtgattacagccaaataacaggatggggaaaaagagttgcaaggaagaaatgtcacctcctcaacgttttgagcagttcttgcagatgcttctaagaatagcaggccatgttctttggcaaactgttgaccttcctctttgctaacagctctcttgtgagcaagatcacatttgttcccaatcagcataatactcatgttaggatttgcatgttgccgagcatcctccaaccagcttgccagatggttaaacgtctctctcctgcaacccaaagaaccaagaattttgagcttcagaaagatcaaagcatgaaaaacctcaatgataaaactcttgcaattcttcatgtccttcataactttcaaaattccaaaacaatggaggaaaaatatctattttagcaagaatttaagatggatggttaacttaacatcctcccaaacaagcattgccaatattatagccaaggattttgttcagataaaagtaacttcccaatttccaaaacctttccaacagtctaggtttatcaaatcacaaatacagaaccaatcacttccaaaaccttgctggggaattcagaagttcgagctgatatatattgtcgcaaggcaaaaactaacctggtgatgtcataaaccagtaaagctccggctgctcctctgtagtatgatctggtgatggatctaaaagattcttgtccagcctaaaaaatatcatacgaaactttaatcagaaagcacaactccaacacatacatcatctaatggaagaactattgaccagaagaaatcacaacaaggaatgcactggtgaactcagcttctattacaataagcctatgaaacttaatcaagaaccgtgcaatgattaacttttttgaaattttaccccactttgagtctctggacatgattttcaaacataatttttggtattggcaattctaatgaggcattgtttatataaaaacgaagaaattgaattgattatgacaattaatcttcttaatcacatcctgccttagggagaaaaaaaaaacaatcctaatcgataaaacgtgattagttccctgatgacctaattacgaccaagagaagagagaggaagcgtacggtgtcccaaatttggagtttgatggggcgtccatcgacggtgaccatccgagcaccgaactcaacaccaatggtgagatcgtggactggttggaacctcttatcagtaaattgcagaagcagacacgattttcccacacctgaaacgacaaaaaaaacaacaacgaaaacacatgaaaatcggcacgaaatggatttaacccagaaaaataaaacaattgggaattaagaaaggtgaaagatcggtctctcacctgtgtctccgatgattatgtacttgaagagataatcgtaagacatggttgatgaatttgagcaaggtcgatgatgaattagcgcaggtcgatgggttcgagagaaggagatgtgaaagagaggaagaagagattgaagagtacaagtcaccgacgtgctttttgatttcgaggtttctcgatgaagaagctatcttctccttctcatcttttataatctttttacttaattactaaaattaaagggatctaatgacgaattatctgaataattgtttttcttttgtatccttaagtttcaacagtaaataaaaatccacacaaaatactctatagtataatttattaattattatagtcgttttagttaattatttaaaaacagagggaccagatgaaaaatatctgggaaacaaattaaagcttaaaatccatctctgcctttggctccgtccactctgactcgactagtgcatcatccattgttgggcatttgatagtttaaagtgggcttttttatttttttataatgtgggcttttttctttgatgttgaatggcttggttagtggatttcgagaccagcataagtttcttttttctattcatctgaagcatggcgcagtccataatcgctaaattgatgatacaaaagaacttgcacatcaaaactgtgaacttaccagaaatttgcattagcaaaagcttcttttattatatgatggggaatacacacgtaccttgatacaaggctactaatatcaattgtgtccggattatcacggtagtatgctctgtttcatatctcttatggaaattacataactgtgtttaagatgaatgttctagtgggaagataagaagaactcaaatcctacattagagatgagttccttacaaatgcttatagtctacaatggcaaattcgagaagcaaattcgaaacagagttccatccattagagaacaggggatgttatttcatcccaaactcaaaccgatcttagttatgttatttcgtatttttttgggtattttaccttcaaattatttgattaatttcatgctttaaggagaatttgattaaaatgaatatacaagagttatgaatttgattatattctcttattctactaatcacgaaatatttagagaatatgtaattatcgtttaaagaactatcgttttattcataaaaactctgtaaattaccaatttgatatacttctatcaaattatttatattttttagttgtgttaattcgttttttttgggtgtatttatcttaaaaagatgggattaaatttcatgatttaaggagaagaatcttttgagagattcgaaaccgcgatagcattccttgttcctccttttctatttacctttctacttttgccatcatcttcgtcgatctacttcccccaaagtctaaccctaaagcccccaaatttctcctgatcaaaaccttgttgtataaatcctgaatctctgaagaaacttcgaagatttgggtttctcaatttggttgagaaattcgcgatgaatcgcaatttttcaccagctgcgatgccaccgatttcatcaatgacaatagataattcattctctcctcctccatcttccggcgacttacctgaaatcccagatgcttggtacggcaacattcagtatctgcttaatatctcggtcattggtctcttatgctgcgtctccatctttctcttcgttaagctacgcagcgaccaccgtcgtatgcctggtccttctgctctcttctctaagctcctcgccgtttggaaagccacgtgtcgcgagatcgctcgtcactgtggtgctgatgctgctcagtttcttttaattgaaggtggaagctttgtgcttcttttctccattgctgttttagctgtttcggttatgcttccgttgaatttatatgctgggactgctttgttgagtgatgagctttcgaaaacgatgattacgcatattcagaaaggttcagctttgctttggctgcattttgtgtttgttgttattgttgttgttatctcgcattttggaatcgctgctattgaagctaggttgaagtttactaggtttagagatgggaatgggaatatcagtgacccgaacgcgaattctactgctgtgtttactataatggtgcagggtttgcctaagaatttagggtctgatagagttgagtttgaagattgctttaggctgaagtaccctgggaaagtttataagtttattgttcccatggatttgtgtgctttggatgatcttgctacagagttggttcgtgttcgagatgagattacttggttagttgccaagatggactctaggcttctaccggatgagtatgagaatgttggagataacggactagtgttctgtgtgtgttctttgtgggttagggtgaaggttttgtggtctcagattacagagaggtttggatttacagatgatgaaaaactgaggaagctgcaagaactgagagctgatttggagtctcagttagcagcttataaagaaggacgagcacaaggcgctggggttgcttttgtgatgtttaaggatgtgtacacagctaataaggctgttcaggattttcgaaacgagagatcaaggcgtactggaaagttcttctctgtcacagagctgcgattacagagaaaccagtggaaagtggacagagcacccttggctactgatatttattggaatcatctgggattgacaaaagttgctcttattgtgcgaagagtgattgttaatactattctactgttgattcttgtgtttttcagctccccattggccttgatcagtgcattggtaagtgccgggagaatcttcaatgctgaagcattggatagtgctcagtattggctcacttgggtgcaaacttctggctggattggatctctgatttttcagttcctgcccaacgtcttcatatttgttagtatgtacattgtaatcccttctgcgctctcgtatctttccaagtttgagcggcatctaacagtgtctggggaacaaagagcagctctcttgaagatggtttgcttcttccttgtgaacctcatcattctcaaggctcttgtggagtcgtcactggaaagtgcactcctgaaaatgagccgttgctatttagatggtgaggattgcaagaggattgaagaatacatgagcccttccttcttatcaaggtcatgcgtttcagctctagcttttctcatcacaagcacgttcctaggaatctccttcgatctactcgctccaatcccgtggatcaagaagaaaattcaaaagttcaggaagaatgacatgcttcagcttgtccccgagcaaaatgaagagtacgctttggaaaatcaagagccaagcagtaaccttgagacaccacttctccctgaaaacatgtttgagtctccaagattcggggacatagaacctatgagccaagacctctctgaatacccaatcagccgaacctcaccaatccctaaacagaaattcgactttgcccaatactacgccttcaatctcaccatctttgccttaacaatgatatactcttcattcgctccactcgtggtccctgtaggcgcagtttactttggttacagatacattgtcgacaaatacaacttcctttacgtgtacagagtccgtggcttccctgcagggaatgaaggaaagctaatggacacggttttgtgtatcatgagattctgtgtcgacctgtacctcgtctcaatgctgctcttcttctcagttaaaggagattccacaaagcttcaagccatattcacacttggagtgcttgtgatgtacaagcttttgccttcggatacagaccggtatcacccagctttactaagaagtattcagaccgtcgatagcatcatcgacggacctgtggattacgaagcttattctcacccaaacttcgattgggacacttacaacaacagatgattctacgaccttttaagtcttacaaattttgctctttgaccaaatacaactggaatctatttgtatatctcttctttgtgtatattccatcttttgtgcaattattttttgttcacgggttaagtttgcaagatttatcagttgagtccctttaatcattaattttggggttgtaatagcttcattcttaaaatatggggtatgaaatcggaagaaagagaattataaaaatagtaggtgggacccagtgttctctgaagtgagtatatcagagttctcttttcaacacatggactgttacactcacctaacgacgacgaagaagaaccaacatagatctcttctcttcctctcaaactcactaagcttcattgttaccccaaataaaccctaattttgctctcactattcgaagatctaaaatcatctcgcattttgatttccgaatactttcctgagttttgctggtcatgatttctcatttgctctttgttttcccgagaaaaatcttcaggagagtaggataatctctcgagtttcgaaatcgtttccaatgtcgtgctgtttcttcaagactactctgttcttgatcccgattttgatgttactgagcttcgggagctgcaatggtcgaatcttcaccttcgagatgcaccatagattctccgacgaagtcaagcaatggtccgattccaccgggagatttgctaagtttccccctaaaggaagcttcgaatacttcaacgctctcgtcctccgtgattggctaatccgtggccgtcgtctctccgagtcggaatcggaatcggagtcgtcgcttactttctccgacggcaattccacttctcgtatcagctctctcggattgttagtttccttttgctcacaatttttgataaaacttctctgttttaggataagtctgattttattttattttctgtttcaatttttctgatatcagtttgcattacacgacggtgaaattgggtactccgggaatgagattcatggtggcgcttgatacaggaagcgacctcttttgggtcccttgtgattgcggcaaatgcgcaccaaccgaaggagccacttatgcttctgtaagtttaacactttaagcaactacacagttgttgagtttactcatcttaccaattgaattatataagtttccatcttgattttgggtttcgatttgctgtgtttaggagtttgaactcagcatttacaatcctaaagtttcaactacaaataagaaggtcacctgcaacaacagtctatgtgcacagcgtaatcagtgccttggaacattcagcacttgcccttatatggtgtcttatgtctctgctcagacttcgacatctggtattcttatggaagatgttatgcacttaacaacagaagataagaatccagagcgtgttgaggcatatgtcacatttgggttagtagctgttagcatcttagcaatggcttcttgtgtttcagttcaatgcagcaagttcctgaaaatgtgaattatgtgcagatgtggacaggttcaaagtggttcttttcttgacattgcagcaccaaatggtttatttggtcttggcatggaaaagatatcggttccaagtgttttggcgagggaaggtctggttgctgattctttctccatgtgtttcggtcatgatggagttggaaggatcagttttggggacaagggtagttctgatcaggaagagacaccgtttaatctcaatccttcacagtaagtggtgattcacttatgcgctaaattggaaattctgttcctttgtggatggcacctttaagccgtggttaaattcattgttgcagtccaaactacaacatcacggtgactcgggtacgtgtggggactactttaatagatgatgagttcacagctctctttgacaccggtacatcatttacttatttggttgatccaatgtatacgacagtctctgagagtgtaagcatctaaacaccatcatattcgtgtttcttccgcatgatgctgagttttgataactctatgattcacattatcttcttcagttccattctcaggcccaagataagcgccattcaccggattcaaggattccatttgagtattgttatgacatgaggtatgagtttgtatctatccacgctcaatgtctatttttcattgtcactcaaatcttaacatttttcttgtaaacggtgtgattagcaatgacgcgaatgccagtttgataccgagtttaagcttaacaatgaaaggaaacagtcacttcaccatcaacgatcctataatcgtcatctctactgaggttatactctctgtctacttctttctctattgctccgtctcttcttcaaccaaatctgttatctgtgtgctgatactattagaatctctgcatttcctcagggcgaacttgtatattgcctggccattgtcaaaagctctgaactcaacattattgggcgtaagatcagtttttcttcctatcaatcatggaacatccgctaaataatgacattgtttactcttaatgaaacagaaaactacatgaccgggtatcgtgtagtattcgacagggagaaactcgtcttagcttggaaaaagtttgactgtaagtttcctcttacgtgtgttatatatcactaaaaccctctgtttcctaacttatgatctgtgaatatctcttaacgcaggttatgatatcgaagagacaaacacaactgttgccggaacaaacaaaacagcagcggtagctccagcaatggcagctggaataaagactcataacaattcctcagagctacacaaaacaaaccaaaccatctccaaaagtaactcctccccaaaccaaatatccaaaacagtagatgtatggtcttttttcagatttgtgttcatattacttccacttgtgtagatttgtaagccccatccaaaacacatgccaatagtattttttttgtatcataacgacactatagggattttttcaggaaatatatgctcttcatacgcatcttactatctttgcaaattctcgtcttttttctcttcaataatgaggtagttaaaccgagataaaccgaaccaaaagggaatttggctgtaatgttgaacgccgaatattctaaaggaaattaaatgggttccacattgataacctgcctcggcaagtggccaacgctcgacacttttacacgaccgagacaatgaatctttcattttttcgtcattttattctaaaattccaatattggttcgagtcttagatataatttttagtattggatttgaaaatacactcattaatcattgttaaatatactaaaatcactctgatagcattgtttagtatatcatcatatgataatgcatcgtttgtccatagttaaaagttaaaactgtattctataaactgtaaatcgtgtgataatgttaacatttacagactatgtatcaatttgattattaaaaagcaaccaacgactattatgaatatacagtagtttttggtgagtatgaatatacagtagtttgttaagatagttttgaacaaatccacatttttacgatcatatctcataataaccataaagccatatatacattgctatttatcatatccaatgactaaagtgaatattgttaaatatgctagtagtatttgttaacaaatttatcttatgcatatattaatattatatattagccttaacaacaaaaaaatctatgacttgattttttcccatatatactaattagaagattatgtaagaaataagaaaaaatggatactgtatccctgatttggaaaacagagattttaatccttctataaatattttcatttatttgcaatcttacaattacatatgttttatataatggtatatctattatagtataatataaattcaaaattaagtcgaaagttgaccacataacttagcgtttttctctcttcggaacttttttttttgtgtaatttaatttatacaggaaaattaatttaggggaaataaatgatttaattgtttgacctattttaagagaattaaaaaaagaaagatttttttatttttgtgaaaagattagatcaaatcttacatggtaattttctaatgtcaacgtcaacaatcctgccattagctttttggccaatcagattcatccaaccaaagaaaaacaaaagtgtgtttttttccttgtgtttacttcaagggtaatttagtaacttctaatatccgcggtagccaagtaaaaccaaaaccaaacgaaaaaaaaacaaatggaaagaacatataaaatcgaataaaaaataaaggagagagagagagagagaagagaagagaagaggagactacactgctccatcatcttctccttctggggatttttttttggaaaaatcgttctgttaccttttttttgcccattactcaaaccctaaccctaattttctgaaatcgcagagagagagagagagaggtttcttcgaattctttcatcatcaattcgctaactttgtttttttggggttaaatcgattaatcgttattttattagatactgtcgatcggagctaatcgactctctcttaacaaaccctaattttttggtcctctctcatggcttccgccacttccaataaccctgcttcttcttctatgtctcctcgtcgtatcagcgggaatcacggcagccccaccgcttccgtagcacaatcacctcgccgtccttctcggcaggtttcttctccgtggactcaaatcgtccgcggcgaatcagagccgatcgccgccgccgccgctgtagccggtccttcctctcctcaatccagggctccgatcgagccgattgcttctgtatccgttgctgctccaactgctgctgttttgacggtggaggcggcggctggtgatgagaaatcggaagcatctggtggtcaggacaatgctggaaagaaaccagtttggaaaaggccgtctaatggggcttctgaggttggacctgtcatgggagcttcttcgtggcctgctctttctgagaccaccaaagctccttccaacaagtcttcttctgattcgttaaaaagtctcggtgatgtaccatcatcatcgtcagcatcatcatctgtccccgttactcaggtacgaaacgattattatgaccttattgattatgtggttactgaaatgcttcatggaagtatagaaaagtttgagcttttgcatattgactatttgtgtcgtattgactataactgtttatcatagagaataatgtaaattcttggtttgtgaatgaatcttagcttaagctttttttgttggattttgtatactgcaacttcgttatctgaatgtttgttgactaactaggataaaggcagatgcgtcttaataccttcctgtcggattgtgatgcatattgagcatcaatgtataaaagtctttgagtagtttctgttcaaagttctctctttttatttactgaatttgtaatgtcgatacttaaatgcttattttgatgtacgccttcatttatcagtgtgttatccaactctcagtaattctatttatcctgattcaatagtaaagatgcttctttgtctttaatttagggaattgcaaatgcttctgttcctgcaccaaagcaagctggccgtgcaaaccctaatccaactccaaatcactcgcgccagagatcatttaaacaacgcaatggcgcctctggatcagctaatggtactgtttctcaaccatcagcgcagggttcatttaccgaattgccttcgcacaacccttctcctagaggccaaaaccagaagaatggctttgcgtcacaaaaccatggtggtactgaaaacccatctcaacgagactcctacaggaaccaaaacggtaatcatcaccaaagtcacggtggcaggcgcaatcaggagcacgggaatcaaaattggacttttcaaagaagttttaacgggagagaaggaaatgcgcaatcgcaaagaggtactccagcttttgtaagacatccatcaccaactgtgcagccaattcctcagtttatggcagctcagccttttcccagtcatatacccttccctactggtgagacacattgaaaatcacgtctttgaatttcatttatgatttgctaatgcgtcttctccgtttcagaattggcacagtcgtcgtattatccccgtatgccttacatgacacctattccgcatggtccgcagttcttctaccattatcaagatcctccgttacacatgaaactgcataagcaaatacaatattattttaggtagtaccctcgtatttaatttctcttattcttctcgacgatgaaattcccactgatcaattcactatagggaaatactaatttagatgcaaatgtgtcttttgttacagtgatgaaaatttgattacagacatataccttcgagggttcatgaataatgagggttttgttccgctacgtgtggtagctggtttcaaaaaggtaaactagatgtattgtctttcatactggcccagttcacttctctccgtttatattataaacagtagaattaagagtttcatttctgtataattcaacaaatgttttttttactgattaggattaaggcgaatttgtacttactacttagtccaataggatctttgattcttttgtgactatttatataaagatgtggcatgcatgtacaaactttcagcaaatggatatgctcttaagatagttgaaatatgttaacagtgggcatgtattgagaaattcgattgtgaatccttcgtttgttcttatatactgtgttgcataatgttgaacctgaacaagtaggacttattagctagctgcacagtaggctctacaccaatttttttttgcttttctttttccttatcctagttactataacattttgttgctttgtactcgtcaagagttctgttattattctctgtgaattttatctatgttttgttttttctctctcctacttcaggttgcagaacttacagataatatccagcagatagtggaggctcttcaaaattcacctcatgttgaagtgcaggtattttttgtattatgtgtcctttaatgtgtaaactattgaattccatcgtctttccttgctagtagtatggtagtgtgtgattgaacttaaacctttctattaggtatttgattttgattattctgagagatagcttatcaaaactggtggaactgaaaaaataatcttcgtgttacctctttgtgtgcttggaaaacttttacctttatttaattggacatacttttttcttcttctcagggtgacttcataaggaagcgcgataattggcaaaattgggtgctaaggaggaaccctacaggttccggcccccaatctgttgatagggcagatgcagtggcaaaacgacttggaaacttgtcagttgatcagagttcggctgatcccattggtggttcgagcagtcagttgcaacctacagaagctctttcagatgatcagcaacagtcttctagtactgctccagtgagcaaccacaacgccccagatggtgcaaaccgttgaaccatcaagtttgggggctgttggttagtgttggacatgaatatattattttgtcttgcccaaaatgaggaaaacaataatgaaggggaatcaaaaaagaaagaaaagagataaaagcataaagagaagagacgcatatgaaaaaaaaaaaaaaaggatcaaacatttgtgattcttctagctagcggaaactttggcatatttatgggttctttttttttttggttatttttggatgctaataacttttttttatgtttatgctacatatgctatgatcattattatggttgcttgtagccattgttatggtctgggatttattggttttgcttgctaatactctcttataacccctgttactgtttttttgttctgttctggatttcaatatttcgattgtttttatgggtttgagagagttaaaataagaggagtagactcgtgaatctcttctaattcttcaagcaaaaagaaactttacttgagagaaagacttgtgagtctcttataccttagcaacttcgtcggtgtgagaaaaaaacaaagtgtacctttatttgaatttctatacctaacattgtaagacgaacaagtaacacgccaaaaacatgtacaaaaacggcagcgtcttgtggtttgctttgctgtgaacatgaagcaaacacgtgctttaacgctctactggctggcattgtactgctgtgttatgttgtgtatgattttgaatggaacagtaaaccatttaaaaaaatacaaaaattggagagtcgctatgtaattaagaatttaaaagtaataacattaaataactgttcttgtatttttcagttcgatcaagaaataactgtatttttatttttatttgcaaaatcagcctaaggcatttcgtatgttacaagattatttaaacactaacttaccaaaacagcaaaaaggttaatgtgtcttataaggcatttcgtaagtatgatagtttataaatagcatggattctatgttttataaaaataaaataacacaacttcatacataagtttaaatacaatgtagcaaaaaggttaatgtgtctattcaaaagttataaataattcatagtgtgtatagcgttttaaccgtgaaattttccctttgttatcatcagttttcacatgtgtgttaattcatattgaaattatttggttcactttttgactagttaggtacttacttatttctcataaatgttttacattattgcagcgaattaagcttaacgtaataacagtataatgtagatctctcgtaataatgaaagctgacttttctacacctaaaagtctaagacgatctagttatccaaggccctctctacttgatttagtcataattatatctaattaaacactcacataatatcagaatattctatatgttcacccaaatgtggaaaataatcagaaacggcccaagaataggttcaatgtcacaatccatgcgaaacaaaaaatcagaactattcttgatagactaagaaaatagtaaaccctaattcacaaaacacaccaaaaatatagaaagttgtctcaattattcttaccattttggagatgtcaagtacacaatcccacccatcttgactatccaacggttagcattcttttggctctttcaactccaagttttttcctttatttatttttattgctaattttagcagtaaattattacgtctactttgcttccgtacggtctagagacaacctacggacagatgatgattgtacataccagtagacttacagaatccaacggttattgaactcacgggtcattcatattgttcgttggattataaatttgaatgtaaacgaacatgaataattaaaaacaagttgagatttgtctcttcatcaaatcaaatcacttgtccaccgagttcgagtcttttttcaagccaacgagtctatcttaaacccttttacgtctctaaatatatagagatgtaattagtattttatttcttcaccaccaaacaatgttttataattgtaggaaatcgagatatataaaacaatgaattattttgcacttactacttttggtaggcatatttcatgttgtatgatagtccggaaaattttatataacttgctaaaacagaatttgtttccatttatatgcattgtttaaaagtaaactaaagaggatattaaaagacagagaaatagatttgatggagtttgggacagagcaatatagtgctgacacctgtccaatcccctgagacgtgacatgtcacactcctttcttatacaacttacaagttctctgcacaattttatgatacaatggacatttgaattcactcgttacagactataccccaactttattttgagtttattttgcaaaaatgatttgagactgggaaaatttgttttattttcgtcaatgaatatgcgtagtgacgtcgatactaacaaaagtactactctttacattcgaatttttggtggttgcgaaacgacaacaaagatctatgaaatttgtgtttcacattaaaaactcaaaatgtattttgaaacccaatgtttggaaacatgtaaacaaattaaagtctttgtacttttcaccaacaaatggaaaatatatatcttctaacaaatatgagtatttgaggagcttgcattttcgataaacagctcctaatgtagtactctttgcatgttcaaaagatgggacgtttccttgagggctgatttcaacattcagagaaaaaaaattatatacatgtacggaaatgaatagttaatcttgttgaatagaataagagaagaggaaagaaaaacaaatatcgtatgttattatagtttatatataatcaacttgcaataaaggaaaaatttgaaaagcgtgactagatatgcacttggagactgacttacatagtagatacgataatcgaatatctagatatctggatggtactcatattatttgtttattacgtatgatcaaagatttattaatatgtatcatcttctacttggcttaattattaactagtttagtattcgtctctaatcttcaaaacaatcaacataaatatctaaactatattggtcatataaaatctaatactttactatccacttgtaatgtttgttttgttcagagttggagacccacataaattgatttccctatccgtattgtaaaacagactattgacactttgatcaaatctcgttggatgacatgaacaccaatgatttgaagtggggaacaattcaatagttaacaatatttttgttatttaaatgcatttcaactatacggtcgatattatttgaaatgtttgcaactacatatttaagaaaacgttaagtgcaaatgacccgttcttaaacactccgaatctcatataaaataaagtttttttgtactaatcaaacatataattttcagacttttagttttgatagaaacaaattacatatacgaacacccaagtactactttttatattcgataatattattctatcttcgtttaaaatatattaaccacatcaagaaaagaggaatgaaatattctaacggaattaatgtttgctgccaaaaacaaaaaaaaaacagaagaaatttttacatttgagtttattggtatagtagttaggattttgtgttttattatatatttaaacgaatttatttaattatttctaatacagaaagatgtatatattcttatctactttcattttgtttttaatgttttatttcgtcaatacccttaggggaaaaaagtgtattttggcaaattttccttaaatctaagagcaagaacaaaaattaaagtcacacatgaaagttgaaagtgatccaaagggatttgatattagaaaatagaaagtgagataaaaccaaaaataattttatatatttgcctggctttttacaagcatctcacccccactcactctttacatttaaggatgatgaaaaatacttcacttttgaaataatcaaacaccatttttaatctttataataactctgacgttgaagacatcaacaaacacctttaattacatataatagtttatggaatttctcttcttcttcttgaaatatattatttaattggaaatagttcaatccctctgtctcttcttctggagtcttggacccaaccccatcattccagaaatgaccggctaaagtcaagaacctctctctgagctctcaccactttctctctctactccctctctgcgtgtaggatactactagacaattgacaaccaaagactaaagctgtgttgttggttcacttctgttctcttttccaatgttgtcatcagctaagcatcagagaaaccatagactctctgctacaaacaagaaccagactctcaccaaagtttcttccatttcatcctcatcaccatcgtcttcttcttcatcatcatcaacctcatcatcatctcctttaccttctcaagactctcaagcccagaagagatctcttgtcaccatggaagaagtttggaatgacatcaaccttgcttccatccaccacctaaaccgacacagccctcatccacaacacaaccacgagccaaggttcaggggccaaaaccaccacaaccaaaaccctaactcaatcttccaagattttctcaaaggatctttgaaccaggaaccagcacccacaagccagaccacgggttctgcgcctaatggcgattccaccacggtcactgttctttacagctctccttttccacctcctgcaactgttctgagcttgaattccggcgctggcttcgagtttctcgataaccaagatcctcttgttacctcaaactctaatcttcatacccaccatcacctctcaaacgctcatgccttcaacacctctttcgaggctctggttccatccagttcttttggtaagaaaagaggccaagattccaatgaaggttcagggaatagaagacataagcgtatgatcaagaacagagaatctgcagctcgttcccgcgctaggaaacaggaatgtgcctctcctcttccctcctaatcttcttctactcatgtgtatcaaaaagggaagaaaagaaatgtggttttgccatcaaattgcttttgatctaaaaaaaggtctcttggttttgattctcatttgcaggcttatacaaacgagttagaacttgaagttgctcacttgcaggcagaaaatgcaagactcaagagacaacaagatcaggtaaacaagcagagccaagttcttaatgttttacccttttgtagcactcatgtcattagatcaattccttgtagtttaaccaacttataaaaagagacagacagacagcctctggagtatatttgttttacacacttttttgtccaatgacattttgggtggttagattctgatacttcagttgtgtgtttattatgtgtgtgtgtgtgtgcagttaaaaatggctgcagcaattcagcaacccaaaaagaacacacttcaacggtcttccacagctccattttgagaaatctacaagtccttgtttctcttttggggattgagattgtctcatgaagaagtgaaaaaatggcaaaagtttgtacccttttttattagctataagtataactaagcctaaaattgtagaactaagatattgtaggggaaaaaagaagatgtaaaacaaaagacccggaaagagaaaaggatctttcaatttcctaaggcacaggaacacctgtcctgggtcctctcttaatgttctgtcgttttcctatgcaaacccttttttcacttctgtactaacttctacttgtattcttgttgtagtaatgttctacttcctcttctaatactagtaagaaaaaaaaccttatgttttactgtttaaccaatttggttcttaaaagaagcaaaggatcaaatgaccaatagacaaaacagtgctccacttaaatgatgacaataccagagaaaagtgagaaggggacctatcactgaacatttaattttctccctatcacattatcacataaatatccaatcctttggctgtctaccatacaagccaacaacttgcaatatgattttgaaacctccaagccaatgggaattaagttcaccacttttcgggttggtcaagagagaacatgataagtttcttattcagcatggtcactccccacgttttatttatattcatagtacatagtattgtagcttttgctctaactggtcaccatcaaaaacactaggtgtgtttgtattcatttggtttatcaagagaatagtttttatcttcttttggcccaatttcatttacctgacagtgataagtcttgttgatccacttttggttgttgatatattgctgtgtattcttttaagcaaccaaaagtggacatcaagagctaatatggtgtaaatatagtggacattaagataaagaagaatagttaccaaaagtgggactatgactagaatctatcctcacattatatggttacacttagagcccctcaaataggcatccaatactttaaatcatgcttctactttcattccagtcaataagaatcctagacttcaagaaactttaaacgaaaaagttggtttattcacctgaaactacacacctataatgtttttcaattggttacatcaatgtttcccatcaaacattcatacttaaaaatgctaccagaacttggccacaagcctaaaagagagtttagaagagatgatcaggtaactagtacagaggacagaacgaaccattgataagttgctgcagatacaagctgataccttcactctgaccattttatttctttttgggtgcaaaagcaaaagtcattaagcttttgatgcatcaccttcctcctcaagtatttttccatcctttggaaccaagcatggaatcccatctttgatctagcgtgttaagagaagcaaaatcaagtcttaaacattgaatcgtgaacatgaagtgaaatctaaaaagaacaagaagaatatcattaagaagaaaacagccgaccaatcactttagcatatgattattccatcagtgaatcccaaatcaacaccaagaataaattcattttaaacattatttagtatgaagcaaatgaagaataatgaaagaatcaaagtctatatatatatacacatctcaatctttgattagacaattcctaaaagatcaaagttgggttgagaacatgttcactgaataagagagcatgattctgaaagcagatatgatagtgatttcgtacaatttcactgtttggagagttaataagcgccataaatctaactttcatggagctcaacagctcacaagcatctgaatcgaaaaaatcaaaaagctttggatagaagcttacaggaaaagagacaccaatagtatcgctgacaagtgatttcgtcttctcgcaaaacctatcagcaatcaattcaccaaattgcttaaacaagttcttcgggaccaatcgaatttaagctatgtacattttgaaggagagaaatcgaacctcagaggttgcttagagagagggcacaccagaatctcggagagggtcttgtcaattacattgccggcgtcttttagcagcactctgtttagtctcaccattctaaagctttgatctttagctctctccggactttttccttttttccgatctccggtagaatcgaccggcgttgagcgatagttttggactttttgagtaaaaacgcaaaacgcccctataaatttaaaagtttccaaccatgcccctcaatttttatgtttcacaaacggtcccttcaatgtgtatatattattctagctaggggagaaaattttcaaatataagcctctatattttatagttcttgtttgatgccctcaattctaatttgttgaccattcgtccgtcggactttataaattgatcaaacattaagcgcttcgtgttataatgtctatgggacattggttagaatttacacagatttcttatccagctattggaagatgttgatcacttgcactctagattaatgctcctgaatctctgattctgcgcatagaaatattacaaaacttgattctcgcatcacccctaacaagtttactacttgtgttacaaattgtaaacttcccatgattcttgtattatatgtgtaaaactgtagatgcttcattcaattgctcagtgattttgcttcacattgagacaatcattgtaacgaatgagtaaaaacacttttaacatctacgatgatatcagatcgacattaaactaagatgatcttaggtttctaggaataatccttgataagcatgacaggatttaaacttcctctcataccttgtgcaagcatccgaatgcagatttagacaacctcttcatcgtccaagagcagacagtctttaattttctccctgaaataaatggaaaccaatgttaggaatctcaaatagtgtttcactcagtcttgatcttggttgttttaaatctgatgcttcctagagacatgaactaccaataatgtaggtaaaacgaatggaaaaggaatccaagtttgagatcagagttaatgcatactactcacctcagataagcttgactatcaactttttgatgtttcacttgggaaatcatgtgatctggtagaaatgaactgaattgctcaagagatgatccatcctgtggaagtatttgaaaccggcaacttgaacagcaagcagcatagaggacatcagattcctggccttcttcaaaagtatccaactctgatgagtctgatctatttagcgggccattgcagataggacagaaagcttcagtagtcattgatccatcatatttgagattgaatctctttaggcgcctctgagtggccataggtacattagagtcgtctgtttccggaattttattgaagtaaaatggagtcagcttcgcagctgtccgtacaattgtgcattcccgggaaggattttcttcctgcacaacagaacccagagacaaatgaatcagtaaaaacaaagtaacaggtaaccatgcatgcacttaaacatatgcagaagatgaacattatctgaacctgcaacagagcgacaaatgaagacaccaaatcattgattccgcattgagaacgacaagccaactccacagtcttaagtctgccctgcccagaatatgtgacgtcactcaatagttggattatgcaagaataaggttcactataacaatacaatgtagactaggcagccaataaacgaacccatccaaaaggcagagtctagttatttccagtcgaacacaatctcgaagtggaagtacaatgggaaccttccatctagcatcaacatgctgaatatctgctgatagtgaataacctcgtccctgtttcaagaaaaagcaattcaactcacaattctgatagaacatagtctaaagggaatgtccaaataaagtacacaaaacattgtgtactgaaataaaatctttacaccaaaacttcaatttttagagatgtaattggttaagtccaaaatatctacattctttaaggtagccattgattgctttctggcatgaagttctcactctaagatgcaatctatagaataactaagccagaggaaacacgagtcaagtcagggcactaagcaacacaccttgacagtagccgtaagaacatgggaagcaattctcgacgtgcatgatcccaacactaatctattgtacccattttcagcggcaacctaaaaaggtttatcaaacaacattaaacaaaagatatttccaaatctgaatttctttcccagacagaaacaaaagcaatataatgtccaaaccttttgcaaagataacattttcagatgcagcagaaggtcttcttttccagtatcgtcaggaacagaatctaatagcttcagaagtctatcccgtgcgtcaagagagtctgaaccaaatatgctttcgactggaacaacatggagatccttagcaggtggagacaaacacgagacagtatatcgaacccactcaattgcatcaatcatttcagtggaaagagcaggaaaagctgcagtttcatccacaaaagcaacaccaacaccaaacacaggtaaagatctatctcgactcgcctcgtaattcttcaaagccttgatttgcaactcgtgcacaaattgaagagaaaccctaacatcatacttgctacgtttagacaccaatcaataacatatcaaaaaacagaaactaaaggaaaaaaagagagcaaaacctggaagatgatccgccagagaaagcaacaaggacgttatctgaaggagtgatcatagcatgagaagtaacagcaagacggaatttcccaaagacattgttcctaaaacaatctgcgcagaatcttccatcgtcgaagccaccgtcaccaaatgtcataggcgcattgcatttacacttgacgcagacactctcatgattaccgccaccagatactgcatcatccactatcttacttccattatctttctcacggtcatagcaacctgactcacagcctgaggaattacaagccatttccaattcgcaagcagctgaaactgtggaaaatttagattaggaattacaacacaaaggagtagacaatgctatcaacatctaattcacgagacttaactactttccgccattaacgagataattaagagattgttactctaaacgaaatcattagtcttttttactcaatcagtatataatcaatcctattacactgtatattgctaagtcttgctataaagcgaatatattgaatagatagcgatgtgtgcacattcaaaatcgaaacaagcaaataagtgattagttaccagtttgagagagaaagagagtcgtcgcgataaaatctttagcagccccaggtcagcctcaggcggcgccaaaacgttatgcggtggttgactacggcgatattggtttaattgttagaaaaatgtcactactttgtctgaaactagggtttagagaaagcaagaaaaattggggaagaagatgaaagtggttatttacgagtctacccataccggtgagacgattagtaaagaaattatggtttgataagtatttaaaagatgctaaaccgtaaacatgtaaccatccattaaaaggaaccgacaagttttgtccaatttgggagcaatagaagagaatcatcatcagtcatatcaattttgtcaatgttttaggctttttagtcatggtaatgatacctcacatgcatttcttcatctcttttcttcttcaaagaattttccttaatttgctattgtaatattaatattcacccaccagcaaattgtatatgttctccttgattcataaaagaaaactactattttgacccaaaacacaagtttggttcaattggccatccggtaaacctaataccctatcttgtgataaaaggttgaaataagaattagttagtctatatgtgatacacacaacacaaattgctgaaattaagatgagaatcccaaactaatttacatacgactccacgatttaacacaataatattaagtgagtagtacgaagaagaatctcgtctcgtatccagagttacaacaaatcgttgtttttgttcaccttttgtataatagaagatttcaatgttccatgaactgcgacgaaggcgggcttattttcgtcttctccgtacctgcaaagatatgagagacagatctttgttagtgcttcaagattgaaacaaatattgataatatgtttgtatgtaaatcataccatatgccccacgaatctcaacttctctcagttcttgtacaagggcacagcaacaacacattacatgagatagaaaatcgtcaatgaatcctccctgcgaaatcagaaaacattaagcattcattccgactctacattgagtggcataaacatagccatttcaatctcaaccatgatagttactactgaatttttttgcaggtgtctacttaatctttaaccgaaatttcatttgttgtttatggtatgcaaatgatagaaattttctcggaagcatatagatttttgggatcaaatgggattaatggtaaggattcaagcgagtggaagagaatgagaatgtaataccgtgatgttcagtgtcttccggagtttcctcctcacgcaacaagtatagcagcaacaagaaagtatcaaagaatacgccattagctcattacatgcttcagctgaagctgggagagcgaaaattaaaaaaaatccagttgacttattagctttcacatgtattactaaaagattgaaaattaataaagtcacggtattcaataatatcccttacagatgtgcctgttggatgctgcagtggcaatctttgccaaagtaccacacgggaaaaagaatgtcttgaagcctgcggttccatcattgaatctttgagaactttgcagataacaaggaagtatagaatgtgaaacgctaatcatctatgtaacagagaaaacaaagtggagccacattgtaaacaaatagtgtggtcttacaaagagaaggttccgagcaacaagctagtaagtcggtatgccattcttcatggtgttgtgcctgtgatgctcttcgtgaaagcagatcatgcccagatgaaacattagaagtggatctgcatggaacaattgtgtaaccgatgttatagaacattgtaccaaatcttagccttcaaacatgaaaacagacctaaaagcattacagtcacagcaaagaattgaagattatactttcttaaacttgtaaggaaatttggatctttagaacaaacatgagattctaacctcgaagctgcacgagtactgcttttcttgggagaatcttcgtcatacgaatattccgtcttcatgcttgagctacgttcagattttttggaagctttctttgtcagctccttctcagagtcaggttcaacagcagcagcagcttgtgtaacaccaattaaacgctgaatgacttcacactgagccacatcataatgctcctgcgaccgctgaagttcgatctgcagtttctcgttttctgttttgagagcttcacagaaacgcaagttagggtatgagcaagagagagtcttcttcagtactgatgctgcttctctggtggattcttgtttcaaaataacatcttgcacatgtctatcctcttcatccagagtgtactcacgctgatcacggtcaatatactcaaacctctcctgtataacaatcaaaatttcaatataccataacatcaagcagagaaacttgttagaccaaaatgcaggtaaaattacccgaatgcgagcgttatcgaccaaagtgatgagaggtatgatcttaagaaaacgatcaatctcatcctgatgtttcctgaactggtaaacaatgttccaacccatagccaacaagtaaagatagctccggtctctacagctattgaccagaaggtaagaccttctcaaagcatcctcaagcccttcgagaggctctcgagtctcaggatacttcttcatctcagagatcttcagctgttcaagcaaattcccaatgagtttgagatgttgagcgaattgacgacaattcttcttatgcatccaagcagtattcgcagctttgactatgagaccaatcaacttgaccgcatctaaaccagtcagctgagccactgacgcaatctccccaagaccatcccatgaatgtgacattatcttcttctactcaaagttcctggtcgatagaaaccgaatcatcattatgcacaggaaacataacttgaagatccaaaaacatggaattatcgagattgttggaaattttaccttcgctgagctgatattaatggaaattgacggaatcagagagttggatccaaagttctacaaggacggcattgttgatagagatcgagtaggagttcagttcctggcgatatatcagaggtaaccaccgagagattcagatattccggttgagaaatcgcattatattgagggagtgaagcgagaattgactaaaagagggagcagtttcttcgactgcgacaacaaaagcaacaaagagaaaaagagagtccataagataccaatcaaagagattctccaggtctataggctttctacgtcaaagatcttcaacaccaataaagcaaacaaattttttttaagaaaatccctaaagatgatttgtctttgaaagacttgaagctgacgaaagcgaaagagtaaaattcaaagaccagaaagtaaaagtagcacaaatatgaacagtttcaacctccgacgatttgaacaattcgccggcgacaaactcctccgccgagagtcaagtcaagtggaagaaaaaagacattgaaaatcacagaaaacttttaagtaaattaaaaaaatggagagagagagaggaaacaatattggaatgctcacatgatggcaatgaagaagacaaccgatatactttttctcttcacggatttctatatactataacaaaattacccaaaaaaaaaatggaaaatgcttgaagaagaagaagaacactactcaagtctaggaattacagagatacgtttccaggaaaatgcaaaaccacctggagatttcttcaaaatatgagcagagaagaagattctatgcaactgtgaagggagagttaaatccagaggcagagatgagaagacggtttgtttttgtcgatttatgtatttctctcattagctttctttctcccacaccttcttcacttgccactcgtcggagctcaagagcccccccatcctgcttttttctccatgtatttttacccataggcccagcaaaactctctctaattaccaatgtgcccctggtgacttttctgtttttatttattaaccataaagtttcataaattctagctacaagtagttaatgtagtttgttacacgttgatgggtatacgtgacattgctaaataaataacctttgtgtaggactaatgataccttaataatatattggagtttgagattataaaaagccgttgagattatcactttcctgttaagtattgtcttacaaaaattttaaaaatgtgactttgttgtctttttattggttgtcggcataaaatgacttcgtttgaaacgaataatgtaattttttcgtcgtaatataaggcgcaacgacgtcaaatattgatatttgttttaagttgtatatgtatatatgaacaattccaatggctaaaatctaaagtttatgtatatccgtgtgaccactgagaattttgaaactcctgatcgggaaaacttgcaggtggcgtattggcgttcgtaatgttgagagtaaagctaacttagcttgataggtcatatacttgttattagactataattgtgattccatgttaatgtaagacggattatgaagaaagcatagtatggaaatgttgcatgtttaaaataattaaacagagaaacataatgggataaaaaaaaatgagatgtgatcgcttgaaattgatttgtctttgaattgcagtaactataatgataatggttaaagaaataaagcgtcacaaattcacctttaggccctttttcggttgaaattgatttgtctttgaattgcagttatggtgtaattatgctcttttttgttcaatatacatatgctttagtttaattagtttcacacccatattattcttgctgcacgtggattaccatgattgtttttctatacagctggcgaaacggacggtaaactaatagtgttctttcataagtatgagaccaaaagataacaatacaaacaaacaaagaaaccctcaaaaatataatttatctttacatatcttggttgacaaaaaaaaaacaaaaaattaagatatgaaaaatgcacaaaacttaatagtattactatttttctatacatttcaagcgataagttttactaattcttaaaattttgttttatgattatccagattacaacttagaagggttttggcaagtctccatacatatgcatacgtgggaagggtagacattggtagtggtggtggtggtcctggtggactatgactactacgccctctatcttttcgagagtgcctatataccatgcgttttactctatatatgtaaccatttcttttttccaaaagtatattactgattttaacatttaaatactagtttttataaagtgttttatactgttatagttgctccatgacggaaatgatcaaaatgtttacttatataaaccttgtaaatgtccattcgattcttcttttaaaacaactcacacattacacacacaaaactgcaaattaaactccgatgctaatcaagtccaaacaataacataaccttttttttgtatgtactctagtagtttgtattaatatttgttgctttatatggattagtgaattgtatacgatataaatcaataacataacaaaaagtatcaggaatacattacactaaagttgatgtcaactacccatttgcactatagatcgtttgtctagtgctgtaatgtattttaaaagagcaagtagatcacatcaaatttgttctttaaacgtagtgggaatgtatcatatacacgcctataaacggttttggtatatatgagtgtgttttactatgcaacaaacaaactaagttaacctaatttttgtaagcaaaatttcaaacgaactaacacaacatgatctatgtaacatgtcataattgtaaaagtaagagaggagacgtcttattattggaggtaaagaagatagacaaactgttgttttagtcgttaggtgaattgtctccatgtgatttagttgggaataatcgtgcttcttactttatgttaaaaaatatgtctcgaaatgtccttatctgtaacaataaatgggacagctaaattttccatacacatttaaaaaacaaaatatcactactaaaacctaagtatttatacagtacttttaactaatttttgtttggggttatcgaatgtctaacactttgtcggaatcacatctaaaaaaaaatagtttaacgaagaaagtacttctcagaatctgcattgcttctgagcacataaaataaataactaaactataagcatcaacacactttgtacctatctttttcatttttcaatgcttttaccaataccgtttatttttccctttctcagttagtttccaatacaaattaagttaaacctagactaatatacaaattatatgtgtcgatcaacattactattgtttataatttgataaaacgactgtatattattacaatcatatattcatatgcatttacaaacacttattatatactaaatacaatataacttcataaaataaataaaaagttatgtgctaatcaactaacctgtaacatatactaataatagctttaaataaacacatttaatatatgctaaaatacgaataaattatacccaatagtaattatttctgtaatttaatagcagctattaagttccagtttttttaaaaaaaatttaaatccaaaattgtttaaggttgtgtttgcacaaatggattgttactttaaaactttaaacaagaacataaacccatcattatacaaatgggctgaactaattgattagtaagcccattctatttctcacgtaactcagttattgcgttattggcccaaaccgaaatggacttttcatagacaactggtactctcgtcgtctagctgtgcaattaaagataccagaccaaaatacccttcacgtgatacaaacaacgagaaaaggaaattaataccaacacgagaaaaaatggaaattcagatttcgttttgtgatatatcgaaaagcttttagttatatagtttccaaaattttgaatctattcactcaattaataatccagtacgttattaatatcctatagagattaaaaaaaaaactcacaagaaaagccactctcgtaattaataaggcgtgatttaggttaatagtgtccttttctaacattcaatttaatcatgctaagtaccccaacattggacccgcacttcatagctcatactggaaattcctaattacccttcattcccaaagcgtaaaagcccacaaggataaggatacaaacgtcattacacgaaatgattaaagaataaagtaaaaaagaaaagtcgtactactacttaaaccatcttttaaaataaaataaaaatctaaaagtaagaggtcgaatctatctgaacgcgcaatctccgccgtcaaatttggtagagctagtgaaaagtggtcccacgtctccgataatctatgcttaaccaatcgtaacgtaccacgtatagcgattactttggtaattgtagcgtttagtgaaatcgttttggcgggcgtaattaataaattcaaaatcagagcccaaattaaaaacaaatcaaaaccctagcgcctctttttttgttccatttctctctctctcactccctctttgctcaaatcgattctccctcgcttatcgccatttctccctcgcttatcgccatttctccctccattttcgctctctcgatatcgagcttcctctttccgcctatcgaatctctaatctgaagctgtctttctcgatctggatgtttatcgaagaaggaggtctctgttaatttaggtaataatcattctccgtgacttttttttccttttcgatttctagggtttaaatttgctcgagattctccaacttctttgatttgatagtttattcaagtgtaatcgattgaatgatttggctgaggtttaacttttcaatttcgttatccatcagttaatcgttttttacccagctagagcaaagtctgaagaatctggacttttcgatatctaatttatcataatttattgattcaattctggattgatgattttcatactgctttcactaggtgtatagggaaattaatctattgggaagtgttgtagtagctgttaggaggataaagaaggcatatggggaaggtatctccaaaggatttggattcaaaaacctcggtgaggaaaaagaagttgaaaagttcaagtaacaagtatttaaagccaggggctttggttcagctttgttacagcaaagcatcggctgctaagtcatgtaatgaattagggaagaaacgagtacctgtgtttgatactaagtcctgcaatgatttggggaagaaacgagtacctgtatttgatattaagcatgcgaggaacaataaaatggcagtggaacagttgaattctccaaaaagccctcttatgttgtcccctgtcaacgttgttaagcggagtactctggtgaggccaatgaagtttgatgatctgcaggtggagagtaataatacttgtaagaaaagccctttaatgttatccccaatgggtattgttatgcaaaacactctgttgaggacaccaaaaactccccaagctgatccttgcgtttcagaatcacagcttgagtctcttcccatggatttactggtaagtttttcgtttacatttaagttaataggttctttttggtagtcatctgaatgtatgaagttagttcttataaagatcacactttctgtaacttccaggttaaaatagtttgtcatctgcaccatgaccagctgaaggctgttttccatgtttctcaaagaataagaatggccgtatgttcttctttcccctgtttaagtttgcatccataaaagctcaattttttgcagttttacttgatgtgtattaatctgttttgacttttctttgaaacagaccatacttgcaagacaatatcatttcaattatacaacaccagaccgctcaagacaggaaatgttgagggtcatgaccccagttccaataaatcgttggccatttcgtaggtacatgttttacttcaacttttacccttttgaaaagagcatcaaacaactcgtttggctcataacaaaaccttctttgatctaaattagcagaggagatggaaacccaacaatggtgtcaagcccacatacccccaaagcaccaaaacatgctcctagaccaccctctcgaaccaaactcgcggagatgaagcaaatcactgctgttcttttccaagaccagacaccatttccttcaagatgcatcgttccttctgttctccagaggccgactttgttcaaaccaatggctccaaagcaccctcgagtgctcttctatgaggatgaactatgtcaagctgttgctcaaaacaacctcacctgattacacttagctgcagtcatatcggtttcctctctctgttgatagtaggttttgtcttcattgcataattgatcattgctcttgatgatcatcattacctatagtaagaagcatgcaagttttgtagcagtgctagttcagggttttaggtttacatgggaatctcctagtatcatttaaggggttttcaagtttttactctcttgagtttgtcataataagcgtctttgatttggtcagttgagtcttgtgtatattttctgcatatcttatctggatcagttgcttttttttttttaatataatttgattgcttatccttgctttcatcttattggttattgagttctccaatttatcgtaccgcgattcaaaccgtacttaaatgttaaaccggatattattaaatcgattgaactgaataagattcggttcaagtttggttatatttttcttaaggcctctgatttagttgggcctatttacgatcttacaagcccaaacttattgccgaagatccattattgaaaagtctcgacgcgtgtaagcttactatatccctgttgccaaacaaggcttttgtcccttgtagggccaatcctttatttggctataaataaaggatgtatgtcttctaaacaaacactttttctaatcggagagcttcgaagggttctgagatctcgcggctccttcgatcttctccgctcaactattacctccgatcgttggcttatgtctactgtaacctcttagatttgattttggcgcgttattagaaacccctaacatctttaaactcactcgaggtctctcgtgatcgatctagggtttcgcgagatctgagatttcatattttccgattcaccttcgcaatccaattttttttgttgcttggattttgtttgtgtgtaatcgtgtggtaagatgtctcggtgttttccgttcccgccacctggttatgtactaaacggaatccgcgatgaggctgtgatcgtatcatcgatcaaggtttgtttgagcatttaaatctcggttttgggtttcgggttcatgagatttcgaatgctcagcttccttgtgtttccagtttctggtatcatctgtgttctaaggtttactaaaaattgttggcttgaaagatgggggatagagaatgttgcgagattttaattgaaaaagatgatcttaagttgtacttaagtaaacaaaaagcacgcattcgaatcaatgtctcaatattaatcgttcgcttaaggtggcaattttaatcaaaaagatgcgagtcaagcacattcattgtctactctaatcaaaatgtgtaatttgactaaatgtgcgaacaccacttgtttggagtttaagggctggtctatctgagggcttgtttctgtttttttgtattgaatttggcaagttctgtgaactaattgatgttgattgcttgtgtaaattcagggggtggaggagaaagctaagaaagaacaaaggaggaaggatagaagaagtgataagaaggataaaaaagataagaaggagaggaaggagaagaaggagaagaaggagaaaaagaggaaggagagggaaggaaaggaagttggaagcgaaaagcgcagtcataagagacggcgtaaagaagacggtgctaaagttgatctttttcacaaactaaaagaaagtgaagtcaattgtttggagaagagcagccttactgtagaacgtgagctgcttcagtcgacgtcccaaaactcttgtgatagcactcttaacagcaatgagatgttaccgaagcagaaggaggtccagcagcctctcgatggtagacataacaacaacaacaacgagaagcgtgtggagaagcagcagcctctcgatggtagacataacaacaacaacgagaagcgtgtggagaagcagcagcctctcgatggtagacataacaacaacaacgagaagcggattgagaagcagcagcctctcaatggtagacataacaacaacaacgaaaagctgatggagaagcagcagcctctcaatggtagacataacaacaacaacgagaagcggattgagaagcagcagcctctcaatggtagacataacaacaaggagaagcagaaagagaaacagcagcctctcgatgttagacataacaacaacgactctggtgagtttgtttgtgtttcttccttccccggggaaggatcttgtattcttgttgggtctaattaccttatcaggacattgatgacattctttcttcaaattgttgatatgaatttgaagaaagcatcattcggattcgattgcctattcgaaggcagaaagatcccgaggtgatgatgaccaataaggatcaagaaaaaccaggtccttctcggggaataaagttagactcgtcccaacttcctactagagagccggttaatcaacatccttgttccacttctgcagcagaacatgcttcgaagccacgagaagagaaaaggaaagatcccatttttagagggaaacacggtaaagagaagatatcctcatcctctactcgagaaacttatcaacctcctaaaagcctatgcaattgccctccatccatggtgttgcaattcttggacgtagttgagaattgggtccctaacacgatcgagagaagagtagacctcattaactctgaagatgaagaatgttggtggtccatgaagaagccgccaagtagcaccacagaaatatgcaaacaacttaatagagagaatgagatcaagcaagtaggcaatacaatggggtggccatgtgctcgccttttaccagaagctgatgtctacgccttaccttacacagtcccgttctgataacatcaaagagcaggaagtttttaacaaggaatctggtcgagacatccatgttctggaccagacagttttttggtttagccttaaaattccaaggttgtataagaagaacacactgtttgttattctttgcggttggtaaccaatatagtaatatcagtatttcgtctcaatctctcttgttcttataataatagaatgagaaatcgaaatggaattttcatgtgaagtggattagtaacattatcacaattgataaaacatttgtaaataactagacaagctttctcggctatcagttaaaatagaagttgaattaacctcacaattcgttttgtacggaactaagagatcacaaatgaaaacggaaaacaacaacaaaaatgaaaaagcgatacttttttaaaccaccctgtcatcctcatctcaaagagcttcttgacttccatgagtgctattacaagatggagcaggccttttgtgctttgttcttctttttcttctgctttggaggttgaaggaccactctgatcgctgcatcaaacacgcccttcacgttctgcagttatagtcacattgttttcatcaaaagatgaagaatccaacaccgaaaagatgattcatgagatgtcttttattcgtttacctcttgtgattttgaactgcactcgatgtaagctggcgctccaattagcttcttcagctcctctcccttccatgcagagagggaaaatgcttaacggtggtaaagctgataaaattgcactgaggaaataactgtattcttacctgaacagtggtaatagggacagcaccaggatggtcgatgaaaaactgtttgtcatctcgaagatctgacaacaaccaaggttagacaatcaaaaaggccaggatcatgagttgactgaagatcttgcaagtgtcttttataaaggtatacacttgctatacagtagctatttcattggaggatgcttaaaggcgtgtgttataggatatggttgctttatcacaagaagtgcaagatacaagaagaagcctgttgaccaatgatattctctgaaaactaccctcagtttcacctaacgaatacatcttgaacatgtacaagttttaaccacaatcaagagaaggtgaagttttatgtccactaatgtcatgatatattataccagagcagcttaataaagtgaaaaggaaaatggcagtgtaagcatgggaatcagacatatatataaataaatgcataaacaaggacaaatgtgagaggaggaagtaacctagtttggttccaacaaggacaattgggacaccaggagcatagtgcttcaactcaggaatccactgtaaaagaaaagaagcatcaaaatttggaactctcaattgttaaatagtcgaccagttcggacgaaactgaccttcttggaaacattctcataactagccttactaatgagagagaaggcaagaatgaaaacatcagcaccacggtaactcaaaggtcttaatctgttatagtcctcttgccctgcataaaccaaaaacataatttcgaccgattcatcaaggaaagctctctcaccaaggattatgaattggatcatcattcattacctgcagtatcccacaatccaagattcaccgtggctccattaacaaccacatttgcactaaagttatcgaaaacagtcggaacataatcctgttccaatggaaatgtatacaacatttttagtatgtatggatcccaattcatatatggcacaatcagaatcaaatgaatcagatatcaaaaaaaggagggagaatgattgatgaataccgtgggaaaggtgttgctggtataagaaatcagcaaacaggttttaccaacagctccatcaccaacggtgacgcactttatgaaccttgatgcgctcattgcctcttcttcttcttcttcgagccaaaatatgtcacaatttaccaaaaaacaaaagagatcaacctcagatttaaacctgaggaagccagaaacacccacaatgtgaagccaattcctccgaaacttcgaccattatctttcaattaaccatctcaaaaccctagatatgtataatgtggaaacaaaccccccaaatagagaaaatcagaaatgtgaagaaggaaggaagatgaataaacaaaagggaacgtgaggacgatgaattggaggatgcgagagagagagagaacaacaactagagagagaaagaaagaagtagagaagaaagtgatggccggaaataattgccattgaagcgttcgattaatctcagccattcaaccttccgactgttttgcaatctttttactttttttacttcttctgttgtcttttaaataattactattttacttcttcttcttttttctgtttgattttttagtgtatattcaaattaatttatttatcttgtatacaaaaaagtaaaataaaggagttgcacataatgtattttgtctttgttgtttaaaatgcaaataagaaaaattaacactggctaaaattatacgtgtttttaactgtctgtaaaatttctagtacgatttgttttactattctaattcatttttttactagtttttccggatgctcaccaaatgtgaaaaaatctctaagttatgattcaatatttatgaaaccaatcagccaattgcggtacaataaagttgtaatgcactagttcttccgcatactcgccaaatttatgttaaaatttcaaggatgtttgatgatattgaatgtggttagttgaatttgcatgttggctagtgagaatgtggtgtatggaccaaacctgaacttatttgtatgtcaacaaagtgtggtaatattttctgccaaaaattgcaataatctcaactaacaaatattttaccgagtatgtaaaatgtcaacattggtcatatttgcctttcgtgaggaaagatgtctatgctaatgaacttattcgggtcaacgtaaccttccttgataagaaaacctgcgacagcgagaacaaaaacgttaagagttgggaatctttcacaaaccatgtaattaatttgtcggaaaaagttagcatttgaaaatgttcaaagtaaaagtttttatttgatgtgtgtacgatgatacaatcacagttttgataaaccaggattcgtggagttggaatcagttttatcaaatcaacattccaaaattactaacaagtttgaaaatatgcaatgacaaaaaatcataaaaatcataaatacacgagctacatatggatgaatgagagagttaatctataaaatccgaccaaataactcaccaagtctacgatttattatatggcttttaacagagtaacgactgagagagacatataagaagagcattgatgaaactaaccctgaacatcacggcgagtagtcaactggaagtccaagatgataccccggcgcaacaagcccgctatcaccgccaaaggttgccgtggatcgtttgtcgtgactgtgacggatcatttatctcttctctctctcacctgtaattgtcagaaacagtttagatggcagaaatttctcaaagataaattacactataataactctctttaacattatgactacaattcccaaaatcaagatgtttcagaaaatacacggctcaattcgtcaaacaaaaaggagaaacatcagattcttaccaaaccctaaagcagagtctcaaagcagagttcttgattacgatgatagtatataatgaaatcacggggaaattgggtgaacgctctctgtttttctttctttgcgttggttgtagtgaagcttgatgagccttccatttctagctatttgcttggagagaaacctgcaagaacactcgaaaaagaaaacagaggaagatgtgagtttagacaaagtgaaaatagtatgatgcgtaaaactgaaactgacgaaactttagtgagaagaatagaccatgaaagtgtttcgatcaacaacataagtcgtagaaaagtaaggaaacatctaagaattcttaccaatcttaaaagcagagttcggctagtgactacgagaaaccttggacgaactttgttgagaggaatgaaacttgctctcgattaactttggatgaactttgagctctctgactctctctctctttggtttttcaactagaaaaaagacttttgctttctgaaactacgagaatagtaagcgattatacagaagaagaaatgattgtgggaagtaagtgagtgagcacgagccacttatataggcagcttcggatttcttctttcaacggctacttttctaacgtctatattttcttaccgttgtaaattttgcgtctcaaataagttaccgtttgtgcatgaggtgacaattgacttgacaggttgacaccgagatgaaaattacacaacaacaaaaactagaagcattcataataagcccaatgggccaatagagacccaaccaaaaccccaaaccaacaaaaaattaaggacactgttcgtcattagtggataattaatattttagtgtaacaccttcacaacgatcgtctctcaaggtcaaatagtaacttagtaagtagccctcttgatacgaagtaggaaccaaaacgcttgtctttatggattagaatgtttgtcatatcttgttcaaaactaaaaatgtctaaaagttatcttgtttttatttgttattacaataacgaaatcatttcaatcaaattgatctcaaacaaccaatgtagtttagtgttaggtagaatcttcttccgagatagttatgccccagctctgcttgcgacgggatggtaactaaaacttttgaataaactatagttgcatagatgaaaaattgaatatatgcgaagattagcaaaagggttctcccataactatatttaatactttgctttctccatatgacaaaacattcttctcccctaaactcttcttcaatcctatttatatattcatccttctgagtcattcttcaatcttattcatcggtctgagttattttgcttgctctttgaaattctgacaatggcagtgaacgttgatgcagagtacctcaaagagatagagaaaactcgtagagaccttcgagctctcatctcttccagaaactgtgctcccattatgctccgtcttgcgtaagatctttgctctcagaatcattctccgtttttctttcttgtcttgatgtttccaaatgccaactcttctgtgcatatagatggcatgatgcaggaacctatgatgccaagaagaaaaccggaggtgccaatggatctatcagattcaaggaagagctaaaccgtccacacaacaaaggtttggagaaggcagtcgccttctgcggtgagttttatgattaaaccttctaatccgttactactactcttcaggacctgcaagcggttgctgtctcctttgatgtctaaattttggtttctaatttcagaggaagtaaaggctaagcatcccagagtctcttacgcagacctttatcaggtaaatcaacattggtatacagcatctcgaagccattaaactcataaatactctcttcccccttgatggttagcgtgacagattctttcatttcatttcagctcgctggagttgttgcagtggaggttactggcggccctgcaatcccatttacaccaggccgtaaggtagttacacttaccgctaaagcgtatgcgttaaatcatcgttgctaagtgagtttactaatgttgagaaatatgataccaggatgctgattccgcggacgatggagaacttccaaatccaaatgaaggttactcctgcagcttgtagctcctgcaacggaattctatttcacaaactgactaagccctccttttggattattgcaggtgcctcacatttaagaactctcttctctcgtatgggtctattggatagagacattgtagctctctctggaggtcacactttggtacttattactaactatccttcaaaatatccgccagtcactaaacatgctccaatgaaccaacttggttgctactttgtatatagggacgtgcacataaggagagatcagattttgaaggtccttggacacaggaccctctcaagtttgataactcgtatttcgtgtaagccaacgataaagtcacacaagagttaaagcgagagagagtgagagttctgaaacttacattttttgctgattggtttttcagagagcttctaaaaggggagactccgggattgctacaacttaaaaccgacaaggctctacttgatgatcccaagttccacccttttgttaagctgtatgcaaaggtagattagatttcactacgattataagaaacttttactttggatgattctctggtttcatcaacaacaaaaatgattttgatgtgtatgtcaggacgaggatatgttcttcaaagcctatgcaatttcacacaagaaactctcagaactaggatttaatccgccaagaagaattccttcagcagtgacgcagcagacgcttggaatcgctgttgctgcagctgtggtgatctttacaatatgctatgaagcaagcagaagaggcaagtgaggaagtttcgcagatgcaataagggacgagagaaaaatgttaattgaatgtatgcaataaatacaaagattcatgcaatgttacctccatgctccttttcaagcttcagtgctttggacaaaattatggatgttacatcgcagtatgtgaactctcctcaaaaacaattactactgttaccaaattaaagatacagagtctaactgagaaacgaactgtggatgagaagactaaatttcttttggaacaaccaggaatatcaatagctgattaggttgctataaccttccaacttttgatgactcatggtttccataacgaacaatctgactcaagaaaccatgttctgtgctcgggaataacatagaaatacacgataagtaaatactctattcaagaaatgggagatatatttatctcgaagtagcagcatagcatttattttttcagaaacacacatctgagaatacagcattaataacatttgacactatcatgggcgaaatcaaaagttaaaacttgataagtaggttcctcggccacagatacttatcctgtaatccactagcatatatcttatgagaccctgacaagtggagaaaaactaaaatcaaagtgccctgaaactatccgttttatctagcctggcagtaccggagcttgatgattcgccaagtggatcaggagaagctgctctagaagagtctcttcctttcagagaagttggcattccagagatctcctataaaaaaagtagctagagtcatcatcctaaaagtggtcatactcaaatcacactagatggctgaaacaattcaataacttaccttcatcaaatgcaacctcatgtcagtaggacgagtatggttaccaatgcaggccattgcaaacttggaataactaaacaacacatcagcagcagcttgcttctgctcatcaacctataagatatcatcagctcaactcttcaataacaattacacaacaaactccaaaagtcatgaactttggttaagaatcagaaacagagaacaacgaagctacacaggattccgatttaagataaaagccaaaggactcatctaagactaatcatgattcttattgatcaaaaaggaagtgataccattcactaataatcctaaagctcagatttttataaattggttttccccattccagtaacattgaagaaaccataatttgaatacttgttcctttaaacaatgattcaacatcttgatttcatggcgcagattaaaaatgacacagcttttacatccgatttgatccctaataatctgaatttcaaaacatagaaaaaattcaataaagctgaagaattagaaatcagaagtcgcacctcgtattcttctgtcattgtggagaagcgtattcctctgtttggctctcttctggtcttgtgtagaagacagctaccacaaagtgacctactttacctaatttggatctcagcttcgaattcgagaaacaccaagctcgctggttcgaattctattttgtaggactattcagatactactagggtttgattgataatttctcttaaattgtggggctgaaagtgaaataaacactattttacttactgtaaaacgccgtgtattttattccggtcgcataaaaaaacgacaaagcttgtgacatcatcacacaattacttgtcctatcatgtttttgatcaaaggtttttctttttggttttaagatttgattttgttcttattaaatcggatcagtcagtatatacaaatacagatgacttattggaaaggtttgttcaattttattggaaacttgcgagatcagggacaaattatactcactttatatgctatttagcggttaccaattcaaacacattatctaaaattgtataaatatttgtataaatctcatgattcttgaagaagcaaaacacttttgcatcaacaacaacacaacacaacaaaatctaatattttcaaacctctatggtctgtttaatgcttatgtaccaaggcaatgatattgatatacaaacaacacaacgtccattagcctacttagaactttttttccccttctttctctctttagctgccgttttaactacggttttagcgagtgatgatggcttcatggcactcttggggttaagagcttgtctaatcttgaaaacagtccacgccgttccaaaagcatgccctgctgcgctaagcccttcgtttgtcgcttgtgctgtctttgctccatacctacaagtaacatccaaacattaactatctttttggcatggtatgagcacattctcttgtaaactttttcagttacttacttgtgatcgacgatttcagtagttacatctgaagttgttttcataacgtgtcttcctgctacttcgacagcatcacaaaccttgtctgtcacaaatgggtaaacaaatctttattagtttcaatcatcagaagcctaataaagatagataagagatatacgatatagtcaacttactgaatccatcaagtgttgcaagaaccatttctccaggaagaagcccaaagagtttctgcccagctttgctatttatcactgaactcgagaagaatccagaaactttaacaacaccagagagcacaccattcgccactttctctgtcatttttgtcatcttctttactctgttacatatataactcaaaacctcgataaaaagtttaaaacacaaatatcaaagataagcaaataaaggtcgtaccttttgagacgtttcaaagttccaggactaacttgtctctccttctctgctttggacaacttcttcttcatgaaatcatttccccacatgagtctatccattgtgagatccccacaccataagatccctttaatcaattgaccagaaccagcagcgatcagtttcgctgcaacgccactgtaatcctcaacattcggagccagagtcgtccaataagccgtacactgcttctccaccatctttttcctctttcccttcagctcctccggtgaagtctccttcgccgccgtcaaatccaaaacgttctcttctttctgtttctcctccgctgtgaaactactgtaatcagctaagatcttgtctagcttctcaagcatcggttcttgacctttcgaagccattgttaatccgtagttcaacatctcgttctctgtttcgttgactgaatgatccgatgactcggattctttaacgggtcggagcgagaagaagtaatgagactcatcgactttaacggcgggttcgtctttagtcaacggccattggatctcgtcaccgacgcgagcgaaaaccgcgacggtgatatctccttgaacaagacggagaatctcgagatcgccgcaagcgagctctacgctgtaggatttgtcaatgaggtggaccatcgcgccgtggattgtgagaatcacttcctccgtcgcgagaggaggcgctgaagctgagtcagaggcggtgggatcggggaagatattgttgacaagatcattgacattgattgaaggatagagattattattattagtagaagaggaggaggaagaggacttagggagaggagcaacggtggttgaagtgtcgacggttggataaagcttgggaggagttgcagagcattccattatcgccggtgatttaggaggaggaagacgaagggggaatgaagaagaacaagtgtttggttatttatatgaatttgaaaaagatttggggcagaaatagaaaaagtcagaagattagtgatggaagaaagcgaatctagtttgattaactgttaagtaaccttgctgtcggagtctcggagataggaagacgtgggcgttgcgtgtttcaagaggagcatactttttgactatgaaccgggccggtttaaccttttttttaactattttaggagattttcccgcgctttatccaaatattaaatttgtttatatccaaaatttctttttgttgagtgtatattgtacatttgtttattgttttgccaccttttttagtgtcacactaaacaagaattattcaagtaattaagatgtgtaattgactatgataatggtaatctgtattgactttgttttgccaaatgaaattctatttaacagtaggatcttacctaaaccatggaggaaaactttggtttttttttctattagaaaacataaaaggcaaaaaaaatgattaaaaggtataatcaattatgatgatgaaaattttttcttgtataaaaataagaataagatttaaagggatataacacttatactattttttgtataaaaatatatgtctactaaaaacataatattctgtcacatgttattttctattttgtttaagaagaaatcaattgcataatctcatatcactctatgaagtacaattatttgaaaattaaataatagagttttagatgtcaaaaaaaaaatcaatagagtttttagagtaattaaaactgtataaataagtaagattaagaaaatctatagattttaaaaaaaattgtgcaccaaatctaaagagtgaataagatttatttctaacatacagcttttatcccttgacaattgtcatttgacttttgagttatagcagttgtgttgtcatcttgtgtcacttttaatattaaattacaaaacaagtcctcaattttaaaataattaacatcagtgagatcagaatctaaatgttactgtactttacagttgacaatttaattttcactgtactttgtttgacccccaaaaagtactgtgttaaaaaggcaaaaaaaccaaactaaagttcgccgggaagcgaaatcgtcatcttccctgttttgctgtttagtctgcaagagaaatttcagattccggcggagaaagctataacgattcttcaatggatcccacttcttcttcttcctctgctcttagatggaaaattcttcgccaagcgcttctccgtagatctggttgatactcccctactccttctccttcctgcatccacttttcgatttcacacattcgcatagctaatggatcatctttcaattttcctcagattctcaatctcaaactgagaccaaacggatttcaaggaaagcaactcaaggattcaacttgattccttgtcaagtggtggactcttctcctcaatcggataagtctcgtgaagcatccgtttgctacacacttcccatcactggctctcccaaactctatctaacgttaggattttgatctgaagttttcatcaaatgaaacaatgttatgttttgttcgatagatttgccactcctaagagcttctttaaaatatatgcagacaaagagtggataattgtagtgatctcaatgacttcgagatatctaatcgatacaacattgataatactggacttgtctgtaagttctcaatctcactgtatctctctacttgtcacataaattagtgtctttgttggttttgaaacttagtagtacaatgttgctgctctgctctgtgtatttggcttgtttgcggctgatacaatcgctaaccaaactatatctgcttaaacttttagtctgtcaatatacaacgtggcattaaccatgattcaaacaagttaagaataaaaaagatttagttgcttagggaactctaatgctatctaaattgtgattctctgaattc

SEQ ID NO: 675 - DNA, 106007 bp, Arabidopsis thaliana
aagcttcgaatacttcaacgctctcgtcctccgtgattggctaatccgtggccgtcgtctctccgagtcggaatcggaatcggagtcgtcgcttactttctccgacggcaattccacttctcgtatcagctctctcggattgttagtttccttttgctcacaatttttgataaaacttctctgttttaggataagtctgattttattttattttctgtttcaatttttctgatatcagtttgcattacacgacggtgaaattgggtactccgggaatgagattcatggtggcgcttgatacaggaagcgacctcttttgggtcccttgtgattgcggcaaatgcgcaccaaccgaaggagccacttatgcttctgtaagtttaacactttaagcaactacacagttgttgagtttactcatcttaccaattgaattatataagtttccatcttgattttgggtttcgatttgctgtgtttaggagtttgaactcagcatttacaatcctaaagtttcaactacaaataagaaggtcacctgcaacaacagtctatgtgcacagcgtaatcagtgccttggaacattcagcacttgcccttatatggtgtcttatgtctctgctcagacttcgacatctggtattcttatggaagatgttatgcacttaacaacagaagataagaatccagagcgtgttgaggcatatgtcacatttgggttagtagctgttagcatcttagcaatggcttcttgtgtttcagttcaatgcagcaagttcctgaaaatgtgaattatgtgcagatgtggacaggttcaaagtggttcttttcttgacattgcagcaccaaatggtttatttggtcttggcatggaaaagatatcggttccaagtgttttggcgagggaaggtctggttgctgattctttctccatgtgtttcggtcatgatggagttggaaggatcagttttggggacaagggtagttctgatcaggaagagacaccgtttaatctcaatccttcacagtaagtggtgattcacttatgcgctaaattggaaattctgttcctttgtggatggcacctttaagccgtggttaaattcattgttgcagtccaaactacaacatcacggtgactcgggtacgtgtggggactactttaatagatgatgagttcacagctctctttgacaccggtacatcatttacttatttggttgatccaatgtatacgacagtctctgagagtgtaagcatctaaacaccatcatattcgtgtttcttccgcatgatgctgagttttgataactctatgattcacattatcttcttcagttccattctcaggcccaagataagcgccattcaccggattcaaggattccatttgagtattgttatgacatgaggtatgagtttgtatctatccacgctcaatgtctatttttcattgtcactcaaatcttaacatttttcttgtaaacggtgtgattagcaatgacgcgaatgccagtttgataccgagtttaagcttaacaatgaaaggaaacagtcacttcaccatcaacgatcctataatcgtcatctctactgaggttatactctctgtctacttctttctctattgctccgtctcttcttcaaccaaatctgttatctgtgtgctgatactattagaatctctgcatttcctcagggcgaacttgtatattgcctggccattgtcaaaagctctgaactcaacattattgggcgtaagatcagtttttcttcctatcaatcatggaacatccgctaaataatgacattgtttactcttaatgaaacagaaaactacatgaccgggtatcgtgtagtattcgacagggagaaactcgtcttagcttggaaaaagtttgactgtaagtttcctcttacgtgtgttatatatcactaaaaccctctgtttcctaacttatgatctgtgaatatctcttaacgcaggttatgatatcgaagagacaaacacaactgttgccggaacaaacaaaacagcagcggtagctccagcaatggcagctggaataaagactcataacaattcctcagagctacacaaaacaaaccaaaccatctccaaaagtaactcctccccaaaccaaatatccaaaacagtagatgtatggtcttttttcagatttgtgttcatattacttccacttgtgtagatttgtaagccccatccaaaacacatgccaatagtattttttttgtatcataacgacactatagggattttttcaggaaatatatgctcttcatacgcatcttactatctttgcaaattctcgtcttttttctcttcaataatgaggtagttaaaccgagataaaccgaaccaaaagggaatttggctgtaatgttgaacgccgaatattctaaaggaaattaaatgggttccacattgataacctgcctcggcaagtggccaacgctcgacacttttacacgaccgagacaatgaatctttcattttttcgtcattttattctaaaattccaatattggttcgagtcttagatataatttttagtattggatttgaaaatacactcattaatcattgttaaatatactaaaatcactctgatagcattgtttagtatatcatcatatgataatgcatcgtttgtccatagttaaaagttaaaactgtattctataaactgtaaatcgtgtgataatgttaacatttacagactatgtatcaatttgattattaaaaagcaaccaacgactattatgaatatacagtagtttttggtgagtatgaatatacagtagtttgttaagatagttttgaacaaatccacatttttacgatcatatctcataataaccataaagccatatatacattgctatttatcatatccaatgactaaagtgaatattgttaaatatgctagtagtatttgttaacaaatttatcttatgcatatattaatattatatattagccttaacaacaaaaaaatctatgacttgattttttcccatatatactaattagaagattatgtaagaaataagaaaaaatggatactgtatccctgatttggaaaacagagattttaatccttctataaatattttcatttatttgcaatcttacaattacatatgttttatataatggtatatctattatagtataatataaattcaaaattaagtcgaaagttgaccacataacttagcgtttttctctcttcggaacttttttttttgtgtaatttaatttatacaggaaaattaatttaggggaaataaatgatttaattgtttgacctattttaagagaattaaaaaaagaaagatttttttatttttgtgaaaagattagatcaaatcttacatggtaattttctaatgtcaacgtcaacaatcctgccattagctttttggccaatcagattcatccaaccaaagaaaaacaaaagtgtgtttttttccttgtgtttacttcaagggtaatttagtaacttctaatatccgcggtagccaagtaaaaccaaaaccaaacgaaaaaaaaacaaatggaaagaacatataaaatcgaataaaaaataaaggagagagagagagagagaagagaagagaagaggagactacactgctccatcatcttctccttctggggatttttttttggaaaaatcgttctgttaccttttttttgcccattactcaaaccctaaccctaattttctgaaatcgcagagagagagagagagaggtttcttcgaattctttcatcatcaattcgctaactttgtttttttggggttaaatcgattaatcgttattttattagatactgtcgatcggagctaatcgactctctcttaacaaaccctaattttttggtcctctctcatggcttccgccacttccaataaccctgcttcttcttctatgtctcctcgtcgtatcagcgggaatcacggcagccccaccgcttccgtagcacaatcacctcgccgtccttctcggcaggtttcttctccgtggactcaaatcgtccgcggcgaatcagagccgatcgccgccgccgccgctgtagccggtccttcctctcctcaatccagggctccgatcgagccgattgcttctgtatccgttgctgctccaactgctgctgttttgacggtggaggcggcggctggtgatgagaaatcggaagcatctggtggtcaggacaatgctggaaagaaaccagtttggaaaaggccgtctaatggggcttctgaggttggacctgtcatgggagcttcttcgtggcctgctctttctgagaccaccaaagctccttccaacaagtcttcttctgattcgttaaaaagtctcggtgatgtaccatcatcatcgtcagcatcatcatctgtccccgttactcaggtacgaaacgattattatgaccttattgattatgtggttactgaaatgcttcatggaagtatagaaaagtttgagcttttgcatattgactatttgtgtcgtattgactataactgtttatcatagagaataatgtaaattcttggtttgtgaatgaatcttagcttaagctttttttgttggattttgtatactgcaacttcgttatctgaatgtttgttgactaactaggataaaggcagatgcgtcttaataccttcctgtcggattgtgatgcatattgagcatcaatgtataaaagtctttgagtagtttctgttcaaagttctctctttttatttactgaatttgtaatgtcgatacttaaatgcttattttgatgtacgccttcatttatcagtgtgttatccaactctcagtaattctatttatcctgattcaatagtaaagatgcttctttgtctttaatttagggaattgcaaatgcttctgttcctgcaccaaagcaagctggccgtgcaaaccctaatccaactccaaatcactcgcgccagagatcatttaaacaacgcaatggcgcctctggatcagctaatggtactgtttctcaaccatcagcgcagggttcatttaccgaattgccttcgcacaacccttctcctagaggccaaaaccagaagaatggctttgcgtcacaaaaccatggtggtactgaaaacccatctcaacgagactcctacaggaaccaaaacggtaatcatcaccaaagtcacggtggcaggcgcaatcaggagcacgggaatcaaaattggacttttcaaagaagttttaacgggagagaaggaaatgcgcaatcgcaaagaggtactccagcttttgtaagacatccatcaccaactgtgcagccaattcctcagtttatggcagctcagccttttcccagtcatatacccttccctactggtgagacacattgaaaatcacgtctttgaatttcatttatgatttgctaatgcgtcttctccgtttcagaattggcacagtcgtcgtattatccccgtatgccttacatgacacctattccgcatggtccgcagttcttctaccattatcaagatcctccgttacacatgaaactgcataagcaaatacaatattattttaggtagtaccctcgtatttaatttctcttattcttctcgacgatgaaattcccactgatcaattcactatagggaaatactaatttagatgcaaatgtgtcttttgttacagtgatgaaaatttgattacagacatataccttcgagggttcatgaataatgagggttttgttccgctacgtgtggtagctggtttcaaaaaggtaaactagatgtattgtctttcatactggcccagttcacttctctccgtttatattataaacagtagaattaagagtttcatttctgtataattcaacaaatgttttttttactgattaggattaaggcgaatttgtacttactacttagtccaataggatctttgattcttttgtgactatttatataaagatgtggcatgcatgtacaaactttcagcaaatggatatgctcttaagatagttgaaatatgttaacagtgggcatgtattgagaaattcgattgtgaatccttcgtttgttcttatatactgtgttgcataatgttgaacctgaacaagtaggacttattagctagctgcacagtaggctctacaccaatttttttttgcttttctttttccttatcctagttactataacattttgttgctttgtactcgtcaagagttctgttattattctctgtgaattttatctatgttttgttttttctctctcctacttcaggttgcagaacttacagataatatccagcagatagtggaggctcttcaaaattcacctcatgttgaagtgcaggtattttttgtattatgtgtcctttaatgtgtaaactattgaattccatcgtctttccttgctagtagtatggtagtgtgtgattgaacttaaacctttctattaggtatttgattttgattattctgagagatagcttatcaaaactggtggaactgaaaaaataatcttcgtgttacctctttgtgtgcttggaaaacttttacctttatttaattggacatacttttttcttcttctcagggtgacttcataaggaagcgcgataattggcaaaattgggtgctaaggaggaaccctacaggttccggcccccaatctgttgatagggcagatgcagtggcaaaacgacttggaaacttgtcagttgatcagagttcggctgatcccattggtggttcgagcagtcagttgcaacctacagaagctctttcagatgatcagcaacagtcttctagtactgctccagtgagcaaccacaacgccccagatggtgcaaaccgttgaaccatcaagtttgggggctgttggttagtgttggacatgaatatattattttgtcttgcccaaaatgaggaaaacaataatgaaggggaatcaaaaaagaaagaaaagagataaaagcataaagagaagagacgcatatgaaaaaaaaaaaaaaaggatcaaacatttgtgattcttctagctagcggaaactttggcatatttatgggttctttttttttttggttatttttggatgctaataacttttttttatgtttatgctacatatgctatgatcattattatggttgcttgtagccattgttatggtctgggatttattggttttgcttgctaatactctcttataacccctgttactgtttttttgttctgttctggatttcaatatttcgattgtttttatgggtttgagagagttaaaataagaggagtagactcgtgaatctcttctaattcttcaagcaaaaagaaactttacttgagagaaagacttgtgagtctcttataccttagcaacttcgtcggtgtgagaaaaaaacaaagtgtacctttatttgaatttctatacctaacattgtaagacgaacaagtaacacgccaaaaacatgtacaaaaacggcagcgtcttgtggtttgctttgctgtgaacatgaagcaaacacgtgctttaacgctctactggctggcattgtactgctgtgttatgttgtgtatgattttgaatggaacagtaaaccatttaaaaaaatacaaaaattggagagtcgctatgtaattaagaatttaaaagtaataacattaaataactgttcttgtatttttcagttcgatcaagaaataactgtatttttatttttatttgcaaaatcagcctaaggcatttcgtatgttacaagattatttaaacactaacttaccaaaacagcaaaaaggttaatgtgtcttataaggcatttcgtaagtatgatagtttataaatagcatggattctatgttttataaaaataaaataacacaacttcatacataagtttaaatacaatgtagcaaaaaggttaatgtgtctattcaaaagttataaataattcatagtgtgtatagcgttttaaccgtgaaattttccctttgttatcatcagttttcacatgtgtgttaattcatattgaaattatttggttcactttttgactagttaggtacttacttatttctcataaatgttttacattattgcagcgaattaagcttaacgtaataacagtataatgtagatctctcgtaataatgaaagctgacttttctacacctaaaagtctaagacgatctagttatccaaggccctctctacttgatttagtcataattatatctaattaaacactcacataatatcagaatattctatatgttcacccaaatgtggaaaataatcagaaacggcccaagaataggttcaatgtcacaatccatgcgaaacaaaaaatcagaactattcttgatagactaagaaaatagtaaaccctaattcacaaaacacaccaaaaatatagaaagttgtctcaattattcttaccattttggagatgtcaagtacacaatcccacccatcttgactatccaacggttagcattcttttggctctttcaactccaagttttttcctttatttatttttattgctaattttagcagtaaattattacgtctactttgcttccgtacggtctagagacaacctacggacagatgatgattgtacataccagtagacttacagaatccaacggttattgaactcacgggtcattcatattgttcgttggattataaatttgaatgtaaacgaacatgaataattaaaaacaagttgagatttgtctcttcatcaaatcaaatcacttgtccaccgagttcgagtcttttttcaagccaacgagtctatcttaaacccttttacgtctctaaatatatagagatgtaattagtattttatttcttcaccaccaaacaatgttttataattgtaggaaatcgagatatataaaacaatgaattattttgcacttactacttttggtaggcatatttcatgttgtatgatagtccggaaaattttatataacttgctaaaacagaatttgtttccatttatatgcattgtttaaaagtaaactaaagaggatattaaaagacagagaaatagatttgatggagtttgggacagagcaatatagtgctgacacctgtccaatcccctgagacgtgacatgtcacactcctttcttatacaacttacaagttctctgcacaattttatgatacaatggacatttgaattcactcgttacagactataccccaactttattttgagtttattttgcaaaaatgatttgagactgggaaaatttgttttattttcgtcaatgaatatgcgtagtgacgtcgatactaacaaaagtactactctttacattcgaatttttggtggttgcgaaacgacaacaaagatctatgaaatttgtgtttcacattaaaaactcaaaatgtattttgaaacccaatgtttggaaacatgtaaacaaattaaagtctttgtacttttcaccaacaaatggaaaatatatatcttctaacaaatatgagtatttgaggagcttgcattttcgataaacagctcctaatgtagtactctttgcatgttcaaaagatgggacgtttccttgagggctgatttcaacattcagagaaaaaaaattatatacatgtacggaaatgaatagttaatcttgttgaatagaataagagaagaggaaagaaaaacaaatatcgtatgttattatagtttatatataatcaacttgcaataaaggaaaaatttgaaaagcgtgactagatatgcacttggagactgacttacatagtagatacgataatcgaatatctagatatctggatggtactcatattatttgtttattacgtatgatcaaagatttattaatatgtatcatcttctacttggcttaattattaactagtttagtattcgtctctaatcttcaaaacaatcaacataaatatctaaactatattggtcatataaaatctaatactttactatccacttgtaatgtttgttttgttcagagttggagacccacataaattgatttccctatccgtattgtaaaacagactattgacactttgatcaaatctcgttggatgacatgaacaccaatgatttgaagtggggaacaattcaatagttaacaatatttttgttatttaaatgcatttcaactatacggtcgatattatttgaaatgtttgcaactacatatttaagaaaacgttaagtgcaaatgacccgttcttaaacactccgaatctcatataaaataaagtttttttgtactaatcaaacatataattttcagacttttagttttgatagaaacaaattacatatacgaacacccaagtactactttttatattcgataatattattctatcttcgtttaaaatatattaaccacatcaagaaaagaggaatgaaatattctaacggaattaatgtttgctgccaaaaacaaaaaaaaaacagaagaaatttttacatttgagtttattggtatagtagttaggattttgtgttttattatatatttaaacgaatttatttaattatttctaatacagaaagatgtatatattcttatctactttcattttgtttttaatgttttatttcgtcaatacccttaggggaaaaaagtgtattttggcaaattttccttaaatctaagagcaagaacaaaaattaaagtcacacatgaaagttgaaagtgatccaaagggatttgatattagaaaatagaaagtgagataaaaccaaaaataattttatatatttgcctggctttttacaagcatctcacccccactcactctttacatttaaggatgatgaaaaatacttcacttttgaaataatcaaacaccatttttaatctttataataactctgacgttgaagacatcaacaaacacctttaattacatataatagtttatggaatttctcttcttcttcttgaaatatattatttaattggaaatagttcaatccctctgtctcttcttctggagtcttggacccaaccccatcattccagaaatgaccggctaaagtcaagaacctctctctgagctctcaccactttctctctctactccctctctgcgtgtaggatactactagacaattgacaaccaaagactaaagctgtgttgttggttcacttctgttctcttttccaatgttgtcatcagctaagcatcagagaaaccatagactctctgctacaaacaagaaccagactctcaccaaagtttcttccatttcatcctcatcaccatcgtcttcttcttcatcatcatcaacctcatcatcatctcctttaccttctcaagactctcaagcccagaagagatctcttgtcaccatggaagaagtttggaatgacatcaaccttgcttccatccaccacctaaaccgacacagccctcatccacaacacaaccacgagccaaggttcaggggccaaaaccaccacaaccaaaaccctaactcaatcttccaagattttctcaaaggatctttgaaccaggaaccagcacccacaagccagaccacgggttctgcgcctaatggcgattccaccacggtcactgttctttacagctctccttttccacctcctgcaactgttctgagcttgaattccggcgctggcttcgagtttctcgataaccaagatcctcttgttacctcaaactctaatcttcatacccaccatcacctctcaaacgctcatgccttcaacacctctttcgaggctctggttccatccagttcttttggtaagaaaagaggccaagattccaatgaaggttcagggaatagaagacataagcgtatgatcaagaacagagaatctgcagctcgttcccgcgctaggaaacaggaatgtgcctctcctcttccctcctaatcttcttctactcatgtgtatcaaaaagggaagaaaagaaatgtggttttgccatcaaattgcttttgatctaaaaaaaggtctcttggttttgattctcatttgcaggcttatacaaacgagttagaacttgaagttgctcacttgcaggcagaaaatgcaagactcaagagacaacaagatcaggtaaacaagcagagccaagttcttaatgttttacccttttgtagcactcatgtcattagatcaattccttgtagtttaaccaacttataaaaagagacagacagacagcctctggagtatatttgttttacacacttttttgtccaatgacattttgggtggttagattctgatacttcagttgtgtgtttattatgtgtgtgtgtgtgtgcagttaaaaatggctgcagcaattcagcaacccaaaaagaacacacttcaacggtcttccacagctccattttgagaaatctacaagtccttgtttctcttttggggattgagattgtctcatgaagaagtgaaaaaatggcaaaagtttgtacccttttttattagctataagtataactaagcctaaaattgtagaactaagatattgtaggggaaaaaagaagatgtaaaacaaaagacccggaaagagaaaaggatctttcaatttcctaaggcacaggaacacctgtcctgggtcctctcttaatgttctgtcgttttcctatgcaaacccttttttcacttctgtactaacttctacttgtattcttgttgtagtaatgttctacttcctcttctaatactagtaagaaaaaaaaccttatgttttactgtttaaccaatttggttcttaaaagaagcaaaggatcaaatgaccaatagacaaaacagtgctccacttaaatgatgacaataccagagaaaagtgagaaggggacctatcactgaacatttaattttctccctatcacattatcacataaatatccaatcctttggctgtctaccatacaagccaacaacttgcaatatgattttgaaacctccaagccaatgggaattaagttcaccacttttcgggttggtcaagagagaacatgataagtttcttattcagcatggtcactccccacgttttatttatattcatagtacatagtattgtagcttttgctctaactggtcaccatcaaaaacactaggtgtgtttgtattcatttggtttatcaagagaatagtttttatcttcttttggcccaatttcatttacctgacagtgataagtcttgttgatccacttttggttgttgatatattgctgtgtattcttttaagcaaccaaaagtggacatcaagagctaatatggtgtaaatatagtggacattaagataaagaagaatagttaccaaaagtgggactatgactagaatctatcctcacattatatggttacacttagagcccctcaaataggcatccaatactttaaatcatgcttctactttcattccagtcaataagaatcctagacttcaagaaactttaaacgaaaaagttggtttattcacctgaaactacacacctataatgtttttcaattggttacatcaatgtttcccatcaaacattcatacttaaaaatgctaccagaacttggccacaagcctaaaagagagtttagaagagatgatcaggtaactagtacagaggacagaacgaaccattgataagttgctgcagatacaagctgataccttcactctgaccattttatttctttttgggtgcaaaagcaaaagtcattaagcttttgatgcatcaccttcctcctcaagtatttttccatcctttggaaccaagcatggaatcccatctttgatctagcgtgttaagagaagcaaaatcaagtcttaaacattgaatcgtgaacatgaagtgaaatctaaaaagaacaagaagaatatcattaagaagaaaacagccgaccaatcactttagcatatgattattccatcagtgaatcccaaatcaacaccaagaataaattcattttaaacattatttagtatgaagcaaatgaagaataatgaaagaatcaaagtctatatatatatacacatctcaatctttgattagacaattcctaaaagatcaaagttgggttgagaacatgttcactgaataagagagcatgattctgaaagcagatatgatagtgatttcgtacaatttcactgtttggagagttaataagcgccataaatctaactttcatggagctcaacagctcacaagcatctgaatcgaaaaaatcaaaaagctttggatagaagcttacaggaaaagagacaccaatagtatcgctgacaagtgatttcgtcttctcgcaaaacctatcagcaatcaattcaccaaattgcttaaacaagttcttcgggaccaatcgaatttaagctatgtacattttgaaggagagaaatcgaacctcagaggttgcttagagagagggcacaccagaatctcggagagggtcttgtcaattacattgccggcgtcttttagcagcactctgtttagtctcaccattctaaagctttgatctttagctctctccggactttttccttttttccgatctccggtagaatcgaccggcgttgagcgatagttttggactttttgagtaaaaacgcaaaacgcccctataaatttaaaagtttccaaccatgcccctcaatttttatgtttcacaaacggtcccttcaatgtgtatatattattctagctaggggagaaaattttcaaatataagcctctatattttatagttcttgtttgatgccctcaattctaatttgttgaccattcgtccgtcggactttataaattgatcaaacattaagcgcttcgtgttataatgtctatgggacattggttagaatttacacagatttcttatccagctattggaagatgttgatcacttgcactctagattaatgctcctgaatctctgattctgcgcatagaaatattacaaaacttgattctcgcatcacccctaacaagtttactacttgtgttacaaattgtaaacttcccatgattcttgtattatatgtgtaaaactgtagatgcttcattcaattgctcagtgattttgcttcacattgagacaatcattgtaacgaatgagtaaaaacacttttaacatctacgatgatatcagatcgacattaaactaagatgatcttaggtttctaggaataatccttgataagcatgacaggatttaaacttcctctcataccttgtgcaagcatccgaatgcagatttagacaacctcttcatcgtccaagagcagacagtctttaattttctccctgaaataaatggaaaccaatgttaggaatctcaaatagtgtttcactcagtcttgatcttggttgttttaaatctgatgcttcctagagacatgaactaccaataatgtaggtaaaacgaatggaaaaggaatccaagtttgagatcagagttaatgcatactactcacctcagataagcttgactatcaactttttgatgtttcacttgggaaatcatgtgatctggtagaaatgaactgaattgctcaagagatgatccatcctgtggaagtatttgaaaccggcaacttgaacagcaagcagcatagaggacatcagattcctggccttcttcaaaagtatccaactctgatgagtctgatctatttagcgggccattgcagataggacagaaagcttcagtagtcattgatccatcatatttgagattgaatctctttaggcgcctctgagtggccataggtacattagagtcgtctgtttccggaattttattgaagtaaaatggagtcagcttcgcagctgtccgtacaattgtgcattcccgggaaggattttcttcctgcacaacagaacccagagacaaatgaatcagtaaaaacaaagtaacaggtaaccatgcatgcacttaaacatatgcagaagatgaacattatctgaacctgcaacagagcgacaaatgaagacaccaaatcattgattccgcattgagaacgacaagccaactccacagtcttaagtctgccctgcccagaatatgtgacgtcactcaatagttggattatgcaagaataaggttcactataacaatacaatgtagactaggcagccaataaacgaacccatccaaaaggcagagtctagttatttccagtcgaacacaatctcgaagtggaagtacaatgggaaccttccatctagcatcaacatgctgaatatctgctgatagtgaataacctcgtccctgtttcaagaaaaagcaattcaactcacaattctgatagaacatagtctaaagggaatgtccaaataaagtacacaaaacattgtgtactgaaataaaatctttacaccaaaacttcaatttttagagatgtaattggttaagtccaaaatatctacattctttaaggtagccattgattgctttctggcatgaagttctcactctaagatgcaatctatagaataactaagccagaggaaacacgagtcaagtcagggcactaagcaacacaccttgacagtagccgtaagaacatgggaagcaattctcgacgtgcatgatcccaacactaatctattgtacccattttcagcggcaacctaaaaaggtttatcaaacaacattaaacaaaagatatttccaaatctgaatttctttcccagacagaaacaaaagcaatataatgtccaaaccttttgcaaagataacattttcagatgcagcagaaggtcttcttttccagtatcgtcaggaacagaatctaatagcttcagaagtctatcccgtgcgtcaagagagtctgaaccaaatatgctttcgactggaacaacatggagatccttagcaggtggagacaaacacgagacagtatatcgaacccactcaattgcatcaatcatttcagtggaaagagcaggaaaagctgcagtttcatccacaaaagcaacaccaacaccaaacacaggtaaagatctatctcgactcgcctcgtaattcttcaaagccttgatttgcaactcgtgcacaaattgaagagaaaccctaacatcatacttgctacgtttagacaccaatcaataacatatcaaaaaacagaaactaaaggaaaaaaagagagcaaaacctggaagatgatccgccagagaaagcaacaaggacgttatctgaaggagtgatcatagcatgagaagtaacagcaagacggaatttcccaaagacattgttcctaaaacaatctgcgcagaatcttccatcgtcgaagccaccgtcaccaaatgtcataggcgcattgcatttacacttgacgcagacactctcatgattaccgccaccagatactgcatcatccactatcttacttccattatctttctcacggtcatagcaacctgactcacagcctgaggaattacaagccatttccaattcgcaagcagctgaaactgtggaaaatttagattaggaattacaacacaaaggagtagacaatgctatcaacatctaattcacgagacttaactactttccgccattaacgagataattaagagattgttactctaaacgaaatcattagtcttttttactcaatcagtatataatcaatcctattacactgtatattgctaagtcttgctataaagcgaatatattgaatagatagcgatgtgtgcacattcaaaatcgaaacaagcaaataagtgattagttaccagtttgagagagaaagagagtcgtcgcgataaaatctttagcagccccaggtcagcctcaggcggcgccaaaacgttatgcggtggttgactacggcgatattggtttaattgttagaaaaatgtcactactttgtctgaaactagggtttagagaaagcaagaaaaattggggaagaagatgaaagtggttatttacgagtctacccataccggtgagacgattagtaaagaaattatggtttgataagtatttaaaagatgctaaaccgtaaacatgtaaccatccattaaaaggaaccgacaagttttgtccaatttgggagcaatagaagagaatcatcatcagtcatatcaattttgtcaatgttttaggctttttagtcatggtaatgatacctcacatgcatttcttcatctcttttcttcttcaaagaattttccttaatttgctattgtaatattaatattcacccaccagcaaattgtatatgttctccttgattcataaaagaaaactactattttgacccaaaacacaagtttggttcaattggccatccggtaaacctaataccctatcttgtgataaaaggttgaaataagaattagttagtctatatgtgatacacacaacacaaattgctgaaattaagatgagaatcccaaactaatttacatacgactccacgatttaacacaataatattaagtgagtagtacgaagaagaatctcgtctcgtatccagagttacaacaaatcgttgtttttgttcaccttttgtataatagaagatttcaatgttccatgaactgcgacgaaggcgggcttattttcgtcttctccgtacctgcaaagatatgagagacagatctttgttagtgcttcaagattgaaacaaatattgataatatgtttgtatgtaaatcataccatatgccccacgaatctcaacttctctcagttcttgtacaagggcacagcaacaacacattacatgagatagaaaatcgtcaatgaatcctccctgcgaaatcagaaaacattaagcattcattccgactctacattgagtggcataaacatagccatttcaatctcaaccatgatagttactactgaatttttttgcaggtgtctacttaatctttaaccgaaatttcatttgttgtttatggtatgcaaatgatagaaattttctcggaagcatatagatttttgggatcaaatgggattaatggtaaggattcaagcgagtggaagagaatgagaatgtaataccgtgatgttcagtgtcttccggagtttcctcctcacgcaacaagtatagcagcaacaagaaagtatcaaagaatacgccattagctcattacatgcttcagctgaagctgggagagcgaaaattaaaaaaaatccagttgacttattagctttcacatgtattactaaaagattgaaaattaataaagtcacggtattcaataatatcccttacagatgtgcctgttggatgctgcagtggcaatctttgccaaagtaccacacgggaaaaagaatgtcttgaagcctgcggttccatcattgaatctttgagaactttgcagataacaaggaagtatagaatgtgaaacgctaatcatctatgtaacagagaaaacaaagtggagccacattgtaaacaaatagtgtggtcttacaaagagaaggttccgagcaacaagctagtaagtcggtatgccattcttcatggtgttgtgcctgtgatgctcttcgtgaaagcagatcatgcccagatgaaacattagaagtggatctgcatggaacaattgtgtaaccgatgttatagaacattgtaccaaatcttagccttcaaacatgaaaacagacctaaaagcattacagtcacagcaaagaattgaagattatactttcttaaacttgtaaggaaatttggatctttagaacaaacatgagattctaacctcgaagctgcacgagtactgcttttcttgggagaatcttcgtcatacgaatattccgtcttcatgcttgagctacgttcagattttttggaagctttctttgtcagctccttctcagagtcaggttcaacagcagcagcagcttgtgtaacaccaattaaacgctgaatgacttcacactgagccacatcataatgctcctgcgaccgctgaagttcgatctgcagtttctcgttttctgttttgagagcttcacagaaacgcaagttagggtatgagcaagagagagtcttcttcagtactgatgctgcttctctggtggattcttgtttcaaaataacatcttgcacatgtctatcctcttcatccagagtgtactcacgctgatcacggtcaatatactcaaacctctcctgtataacaatcaaaatttcaatataccataacatcaagcagagaaacttgttagaccaaaatgcaggtaaaattacccgaatgcgagcgttatcgaccaaagtgatgagaggtatgatcttaagaaaacgatcaatctcatcctgatgtttcctgaactggtaaacaatgttccaacccatagccaacaagtaaagatagctccggtctctacagctattgaccagaaggtaagaccttctcaaagcatcctcaagcccttcgagaggctctcgagtctcaggatacttcttcatctcagagatcttcagctgttcaagcaaattcccaatgagtttgagatgttgagcgaattgacgacaattcttcttatgcatccaagcagtattcgcagctttgactatgagaccaatcaacttgaccgcatctaaaccagtcagctgagccactgacgcaatctccccaagaccatcccatgaatgtgacattatcttcttctactcaaagttcctggtcgatagaaaccgaatcatcattatgcacaggaaacataacttgaagatccaaaaacatggaattatcgagattgttggaaattttaccttcgctgagctgatattaatggaaattgacggaatcagagagttggatccaaagttctacaaggacggcattgttgatagagatcgagtaggagttcagttcctggcgatatatcagaggtaaccaccgagagattcagatattccggttgagaaatcgcattatattgagggagtgaagcgagaattgactaaaagagggagcagtttcttcgactgcgacaacaaaagcaacaaagagaaaaagagagtccataagataccaatcaaagagattctccaggtctataggctttctacgtcaaagatcttcaacaccaataaagcaaacaaattttttttaagaaaatccctaaagatgatttgtctttgaaagacttgaagctgacgaaagcgaaagagtaaaattcaaagaccagaaagtaaaagtagcacaaatatgaacagtttcaacctccgacgatttgaacaattcgccggcgacaaactcctccgccgagagtcaagtcaagtggaagaaaaaagacattgaaaatcacagaaaacttttaagtaaattaaaaaaatggagagagagagaggaaacaatattggaatgctcacatgatggcaatgaagaagacaaccgatatactttttctcttcacggatttctatatactataacaaaattacccaaaaaaaaaatggaaaatgcttgaagaagaagaagaacactactcaagtctaggaattacagagatacgtttccaggaaaatgcaaaaccacctggagatttcttcaaaatatgagcagagaagaagattctatgcaactgtgaagggagagttaaatccagaggcagagatgagaagacggtttgtttttgtcgatttatgtatttctctcattagctttctttctcccacaccttcttcacttgccactcgtcggagctcaagagcccccccatcctgcttttttctccatgtatttttacccataggcccagcaaaactctctctaattaccaatgtgcccctggtgacttttctgtttttatttattaaccataaagtttcataaattctagctacaagtagttaatgtagtttgttacacgttgatgggtatacgtgacattgctaaataaataacctttgtgtaggactaatgataccttaataatatattggagtttgagattataaaaagccgttgagattatcactttcctgttaagtattgtcttacaaaaattttaaaaatgtgactttgttgtctttttattggttgtcggcataaaatgacttcgtttgaaacgaataatgtaattttttcgtcgtaatataaggcgcaacgacgtcaaatattgatatttgttttaagttgtatatgtatatatgaacaattccaatggctaaaatctaaagtttatgtatatccgtgtgaccactgagaattttgaaactcctgatcgggaaaacttgcaggtggcgtattggcgttcgtaatgttgagagtaaagctaacttagcttgataggtcatatacttgttattagactataattgtgattccatgttaatgtaagacggattatgaagaaagcatagtatggaaatgttgcatgtttaaaataattaaacagagaaacataatgggataaaaaaaaatgagatgtgatcgcttgaaattgatttgtctttgaattgcagtaactataatgataatggttaaagaaataaagcgtcacaaattcacctttaggccctttttcggttgaaattgatttgtctttgaattgcagttatggtgtaattatgctcttttttgttcaatatacatatgctttagtttaattagtttcacacccatattattcttgctgcacgtggattaccatgattgtttttctatacagctggcgaaacggacggtaaactaatagtgttctttcataagtatgagaccaaaagataacaatacaaacaaacaaagaaaccctcaaaaatataatttatctttacatatcttggttgacaaaaaaaaaacaaaaaattaagatatgaaaaatgcacaaaacttaatagtattactatttttctatacatttcaagcgataagttttactaattcttaaaattttgttttatgattatccagattacaacttagaagggttttggcaagtctccatacatatgcatacgtgggaagggtagacattggtagtggtggtggtggtcctggtggactatgactactacgccctctatcttttcgagagtgcctatataccatgcgttttactctatatatgtaaccatttcttttttccaaaagtatattactgattttaacatttaaatactagtttttataaagtgttttatactgttatagttgctccatgacggaaatgatcaaaatgtttacttatataaaccttgtaaatgtccattcgattcttcttttaaaacaactcacacattacacacacaaaactgcaaattaaactccgatgctaatcaagtccaaacaataacataaccttttttttgtatgtactctagtagtttgtattaatatttgttgctttatatggattagtgaattgtatacgatataaatcaataacataacaaaaagtatcaggaatacattacactaaagttgatgtcaactacccatttgcactatagatcgtttgtctagtgctgtaatgtattttaaaagagcaagtagatcacatcaaatttgttctttaaacgtagtgggaatgtatcatatacacgcctataaacggttttggtatatatgagtgtgttttactatgcaacaaacaaactaagttaacctaatttttgtaagcaaaatttcaaacgaactaacacaacatgatctatgtaacatgtcataattgtaaaagtaagagaggagacgtcttattattggaggtaaagaagatagacaaactgttgttttagtcgttaggtgaattgtctccatgtgatttagttgggaataatcgtgcttcttactttatgttaaaaaatatgtctcgaaatgtccttatctgtaacaataaatgggacagctaaattttccatacacatttaaaaaacaaaatatcactactaaaacctaagtatttatacagtacttttaactaatttttgtttggggttatcgaatgtctaacactttgtcggaatcacatctaaaaaaaaatagtttaacgaagaaagtacttctcagaatctgcattgcttctgagcacataaaataaataactaaactataagcatcaacacactttgtacctatctttttcatttttcaatgcttttaccaataccgtttatttttccctttctcagttagtttccaatacaaattaagttaaacctagactaatatacaaattatatgtgtcgatcaacattactattgtttataatttgataaaacgactgtatattattacaatcatatattcatatgcatttacaaacacttattatatactaaatacaatataacttcataaaataaataaaaagttatgtgctaatcaactaacctgtaacatatactaataatagctttaaataaacacatttaatatatgctaaaatacgaataaattatacccaatagtaattatttctgtaatttaatagcagctattaagttccagtttttttaaaaaaaatttaaatccaaaattgtttaaggttgtgtttgcacaaatggattgttactttaaaactttaaacaagaacataaacccatcattatacaaatgggctgaactaattgattagtaagcccattctatttctcacgtaactcagttattgcgttattggcccaaaccgaaatggacttttcatagacaactggtactctcgtcgtctagctgtgcaattaaagataccagaccaaaatacccttcacgtgatacaaacaacgagaaaaggaaattaataccaacacgagaaaaaatggaaattcagatttcgttttgtgatatatcgaaaagcttttagttatatagtttccaaaattttgaatctattcactcaattaataatccagtacgttattaatatcctatagagattaaaaaaaaaactcacaagaaaagccactctcgtaattaataaggcgtgatttaggttaatagtgtccttttctaacattcaatttaatcatgctaagtaccccaacattggacccgcacttcatagctcatactggaaattcctaattacccttcattcccaaagcgtaaaagcccacaaggataaggatacaaacgtcattacacgaaatgattaaagaataaagtaaaaaagaaaagtcgtactactacttaaaccatcttttaaaataaaataaaaatctaaaagtaagaggtcgaatctatctgaacgcgcaatctccgccgtcaaatttggtagagctagtgaaaagtggtcccacgtctccgataatctatgcttaaccaatcgtaacgtaccacgtatagcgattactttggtaattgtagcgtttagtgaaatcgttttggcgggcgtaattaataaattcaaaatcagagcccaaattaaaaacaaatcaaaaccctagcgcctctttttttgttccatttctctctctctcactccctctttgctcaaatcgattctccctcgcttatcgccatttctccctcgcttatcgccatttctccctccattttcgctctctcgatatcgagcttcctctttccgcctatcgaatctctaatctgaagctgtctttctcgatctggatgtttatcgaagaaggaggtctctgttaatttaggtaataatcattctccgtgacttttttttccttttcgatttctagggtttaaatttgctcgagattctccaacttctttgatttgatagtttattcaagtgtaatcgattgaatgatttggctgaggtttaacttttcaatttcgttatccatcagttaatcgttttttacccagctagagcaaagtctgaagaatctggacttttcgatatctaatttatcataatttattgattcaattctggattgatgattttcatactgctttcactaggtgtatagggaaattaatctattgggaagtgttgtagtagctgttaggaggataaagaaggcatatggggaaggtatctccaaaggatttggattcaaaaacctcggtgaggaaaaagaagttgaaaagttcaagtaacaagtatttaaagccaggggctttggttcagctttgttacagcaaagcatcggctgctaagtcatgtaatgaattagggaagaaacgagtacctgtgtttgatactaagtcctgcaatgatttggggaagaaacgagtacctgtatttgatattaagcatgcgaggaacaataaaatggcagtggaacagttgaattctccaaaaagccctcttatgttgtcccctgtcaacgttgttaagcggagtactctggtgaggccaatgaagtttgatgatctgcaggtggagagtaataatacttgtaagaaaagccctttaatgttatccccaatgggtattgttatgcaaaacactctgttgaggacaccaaaaactccccaagctgatccttgcgtttcagaatcacagcttgagtctcttcccatggatttactggtaagtttttcgtttacatttaagttaataggttctttttggtagtcatctgaatgtatgaagttagttcttataaagatcacactttctgtaacttccaggttaaaatagtttgtcatctgcaccatgaccagctgaaggctgttttccatgtttctcaaagaataagaatggccgtatgttcttctttcccctgtttaagtttgcatccataaaagctcaattttttgcagttttacttgatgtgtattaatctgttttgacttttctttgaaacagaccatacttgcaagacaatatcatttcaattatacaacaccagaccgctcaagacaggaaatgttgagggtcatgaccccagttccaataaatcgttggccatttcgtaggtacatgttttacttcaacttttacccttttgaaaagagcatcaaacaactcgtttggctcataacaaaaccttctttgatctaaattagcagaggagatggaaacccaacaatggtgtcaagcccacatacccccaaagcaccaaaacatgctcctagaccaccctctcgaaccaaactcgcggagatgaagcaaatcactgctgttcttttccaagaccagacaccatttccttcaagatgcatcgttccttctgttctccagaggccgactttgttcaaaccaatggctccaaagcaccctcgagtgctcttctatgaggatgaactatgtcaagctgttgctcaaaacaacctcacctgattacacttagctgcagtcatatcggtttcctctctctgttgatagtaggttttgtcttcattgcataattgatcattgctcttgatgatcatcattacctatagtaagaagcatgcaagttttgtagcagtgctagttcagggttttaggtttacatgggaatctcctagtatcatttaaggggttttcaagtttttactctcttgagtttgtcataataagcgtctttgatttggtcagttgagtcttgtgtatattttctgcatatcttatctggatcagttgcttttttttttttaatataatttgattgcttatccttgctttcatcttattggttattgagttctccaatttatcgtaccgcgattcaaaccgtacttaaatgttaaaccggatattattaaatcgattgaactgaataagattcggttcaagtttggttatatttttcttaaggcctctgatttagttgggcctatttacgatcttacaagcccaaacttattgccgaagatccattattgaaaagtctcgacgcgtgtaagcttactatatccctgttgccaaacaaggcttttgtcccttgtagggccaatcctttatttggctataaataaaggatgtatgtcttctaaacaaacactttttctaatcggagagcttcgaagggttctgagatctcgcggctccttcgatcttctccgctcaactattacctccgatcgttggcttatgtctactgtaacctcttagatttgattttggcgcgttattagaaacccctaacatctttaaactcactcgaggtctctcgtgatcgatctagggtttcgcgagatctgagatttcatattttccgattcaccttcgcaatccaattttttttgttgcttggattttgtttgtgtgtaatcgtgtggtaagatgtctcggtgttttccgttcccgccacctggttatgtactaaacggaatccgcgatgaggctgtgatcgtatcatcgatcaaggtttgtttgagcatttaaatctcggttttgggtttcgggttcatgagatttcgaatgctcagcttccttgtgtttccagtttctggtatcatctgtgttctaaggtttactaaaaattgttggcttgaaagatgggggatagagaatgttgcgagattttaattgaaaaagatgatcttaagttgtacttaagtaaacaaaaagcacgcattcgaatcaatgtctcaatattaatcgttcgcttaaggtggcaattttaatcaaaaagatgcgagtcaagcacattcattgtctactctaatcaaaatgtgtaatttgactaaatgtgcgaacaccacttgtttggagtttaagggctggtctatctgagggcttgtttctgtttttttgtattgaatttggcaagttctgtgaactaattgatgttgattgcttgtgtaaattcagggggtggaggagaaagctaagaaagaacaaaggaggaaggatagaagaagtgataagaaggataaaaaagataagaaggagaggaaggagaagaaggagaagaaggagaaaaagaggaaggagagggaaggaaaggaagttggaagcgaaaagcgcagtcataagagacggcgtaaagaagacggtgctaaagttgatctttttcacaaactaaaagaaagtgaagtcaattgtttggagaagagcagccttactgtagaacgtgagctgcttcagtcgacgtcccaaaactcttgtgatagcactcttaacagcaatgagatgttaccgaagcagaaggaggtccagcagcctctcgatggtagacataacaacaacaacaacgagaagcgtgtggagaagcagcagcctctcgatggtagacataacaacaacaacgagaagcgtgtggagaagcagcagcctctcgatggtagacataacaacaacaacgagaagcggattgagaagcagcagcctctcaatggtagacataacaacaacaacgaaaagctgatggagaagcagcagcctctcaatggtagacataacaacaacaacgagaagcggattgagaagcagcagcctctcaatggtagacataacaacaaggagaagcagaaagagaaacagcagcctctcgatgttagacataacaacaacgactctggtgagtttgtttgtgtttcttccttccccggggaaggatcttgtattcttgttgggtctaattaccttatcaggacattgatgacattctttcttcaaattgttgatatgaatttgaagaaagcatcattcggattcgattgcctattcgaaggcagaaagatcccgaggtgatgatgaccaataaggatcaagaaaaaccaggtccttctcggggaataaagttagactcgtcccaacttcctactagagagccggttaatcaacatccttgttccacttctgcagcagaacatgcttcgaagccacgagaagagaaaaggaaagatcccatttttagagggaaacacggtaaagagaagatatcctcatcctctactcgagaaacttatcaacctcctaaaagcctatgcaattgccctccatccatggtgttgcaattcttggacgtagttgagaattgggtccctaacacgatcgagagaagagtagacctcattaactctgaagatgaagaatgttggtggtccatgaagaagccgccaagtagcaccacagaaatatgcaaacaacttaatagagagaatgagatcaagcaagtaggcaatacaatggggtggccatgtgctcgccttttaccagaagctgatgtctacgccttaccttacacagtcccgttctgataacatcaaagagcaggaagtttttaacaaggaatctggtcgagacatccatgttctggaccagacagttttttggtttagccttaaaattccaaggttgtataagaagaacacactgtttgttattctttgcggttggtaaccaatatagtaatatcagtatttcgtctcaatctctcttgttcttataataatagaatgagaaatcgaaatggaattttcatgtgaagtggattagtaacattatcacaattgataaaacatttgtaaataactagacaagctttctcggctatcagttaaaatagaagttgaattaacctcacaattcgttttgtacggaactaagagatcacaaatgaaaacggaaaacaacaacaaaaatgaaaaagcgatacttttttaaaccaccctgtcatcctcatctcaaagagcttcttgacttccatgagtgctattacaagatggagcaggccttttgtgctttgttcttctttttcttctgctttggaggttgaaggaccactctgatcgctgcatcaaacacgcccttcacgttctgcagttatagtcacattgttttcatcaaaagatgaagaatccaacaccgaaaagatgattcatgagatgtcttttattcgtttacctcttgtgattttgaactgcactcgatgtaagctggcgctccaattagcttcttcagctcctctcccttccatgcagagagggaaaatgcttaacggtggtaaagctgataaaattgcactgaggaaataactgtattcttacctgaacagtggtaatagggacagcaccaggatggtcgatgaaaaactgtttgtcatctcgaagatctgacaacaaccaaggttagacaatcaaaaaggccaggatcatgagttgactgaagatcttgcaagtgtcttttataaaggtatacacttgctatacagtagctatttcattggaggatgcttaaaggcgtgtgttataggatatggttgctttatcacaagaagtgcaagatacaagaagaagcctgttgaccaatgatattctctgaaaactaccctcagtttcacctaacgaatacatcttgaacatgtacaagttttaaccacaatcaagagaaggtgaagttttatgtccactaatgtcatgatatattataccagagcagcttaataaagtgaaaaggaaaatggcagtgtaagcatgggaatcagacatatatataaataaatgcataaacaaggacaaatgtgagaggaggaagtaacctagtttggttccaacaaggacaattgggacaccaggagcatagtgcttcaactcaggaatccactgtaaaagaaaagaagcatcaaaatttggaactctcaattgttaaatagtcgaccagttcggacgaaactgaccttcttggaaacattctcataactagccttactaatgagagagaaggcaagaatgaaaacatcagcaccacggtaactcaaaggtcttaatctgttatagtcctcttgccctgcataaaccaaaaacataatttcgaccgattcatcaaggaaagctctctcaccaaggattatgaattggatcatcattcattacctgcagtatcccacaatccaagattcaccgtggctccattaacaaccacatttgcactaaagttatcgaaaacagtcggaacataatcctgttccaatggaaatgtatacaacatttttagtatgtatggatcccaattcatatatggcacaatcagaatcaaatgaatcagatatcaaaaaaaggagggagaatgattgatgaataccgtgggaaaggtgttgctggtataagaaatcagcaaacaggttttaccaacagctccatcaccaacggtgacgcactttatgaaccttgatgcgctcattgcctcttcttcttcttcttcgagccaaaatatgtcacaatttaccaaaaaacaaaagagatcaacctcagatttaaacctgaggaagccagaaacacccacaatgtgaagccaattcctccgaaacttcgaccattatctttcaattaaccatctcaaaaccctagatatgtataatgtggaaacaaaccccccaaatagagaaaatcagaaatgtgaagaaggaaggaagatgaataaacaaaagggaacgtgaggacgatgaattggaggatgcgagagagagagagaacaacaactagagagagaaagaaagaagtagagaagaaagtgatggccggaaataattgccattgaagcgttcgattaatctcagccattcaaccttccgactgttttgcaatctttttactttttttacttcttctgttgtcttttaaataattactattttacttcttcttcttttttctgtttgattttttagtgtatattcaaattaatttatttatcttgtatacaaaaaagtaaaataaaggagttgcacataatgtattttgtctttgttgtttaaaatgcaaataagaaaaattaacactggctaaaattatacgtgtttttaactgtctgtaaaatttctagtacgatttgttttactattctaattcatttttttactagtttttccggatgctcaccaaatgtgaaaaaatctctaagttatgattcaatatttatgaaaccaatcagccaattgcggtacaataaagttgtaatgcactagttcttccgcatactcgccaaatttatgttaaaatttcaaggatgtttgatgatattgaatgtggttagttgaatttgcatgttggctagtgagaatgtggtgtatggaccaaacctgaacttatttgtatgtcaacaaagtgtggtaatattttctgccaaaaattgcaataatctcaactaacaaatattttaccgagtatgtaaaatgtcaacattggtcatatttgcctttcgtgaggaaagatgtctatgctaatgaacttattcgggtcaacgtaaccttccttgataagaaaacctgcgacagcgagaacaaaaacgttaagagttgggaatctttcacaaaccatgtaattaatttgtcggaaaaagttagcatttgaaaatgttcaaagtaaaagtttttatttgatgtgtgtacgatgatacaatcacagttttgataaaccaggattcgtggagttggaatcagttttatcaaatcaacattccaaaattactaacaagtttgaaaatatgcaatgacaaaaaatcataaaaatcataaatacacgagctacatatggatgaatgagagagttaatctataaaatccgaccaaataactcaccaagtctacgatttattatatggcttttaacagagtaacgactgagagagacatataagaagagcattgatgaaactaaccctgaacatcacggcgagtagtcaactggaagtccaagatgataccccggcgcaacaagcccgctatcaccgccaaaggttgccgtggatcgtttgtcgtgactgtgacggatcatttatctcttctctctctcacctgtaattgtcagaaacagtttagatggcagaaatttctcaaagataaattacactataataactctctttaacattatgactacaattcccaaaatcaagatgtttcagaaaatacacggctcaattcgtcaaacaaaaaggagaaacatcagattcttaccaaaccctaaagcagagtctcaaagcagagttcttgattacgatgatagtatataatgaaatcacggggaaattgggtgaacgctctctgtttttctttctttgcgttggttgtagtgaagcttgatgagccttccatttctagctatttgcttggagagaaacctgcaagaacactcgaaaaagaaaacagaggaagatgtgagtttagacaaagtgaaaatagtatgatgcgtaaaactgaaactgacgaaactttagtgagaagaatagaccatgaaagtgtttcgatcaacaacataagtcgtagaaaagtaaggaaacatctaagaattcttaccaatcttaaaagcagagttcggctagtgactacgagaaaccttggacgaactttgttgagaggaatgaaacttgctctcgattaactttggatgaactttgagctctctgactctctctctctttggtttttcaactagaaaaaagacttttgctttctgaaactacgagaatagtaagcgattatacagaagaagaaatgattgtgggaagtaagtgagtgagcacgagccacttatataggcagcttcggatttcttctttcaacggctacttttctaacgtctatattttcttaccgttgtaaattttgcgtctcaaataagttaccgtttgtgcatgaggtgacaattgacttgacaggttgacaccgagatgaaaattacacaacaacaaaaactagaagcattcataataagcccaatgggccaatagagacccaaccaaaaccccaaaccaacaaaaaattaaggacactgttcgtcattagtggataattaatattttagtgtaacaccttcacaacgatcgtctctcaaggtcaaatagtaacttagtaagtagccctcttgatacgaagtaggaaccaaaacgcttgtctttatggattagaatgtttgtcatatcttgttcaaaactaaaaatgtctaaaagttatcttgtttttatttgttattacaataacgaaatcatttcaatcaaattgatctcaaacaaccaatgtagtttagtgttaggtagaatcttcttccgagatagttatgccccagctctgcttgcgacgggatggtaactaaaacttttgaataaactatagttgcatagatgaaaaattgaatatatgcgaagattagcaaaagggttctcccataactatatttaatactttgctttctccatatgacaaaacattcttctcccctaaactcttcttcaatcctatttatatattcatccttctgagtcattcttcaatcttattcatcggtctgagttattttgcttgctctttgaaattctgacaatggcagtgaacgttgatgcagagtacctcaaagagatagagaaaactcgtagagaccttcgagctctcatctcttccagaaactgtgctcccattatgctccgtcttgcgtaagatctttgctctcagaatcattctccgtttttctttcttgtcttgatgtttccaaatgccaactcttctgtgcatatagatggcatgatgcaggaacctatgatgccaagaagaaaaccggaggtgccaatggatctatcagattcaaggaagagctaaaccgtccacacaacaaaggtttggagaaggcagtcgccttctgcggtgagttttatgattaaaccttctaatccgttactactactcttcaggacctgcaagcggttgctgtctcctttgatgtctaaattttggtttctaatttcagaggaagtaaaggctaagcatcccagagtctcttacgcagacctttatcaggtaaatcaacattggtatacagcatctcgaagccattaaactcataaatactctcttcccccttgatggttagcgtgacagattctttcatttcatttcagctcgctggagttgttgcagtggaggttactggcggccctgcaatcccatttacaccaggccgtaaggtagttacacttaccgctaaagcgtatgcgttaaatcatcgttgctaagtgagtttactaatgttgagaaatatgataccaggatgctgattccgcggacgatggagaacttccaaatccaaatgaaggttactcctgcagcttgtagctcctgcaacggaattctatttcacaaactgactaagccctccttttggattattgcaggtgcctcacatttaagaactctcttctctcgtatgggtctattggatagagacattgtagctctctctggaggtcacactttggtacttattactaactatccttcaaaatatccgccagtcactaaacatgctccaatgaaccaacttggttgctactttgtatatagggacgtgcacataaggagagatcagattttgaaggtccttggacacaggaccctctcaagtttgataactcgtatttcgtgtaagccaacgataaagtcacacaagagttaaagcgagagagagtgagagttctgaaacttacattttttgctgattggtttttcagagagcttctaaaaggggagactccgggattgctacaacttaaaaccgacaaggctctacttgatgatcccaagttccacccttttgttaagctgtatgcaaaggtagattagatttcactacgattataagaaacttttactttggatgattctctggtttcatcaacaacaaaaatgattttgatgtgtatgtcaggacgaggatatgttcttcaaagcctatgcaatttcacacaagaaactctcagaactaggatttaatccgccaagaagaattccttcagcagtgacgcagcagacgcttggaatcgctgttgctgcagctgtggtgatctttacaatatgctatgaagcaagcagaagaggcaagtgaggaagtttcgcagatgcaataagggacgagagaaaaatgttaattgaatgtatgcaataaatacaaagattcatgcaatgttacctccatgctccttttcaagcttcagtgctttggacaaaattatggatgttacatcgcagtatgtgaactctcctcaaaaacaattactactgttaccaaattaaagatacagagtctaactgagaaacgaactgtggatgagaagactaaatttcttttggaacaaccaggaatatcaatagctgattaggttgctataaccttccaacttttgatgactcatggtttccataacgaacaatctgactcaagaaaccatgttctgtgctcgggaataacatagaaatacacgataagtaaatactctattcaagaaatgggagatatatttatctcgaagtagcagcatagcatttattttttcagaaacacacatctgagaatacagcattaataacatttgacactatcatgggcgaaatcaaaagttaaaacttgataagtaggttcctcggccacagatacttatcctgtaatccactagcatatatcttatgagaccctgacaagtggagaaaaactaaaatcaaagtgccctgaaactatccgttttatctagcctggcagtaccggagcttgatgattcgccaagtggatcaggagaagctgctctagaagagtctcttcctttcagagaagttggcattccagagatctcctataaaaaaagtagctagagtcatcatcctaaaagtggtcatactcaaatcacactagatggctgaaacaattcaataacttaccttcatcaaatgcaacctcatgtcagtaggacgagtatggttaccaatgcaggccattgcaaacttggaataactaaacaacacatcagcagcagcttgcttctgctcatcaacctataagatatcatcagctcaactcttcaataacaattacacaacaaactccaaaagtcatgaactttggttaagaatcagaaacagagaacaacgaagctacacaggattccgatttaagataaaagccaaaggactcatctaagactaatcatgattcttattgatcaaaaaggaagtgataccattcactaataatcctaaagctcagatttttataaattggttttccccattccagtaacattgaagaaaccataatttgaatacttgttcctttaaacaatgattcaacatcttgatttcatggcgcagattaaaaatgacacagcttttacatccgatttgatccctaataatctgaatttcaaaacatagaaaaaattcaataaagctgaagaattagaaatcagaagtcgcacctcgtattcttctgtcattgtggagaagcgtattcctctgtttggctctcttctggtcttgtgtagaagacagctaccacaaagtgacctactttacctaatttggatctcagcttcgaattcgagaaacaccaagctcgctggttcgaattctattttgtaggactattcagatactactagggtttgattgataatttctcttaaattgtggggctgaaagtgaaataaacactattttacttactgtaaaacgccgtgtattttattccggtcgcataaaaaaacgacaaagcttgtgacatcatcacacaattacttgtcctatcatgtttttgatcaaaggtttttctttttggttttaagatttgattttgttcttattaaatcggatcagtcagtatatacaaatacagatgacttattggaaaggtttgttcaattttattggaaacttgcgagatcagggacaaattatactcactttatatgctatttagcggttaccaattcaaacacattatctaaaattgtataaatatttgtataaatctcatgattcttgaagaagcaaaacacttttgcatcaacaacaacacaacacaacaaaatctaatattttcaaacctctatggtctgtttaatgcttatgtaccaaggcaatgatattgatatacaaacaacacaacgtccattagcctacttagaactttttttccccttctttctctctttagctgccgttttaactacggttttagcgagtgatgatggcttcatggcactcttggggttaagagcttgtctaatcttgaaaacagtccacgccgttccaaaagcatgccctgctgcgctaagcccttcgtttgtcgcttgtgctgtctttgctccatacctacaagtaacatccaaacattaactatctttttggcatggtatgagcacattctcttgtaaactttttcagttacttacttgtgatcgacgatttcagtagttacatctgaagttgttttcataacgtgtcttcctgctacttcgacagcatcacaaaccttgtctgtcacaaatgggtaaacaaatctttattagtttcaatcatcagaagcctaataaagatagataagagatatacgatatagtcaacttactgaatccatcaagtgttgcaagaaccatttctccaggaagaagcccaaagagtttctgcccagctttgctatttatcactgaactcgagaagaatccagaaactttaacaacaccagagagcacaccattcgccactttctctgtcatttttgtcatcttctttactctgttacatatataactcaaaacctcgataaaaagtttaaaacacaaatatcaaagataagcaaataaaggtcgtaccttttgagacgtttcaaagttccaggactaacttgtctctccttctctgctttggacaacttcttcttcatgaaatcatttccccacatgagtctatccattgtgagatccccacaccataagatccctttaatcaattgaccagaaccagcagcgatcagtttcgctgcaacgccactgtaatcctcaacattcggagccagagtcgtccaataagccgtacactgcttctccaccatctttttcctctttcccttcagctcctccggtgaagtctccttcgccgccgtcaaatccaaaacgttctcttctttctgtttctcctccgctgtgaaactactgtaatcagctaagatcttgtctagcttctcaagcatcggttcttgacctttcgaagccattgttaatccgtagttcaacatctcgttctctgtttcgttgactgaatgatccgatgactcggattctttaacgggtcggagcgagaagaagtaatgagactcatcgactttaacggcgggttcgtctttagtcaacggccattggatctcgtcaccgacgcgagcgaaaaccgcgacggtgatatctccttgaacaagacggagaatctcgagatcgccgcaagcgagctctacgctgtaggatttgtcaatgaggtggaccatcgcgccgtggattgtgagaatcacttcctccgtcgcgagaggaggcgctgaagctgagtcagaggcggtgggatcggggaagatattgttgacaagatcattgacattgattgaaggatagagattattattattagtagaagaggaggaggaagaggacttagggagaggagcaacggtggttgaagtgtcgacggttggataaagcttgggaggagttgcagagcattccattatcgccggtgatttaggaggaggaagacgaagggggaatgaagaagaacaagtgtttggttatttatatgaatttgaaaaagatttggggcagaaatagaaaaagtcagaagattagtgatggaagaaagcgaatctagtttgattaactgttaagtaaccttgctgtcggagtctcggagataggaagacgtgggcgttgcgtgtttcaagaggagcatactttttgactatgaaccgggccggtttaaccttttttttaactattttaggagattttcccgcgctttatccaaatattaaatttgtttatatccaaaatttctttttgttgagtgtatattgtacatttgtttattgttttgccaccttttttagtgtcacactaaacaagaattattcaagtaattaagatgtgtaattgactatgataatggtaatctgtattgactttgttttgccaaatgaaattctatttaacagtaggatcttacctaaaccatggaggaaaactttggtttttttttctattagaaaacataaaaggcaaaaaaaatgattaaaaggtataatcaattatgatgatgaaaattttttcttgtataaaaataagaataagatttaaagggatataacacttatactattttttgtataaaaatatatgtctactaaaaacataatattctgtcacatgttattttctattttgtttaagaagaaatcaattgcataatctcatatcactctatgaagtacaattatttgaaaattaaataatagagttttagatgtcaaaaaaaaaatcaatagagtttttagagtaattaaaactgtataaataagtaagattaagaaaatctatagattttaaaaaaaattgtgcaccaaatctaaagagtgaataagatttatttctaacatacagcttttatcccttgacaattgtcatttgacttttgagttatagcagttgtgttgtcatcttgtgtcacttttaatattaaattacaaaacaagtcctcaattttaaaataattaacatcagtgagatcagaatctaaatgttactgtactttacagttgacaatttaattttcactgtactttgtttgacccccaaaaagtactgtgttaaaaaggcaaaaaaaccaaactaaagttcgccgggaagcgaaatcgtcatcttccctgttttgctgtttagtctgcaagagaaatttcagattccggcggagaaagctataacgattcttcaatggatcccacttcttcttcttcctctgctcttagatggaaaattcttcgccaagcgcttctccgtagatctggttgatactcccctactccttctccttcctgcatccacttttcgatttcacacattcgcatagctaatggatcatctttcaattttcctcagattctcaatctcaaactgagaccaaacggatttcaaggaaagcaactcaaggattcaacttgattccttgtcaagtggtggactcttctcctcaatcggataagtctcgtgaagcatccgtttgctacacacttcccatcactggctctcccaaactctatctaacgttaggattttgatctgaagttttcatcaaatgaaacaatgttatgttttgttcgatagatttgccactcctaagagcttctttaaaatatatgcagacaaagagtggataattgtagtgatctcaatgacttcgagatatctaatcgatacaacattgataatactggacttgtctgtaagttctcaatctcactgtatctctctacttgtcacataaattagtgtctttgttggttttgaaacttagtagtacaatgttgctgctctgctctgtgtatttggcttgtttgcggctgatacaatcgctaaccaaactatatctgcttaaacttttagtctgtcaatatacaacgtggcattaaccatgattcaaacaagttaagaataaaaaagatttagttgcttagggaactctaatgctatctaaattgtgattctctgaattcatactgtcgttgttttccaggtcagtggccctctgaagaagtactagcctacttttgcaagtctcagccagaacgtttcaggtttaagactgatttgcatctgtgttctttgttcttttataacttcgtctacttaattttactcggctcattgggatgttgcagaggtaaaagagtaattgagcttggatcagggtatggattagccggtttagttattgcagctgcaaccgaggcatcagaagtggtaatctccgatggaaacccccaagtagtcaattgtatccttcatgttttgtttttgtgttgtgcatatactgtttcattagaattgtcttcttctatggctgaaacccttgagatatggaatctcggtactcaaaacgttttggattcattgatgtacttaacatccagatattaaacgtaacatagaaaccaactccatggcatttggtggcacaagcgtaaaagccatggagttgcactggaatcagcatcaactttcagagttaaccaacactttcgacatcatagttgcaagcgattggtaccttgctctccattttagtcttccgctttttcgatatgtttttttctcatcccttatcatgacacatatttttatgattcaacagtacatttttcaaggaatttcataaggaccttgcgagaaccatcaagatgctgcttaaagccaaaaaagcctccgaagcattatttttcagtcctaagagaggtgactccttggaaaagttcatgaaggagattaaggacattggtttacactacattttaactgaaaactacgatgcacaagtttggaagcgccatgagacgcttgtgaaaggagacgaagcttggcctaactatgacaagaatcattgctaccctttacttattcaaattactaatcagatttagtcaagactctcatatttgcggctatggatggggaataaacgcagaggtacacctaatctctcaagctttttttttaacatattgagttgtatggatatcatatcaagtgggtggacttgaaagttgaaaccttttgactctctgcaagatgctcctatcttcctttattagtatagagaggtccacaccacacatacacgagttaggcaaagccgttcaattaaagagaagatatagaacaatattaataagaaaagctttaaagattctagatcaagtgtactgccattgatgaactacatcaaacttttcttcattctaaatccggcttttttaatctaacttctagtagtcttttcttgttttcttagtgctgaaaataaactttctgtactattaagggaattaataataaccgtttgggaatggtagagatgaaccaaggaatcatttgagatggaatcagccatctttttatctagaagaatctttgtttttgtgtgtgtgagcctatatgtgatctcaatataattggagtcattatgaacttaagtacttttaatttcttgaattatgccgctcatgatatgaaaatgatacaaggtgacgaatcaaatatttcaattgaaggtttccctcaaaagtgacaagctttgccttcactattgaggaaattaacagttccacgtcaattttgcaccttctctgtttctacttctctcttagttttttgtcattttcttgttgcgataaccaaagctacaagctgatccaaccgaaaatcaaaaggagaagaaaagaagcggtatttctagtcgattctccgatagccatagccgcgtaataagaattcgctaatgacgcttcttctatcggttgttgtatctctgtactcgagtcagttccagaaccagattcacctcctgtctcttcaggaggtggttctttcgaagacttcaaactgtttcacacaatacaaatacataatcaaagctttgatctttataaaccaaactctgtctttctttaactgttttaactaaatctaccttgacaatttgggacaaaaagtgatggtgtaatcagcaccactacaagtgaaagtacttgtggcatcatcatacgcgtaactgtacgatttaggacaagctgacttaaaaacttgtgagtacatcgacggcttgcagctatctggtgaaccgtatgcgccactgcagcaatattccggtcttccaaacgcctcacacgcacttctacaagccaaactcctcttggctttgagctccgttgggcaattctggtttaagtccgtgacacaccctgtggtggggcacaaaccagaaccctccacgatcatggggaggttatagccatcaacaaggctgacatcataaaagtctagagacccggaaataccgagagtgaactcggctagtgtggctggcggttcagctccggatccattacattccatctcccctgagccgcaatctccggtggatcagctcgtggtactactagaaccatcaaagttgcagccagtacggccccaaaagcgaccagaccaacctgcaggtgctcggaaagtgcgagaggtatctttggagagctcgaatccagtggaatcgagtttgggactacctgaaccggataaaatccctggccacactgggaaatcgcatttgttaactagcgtgaacgttgtacacttaacacctttagggaaaacaaaaacagaggaaaaaacaaaacgagcttcagtagaatttgaggaagagtgaaaaactgagatgaagaaaacgtaaaaaatcgctgaccatcacggagcagcaagaggataaatccaagaacagaggcgtaacgtgggagatggagactgaacagagccatgagaaggagacaagaagactgagaaatcacagaatctcaaagggaattggttgtgagtgagagagaatctctaatcataaggtccaagtatgtttttcctctgcaactgatacttgctttgtgttatttttatatgtcaatgggaattcgattgtgaaagatgtatgaataaacaaatatagcaactttttgaaagaaaatgttcgccgccacactatgaatatagcaacttttttttatgtgttttattgtataacctaaacactgtgattacccgccaagtttaacagatatccttgaagtttaacattaattaagataagttgattttgatacctaatgataagtctcttatctctttgcaagcatcaatatacttggctagattattatatggctttataatcagatttcaaaattgtaaagtttatttgtttaagttcttccatttatttatttatcattttatgttattttaaaattttaaaacgcattaccaatcaattagttgtgcaagcaaaactgttatatatcttacagagacaccataaagactgaacatttgtctaaaaaattacgtagaaactaatagtaatactagaactaatccaatctaaaataagttgttcttctacaaattatcacctagaataaatcactcctcgactaactaaaatcttctcttcaatgatcttttctttctcgtcgaatgattgagattgatgttattaaaaacttcaaacgcagccgtacatgaatcacaaaacgcgttgcatcacccaagacgcgacagccaaaacgccaatcgaaaacacggcagaaagagttggcgacgcgtttggagatgccttagagtagctaacagctacgggttggactcccttcgttgcactcttcacactgaaagacaaattacacaagaaaacaaattttagtatcaccaatttattaaagtaacgttttctataaaatatatttgaactattttgcaatgtgaacaaaagagccgtgttggaccacggttcaccgacgtttgaatgaataaaaatctaaatgcatacaacagagaacattagatattttttctattttcatttattttggttgatataattatgccaacgggtgaaaatgtgaatgtcgtcttgtcatatgatttcacaaattgacaaaagaacacggaccattatgaaaaagtatgttccatgatttttattcggtgattgacctcaaattcaaaacgttacacaaacaaaacaaaaaggtgaataattcatctccaaccaacattatcaaacttttgaatgtgataaaaaaatcgaaaccggacttcttctaaaggaatcagaaccaaacttttttcctttttcaatatgatttgatcagatcatcggaaccaaccttttctaattagcaaaaaatataccaatttttttgaaaaaaattctaactcgatttttgtactttttggtgaataatggaaatagaaatttttttaccttgggttaggagaaggacagaaagtgatgacgtaatcagctccgccacaagtgaaggtactagttccgtcgtcgtaagcgtaactataagctctcgggcacgcgtttttgaaaaactgtgagtactcgcttggcttacacgtgtccggcgttccaaacgcgccgctacagcagtactccggcgttccaaacgcttcacacgcgcttttgcaagctactccttcagctcccgtcgtcgccactttcagctgagcaggacatggaccgttgagctccgcaacgcagccggttgtcgtacagtttccggcgacgcctccggcatctcctccaccctgagggacgatggtcatcgggatgttgtaaccgtcgacgagactgacgtcgtagaaatcgagaccattagctccgtttaaggtgaattcagcgagtgtagccggaggtgcagcaccggatccggagcattctacggtggaagaaccacagtccccggtgatgcaagtgaatcttccggtggttgcgtcttgtgtgcagagagtacgaccccaaatacgaccggaccaagctgcggggatcgggataactcgtgtctcggtagggtttaaggagaatccggttgtaggtaaaggagaggttccggcgccggagagaagtccaggccagacggtgtagctacactggttaacgatggtgaaagtggtggaggaaactccatagatgaaaacaagaattagaagaagaaagagagaaacttgagattgacccattagagcagagagtcaccagaatctaaatatatgaacttttgtgtttttatgtcgccggagatgagtttaccggtgactctgtttctgctctcgagagaaatgtataaagagtgcaaatgtgaaggcgttgtatttatatggtaatgaaagaaattggagtgagagagagaggtttaggggatggttgaatcttttaaagggcttggagattttttagaaaggtcggcttcacgtgagcccatgccgcctttgtctaagttagtcggccaatgtgtcgttcatgttcacgttattattatttttaatgagcatttatatgtagaaacatttcttttgaatcatagaaatattattatatcatgttcttaattgtttattttgtatgattcgtgcaatatgacaatatgggttgcatatggatattgatcagtcttgatgtcggtgatctaaaatagaacttgtctcctcctttggcttaaataatatattagacgatccattacttcgtttgtagttttctttttctttaagtaaaagagcagagcgagaaaaaattggttagtggtttatcgatcactaacgcagactaatcaccataaaatggaaatgtattgaaggaaataaggtgaacaacaaaaaaggctgacaaagaaaacgtattgtgtgatgccatccttagattctgccctcttctttcttccaagggacacggtcttacaaagtatctatagctactatccacccaagttgtgttgtgtcactgttaattaattattacaataagtacaagatgacaaaactaaatatgatgatgtttgatatttcgtgagactctcaaacatctatctctctctatttagaattcaagcaggaacatacaatacagaagttcaggagaggaatacaatttttttttttttttttttttgagttattattggaaagagatacagtggctaacgttggatgagaatttccgtaaagattgttttataaagaaagggtgttgggtcaacgacattccaaggtttagttgtgtgatgtagagatattaactttgttggttcatgcttcttccattgttacaagttatttatgttttgactaagacatgtgaccggttcttatgttcaaataggaaaaacaaatactacaagtggggtaggtctcatgtatgtttctactatgcaaatttattgaatttgatcttctttccaaacatccaagcaaaattggtatgactgattagagatttggctatatagttgcgtttatgtttagtgcatatttctataaaatgaagtataacctttaaatccatgtgtggttgaagatccgagtttttggatgtaaaactagtagaagttgcaggttcgattgcacttggaataaaaaaaaactgaccaaatatcaaaagaaattgatccataaccttaaaattgctcattaagctaccatttcaagagacatctatatgacaatggaacttaataccatgaaaaatattagtgattaatgcgatctgaggtgattagcaaggttttcgttgattggatccaagtgatgatataaacaaggagatgtggatgatgtttaacctaatcaggtttttatatgtggtttattactataatcttctaaccaatgatcatatgattttgtggctttgtttggacatgaaaaggtgaacaccaaactttggtttccagtttcttctatcaggaagattcgtcatcagtcttggatttagttaatagtgaattaggttcaaacttttaaccctttaaaacgactgtgacattccctaaatgactgtacaaagcagggattaatcaggtaagactgaggtcatcacttgaactttgtccacaagatttgtatccagtcctttattggtaaagaaggatgaaactgcaaaatcatatccatcaattcacaggttactaattaagtcacaattgataattgggatgtcactcatatcagataaagctaaaaagtctataacaattaccaacaacaaaagaaccagtggattggattcatcttgtgtcaaagggttaaaaagtactattgaacttgagacgtcatacctgtgctgctaatagtcaaaacatccaagtacaaaagcaatgaactgaaactagcagcactttaataaaaaggacaaaactcaaactttggatgacataagtaatatgatgaggtcaaaatttccagaaacagatagaagaaaaggagagagcatccatatcaaataaagctaaaaacttgtaatagttataacaaaaagggatcactctgtataataataaaagctcaaaaacacaccaaaaggaccaggcaatttcattcccatcaacaacaaaaaaaaagataaatgaaaacgaagagtaatatataccaaactatataactcgattcaatttcattcttgtttttttgttttgttgattaggaaatcgattaagctacagaagaacattcccttgcaaagtgaccttccttaccacacttgtagcacgcattatcattacctcctccaccgcttcctctctggtcacaatcacgagccaagtgaccagaaccaccacactggtaacacccacgagaaggctgtctcttagtcgcacaatctcttgcaatgtgaccaactccaccgcatgaataacaagttccactaccaccaccaccgcttctgacgtttccggcagcaaccttctgagtacaatccctagcaaagtgaccaacatcaccacaagtgtagcaaccatcgtttccacctttgaccgctccacgttggtctccgtttccaactgatttctgagtacaatccctagccacgtgaccaacatcaccgcaagtgtagcaaccatcgtttccacctttggtggctccacgttggtcaccgtttccagctgaagtacaatccctagcgaagtgaccagtatcaccacaattgtaacaaccttctcctcctctagatctacgttcaccacctccgccgccgccaccaataccacaatctttagagatatgacctaactcaccgcaattgtagcaaccgcttccaccgccgccgcgcctagcaccgttaccacgagagttattctccttcttgagagaaccaccaccaggagcagtaacattgacggctttagtcttaccgtcgcttccctgagtaatagcgaactcaaccgcatcgccgacggttaaactccggtaaccttcggagacaattgaagattgatgaacgaaaagctctacgctgccatcgtcaggagtaatgaaaccatagcctttagaagcgttgaaccagttcaccttcccggtagatctcgccgccgattgatcctctgaagccatcgttaaaaaaaaaagttgaagaagagattgagaaattagggttttttaagttgggaaatccttaggcgtgtgtgtgtatatatatatagaggtagagtgggattaaatctgtaattaagaggaaattaatgagaaaaccctaattttagtggggaatgtaattaaaccctaatttgactatgccgcctaattaaaaattttggtggaatattctttgggactggagaaatttaggaaacttgctatttcactttttttttatccacgtccgtttatcagctgtgcacgcgtccacgcttgaattttaatcgtggtcgtacgttatgattttcttacagtgaatcgcgataagattgggatcttagtccaatttttacattgggccaattgtttgtggtccaagatttttactctgatgggcttaagctggacttggtatggccttttttatattttatttcccgattcggctggttactactaaatcaatatccatcaaataaattgtacttttagcttcaggctatggtattgcagcttttgcttatgcttttcaaaactacaaaatgttggtgatcagtgatctctcattgtcaatacacaaaattaggtattgaaaaataaaactttatacaactttttgatagtggttaaaaaacagagtcacctacataaaaaatcattggaacacacgtggaaatcaaatcctagtattttctaataattcattcaatgggaaaattacaagtgaaagcctctagatcctcttgattggtaaagctcgagtctgctcttagcttcatacaacaaagcttccatatcttcatcttcaagtacattagcttgcttcgatgaccattccaataccgttaacacttcgtctttcgctaactgttcactgtctggaacattcatcgccacgtagctcagcaaaaccatcgccggaatctgtgctccgttctctccgaaatacgctaactgaaccagaagctttgatcctccagcttcgatgattgtcctcgagtgttctttccctaaaaagttatcctccgtcgcgaatttcgctaacgcgatcgctacctccgccgctaaatctggttctccgtcgtcgaggagttttaccagaggcacgatcatatgcgtttccgctgatttgaacgttctcgctaggtttccgatggatcttacacaggggatgagtaaatcggatccggcgtcggcgttttcaacgattcggaataactggtcaaccaccgctttgcacgccggtgaagtgcgtctgaacgcggatcttctcagatctgcgttttcctcagccacggcggttatctccatgatagccatagctgtgttatacttagtctcttcgtctcctttgtctagtaaaaccgcaaaacagagtaaagctcgtgactcggtgatgactcggcagatcgatgagtttcctacagcgagtttccataacgctctcgccgccatcgctttcatataagtcttcgtcaccggatcttcaagctctctccctctcgtcaccgacgcgtttcgcgattgatgtgcgatactaccgtaagccttgatctgtgaactcatactataactcttctccggtatcttttccgggggtttatcgtcgtcgccggtaacaaatcggctagaaagattcgatttcgatcctgatccaaccgctttcatcgccattgttgttgcaacgatgctatgcatctgattcgtcatcggactcgagactccgatatgattatcgtcgtcctcctcctcgttcaacgccggtaaattctctttactactactgattttactcgccattacgacggcgtgatgcatcgacgttgctctacccgcaacaaccgcgtatttgctatgttcttgaaccgtttcaaacgctaaatgactcacaagaagcctaatcacgttgttttgcgcaaacagttcttgacatttggcgtgattaccagaaacaagctctgaaacagcccaagccacaacggcttgaaccttcatcgaaccttctttaagaatacttgaaagcactgaacaaacaccaagctgaatcatatgctcaacactttccgggtcacgacccagtaacccgattgttctcgctgcgttttcttgaccgtcgattttaccttcttttacaagtttcaacaaagggttgactccgccttcttcaactatcagtttcacgtatctatcgttatctcttgctaaagaagccaacgacgcggcggcgtctgatttatcttccggcgaaccggtcatcagaaccgcgatttgttcccaaattaagcacaagattggttcgttggctgcgattggcgggagacctaagtaaccaaacccttcgtcgtcatcgttaccggctggagttgagacacggaggagccaagagacgtcgccgacggagttttctagttgagaaatcattttacggaatgctgcggcggggattatgttgaaaagtcgcattatgtagccatcgtcacggcatctttggaccatcgtcaatgctttttcaagaacgttttcagtgtcgtcgaggatacggcgcgtgggacgttcgtagaggtcggagcttgcacgggccgcttgacggagaagagcagcgagcttttccgttttggacttgatatcggcacattcttgtttgttgattgtggcttcatctccggctttcaccacttggtctgcaagttgaatcgggcgagacaatatctgcttggctagatcacccatggataacgaaactggttacgatcaagaaaatcaaaaacgggttgatcttaattttaaagaaaatgaagaaacattttgttggggtttggtttggtttggtctttgaaacacggtttctgtcatttctaatgtatttcttacagaacacgccggtcgtcgccggctttcgttgtcggagtaaattacttattagtacatttaccaagtcgtcttagcccttatcgttctttttttaatattaagcatattccatattttaaactttaaagtatgctagctaggaatataggatttcagaagtttatcaagaaaaatgctcaaaagcgattacaaaaatggttcaaatcttcaatattacgtttattgattcccaactgtgttttgggattctcatggtttaaatcccgaattcattagaagataacaaaaatagtataatataaaacttcatgagttttatgtataaattgagccgtcgaaatagaaaattgttggagatgtgattggataacttaagttgggccccaagacatgttggccaagggtagttgggtttttcttgaagtcgtgtgtggctacatcgaatgttagaactaaccatatttatttctgggccatgttttacagctatattttgagattctaaagaaataagaagataactagagaattattcaaagaatctcttatttttttcttgccttaaaggcacattcagcagctcgcatggacacaccccagaattattcagacaattcaataacaaaagacttaatcacttcactagacttcataatttgaatgggtaaagttcatgtcaattatttctcaacactattttgaagtagtacgacagatattacaacacaagtggatctatatttttttatatttaattatttttatacacacatgcaagcaaaataataggacaaattactctatagatatttgtcccaaacaagaaataaagtaaatacctaactaaatgattaaaaatctttttgtttacgaatttagagtgttatgcggtttctgcctcgttcgttttatgttaactgaacaagctaaataagtttttttcattaagtgtgaataaatgggttcgatatcatacaactctttttttttctccaaacgaagacaacgtggttacaatgaatcctatatatataaaatcaactggagcacgtctttcagttaaacgtcgaaaatgttttgcgcaaaaagtcgttgaatcacattttatttagtagcaacaaagtaaaaatctaatcacaaaaacaacaaggaaaaaaaaatagagaggaagaggagctacgagtttgagggatatttgttgccttcttttgcgttctatttgtcttagataaagaaaaaaaggacacactatctatcttttagcttctagaaggacattactggttgaaatttaaataaataaaagtatttatgacagaataaataaataaaagtatctaatatataaaaataagtcccgacaaattaagataaaatacatcaaaaaatcatagccaagaagatctaacggacctcttatcagtttactttccagtttccacaaactcgcggcgcgggcccgtacttttgtcgcctctagggttcattattaaaacatgagacctaaaagatgacgtggaagttactatggttaaatgaatagtcgtgcaaaattttcaacttagaacgaaatgaatagtcgttctcattgataaatcagttgaggctgttcagcctccaaatttgttaatcaaaaatctaacttagcgcttggaagacgttgaaaagtgatggatttgtttggctcacacggaaaaatcttgtttcattggccatgttcacgtgctctagtgggccagaatatcataatcacttatggctgcatccctaattgttactttcttttttggtcagttggatgcattatatcacaattgtagagattcgtatattagacgtatcataataatattgcttcggaattttacttttgtttcacaatattatcaagtagtttaacttattaatcacagagttaatagtgtagtcttgcttggaaaacaaaattgtagcataactttaaaaatgttattagtagtaacacatgactaaaacggaggaaacacagaatacccgcgttttagcattaacttggctataaacctaaacgtaattgattgcaactaaaataaaaccatactattagatttgtttatttattacactcggttattttgaacaagtaatatcaacaacaataaagaagtgctcaaaatcagtgcttagtgagcttaccttagggaaagaaaccaaaccataatcaaaagaaaatatctttttatatgattttcattgattatttaaactaataggattcacaaggtaaaaaaaacgcgtagatcctacgtaaacacggatacaaacggcaccgatcgctcgtgggggagggagcgtacggtaagcacatggcgtatgttagcacactagttcccgtccatgttagcttactatgattaaattacaaggattttatggcttcgtatttacactaattaactcgttctactaactcggtcaccgagttaactcactaccaacactgatcggtttcccagttccgtccgacgtagcttcccaacccggaggttccgacggtcaaaggacggctccgtcgcaacatcctccgatcataaacggagcgtttctcaggatcagaaagcgtacagtaagcggcatggatcttcatgaattcatccgccgatgaagaagaagtccgatcagttcccgccacgtctggatggcagatcctggctaatctccggtaagccgatttgatatcctgactcgtcgcgcctaaaggaacctcaagaacatcgtaaagcgaagctggcaccgtcgtcaatcgccgcgggatctgatgcagtctcggcgaatcttccgtgtaggtgtatgagcaagaggcggagacgagaggtggagagatccgagccgtgcgagacggcggagatatcggagatagaggcggagaagaagagagaaatggatgagtaaaggaagttggagatgaagaaagcatcgttgctatatgaaacgttttcgagttttgagtttctctgcgtttgttgtttttgttcgaggaggagagggaaagattgaagaagaaaggtaatggaggggtttaatttataggcgaagaggcgattagtcattaattggttaattaagattttgaatagtttattaattacatactaaaacggatataggggattaagttacgggtcgggtaaaagtcgggtcggatcctgtgatctgagtcagataaaaaaggcttatccagttggggaaataattgcagaagagataagaatgtagtacgtaagatattattcatagtggccaaattgttctgtggctgtaattgtcattttaacatattcttacaaaaatatattaatgccaaaggaatccaatatttaatttgcacagaaatactaatcacgttttggtttttagttatttatcatttttttttttttttaattttctttagcagaagagtattttaaggtggaaattcgaaattagaatcttcttattacgagtagatttttttttcttttatttataaaaaatataattggtgtatggagacgtaatttggaccatgtattgtttgttggatattgagaagacagaaatagatttttagaagattgagaaaagtctctactgtatttaaagattgcctccaccatacaaacattttttttaatatttatgtgctttattattttcttactataggaatggaaatataaaaagccaatggtaatctgcaaatttgattcgtgagaaattgttttcttagctcacagaatttcatgataccaactaacggtgtttgtacgagattacgataaaatacaaatgatcaagtaatataaatgttttcaaatgtatcttattataatagattactaatggttgtcaatgttataatcaaggaaagtcggtttattttttcttttgctaaacattcaaatagaagaaaagtcgactgaattatttttaaatttttgtattcttctgcgggaggtggtaattcaaaagaaccggaatcacggatggagattaaattaaactcattttttataagtatgggtcattagttttttgactaaactgacctttgaagttttatggataccctatatgagtaataattttagaatgaacaaaagataatcacaactcacaagctttttaagcttgtgatcaaacaattacgttgaaaagtcttaaacgggaccaactatgaaaatgaaaagagctcgtgcctattacaatcaaaattcgactctccttaattcttaaacaagatgatcacgtagaaaccaatagaccataattccggttctagaagattgtgattgttgtaagcaaactattgtaatcatataatctctacttcttctccaaccacgtgtttggtcgacatcccaaaatccaattggtgtggtaactagtgcccatcgattcacttgttcctagataaataaacttgtagtactcttcatcaaccaaatttattcatactaatcctttttttttttaccttttttttgtgtgaatgatgacaaacatcttgtattttaaaaagacagaacttactatcttcaagtcttttgacatcttcaaaagccaagtaaacataacatttttacatgtataaatcgaataaaacaatcgtaagtgacgtccaagattgacaccaccaaattcgtgggtgacacattcccttccatcagcattttgagctttcatgtcatcttccataaaatataaagggaaataaaataatacataattccatacacacagattacgtatacgtatacgtatccatgtgaattaacataaccttatataatcaaatttctctgcaacttgtaacattagtatattagctgctataaagctaaaagttaatcacatttgaagaaacaatacattataaaacaaagagggataaactgatagagacgttggaacgtggaaagaaccttgatccagcaactttacacattgccattggtcaagtctcttagagattaagacaacattaactacataccgacattgtcgagtttctacggtgtacctgagctcactagattaaaatccttcgttcctcaatacttatcattttgatctcatcactcttttacttgtctctgaattttgatgaagcccatttgaaataaccacagtttgcttctggattagaggaaggtccctgcaagagttgtagatatacttagcatgtagttacaacggttaaaaagacttggttaaaatctttttacctcagctcgagagcagacgtagaatctgcgtccgaatgtgggacctggtttcttgacgaccctagcaacacaagcttctttatgtcctttgcagagaggtatgctgttttgcattaggttctgtattctttgccactccattaaagctgcatcgtttttttgtttagctgaagaacctgtttgatcctgttcctgtgttgaagtagtcggttcactgtcttctttgcctgaaacattcggttctgtgatgctttctacttgggagctgggactggaggaaacataggaagaagaactatcctcgacattgtttacttttgagtttgtagtgaaaaaggacttgagagaaagctgagatgattggattttccttgcttttttcctgtctccatctctagagatattcaaagctctaactgatgatgcacgtattccatcactaaggttatcaatggaacctgttgctgccaccgtttctgcttctgtaacgccggaagtggatttgttctcaaaagaacaagatttctcaagtgaaattcccatcgaaccacaatttctcagtggtcctgtagaaatatccccacaaattgatgaagtattactttgagttgatgatgaacatgacacctcaatggctttggcttcttcattggcccgcctcttcttaaataccgatactgttacagtaaaaaaacaagtgaagcaaattataaaaaaacgatagagacaggaataacttgagaatatgaaccaatacaagacagcggaatatataggaattttcttgtaccaagagtttgttggaaaccgtaaatcatgggaagatatcttgacgctaatggcggcgtgctgtgttccgggatgtctggtaaatcatcaaaactaatgaatacaggtacgtggtctgatcccttaaattttgtaaccaatccacctttccacctgtagtgtgttcagaagttgattcactgtaaatttgagatccaagtaaaatgaaaaaaggaaatctcaagtacttattcttttaaattgaaacacacatgtgatcattcttgatcatctagacttaccttgttggcatattttcattcttaaaacgcttatactctgttaatatgtcacattccttgacatggcaagcaagaaaactatgcccctgcttatcttcgtcctgatgcaagcatgacccagcaactaagatatgatcaatcctcgaaccgtagttaaattgttctgctccactacttgaggaccaacatgtgaatgcatctttcctgttagaaatccagaaagaagcaatcaatgataaacaaaaatttcaaagactgtctccctcaataatagaaacagaagaggttatcacaaaatttcacctttcaggatgttttgatctgaaaacatcagagaatgagcctccacgttcaactagcagagatctaaaccatttcctgaacctgcatttttttaatgacatgaaaatgagatatctagtagagaaaaaattattaagtaaagcaaagcgatttaaacagagcatgagaatcagttacatactcgtttttctcaaaatcaggcccagcttcacatcgatccatagcaaaaggagcaatgttgagatccccaacaacaaataccctccttccttgacgcagaagacactcccatcttctctacaagaaaactaaaaaacatttaatccaagtatcattagaagccgaagcatctcatcgatacattcagaaaccgataaacttacctctaaaacaccatagaaccgatgcttaaactcgatcctatcagcatcatcagctacagctcgcggcccataaacattgaaaacaactgacaaaacacataaagacatacaaactgtaacaaaaagattcatttttacacaaaagaagttacattaaaaaaagaaaaggatttgagtcataccaaagtggccgtgatcagttataacacatcgtccttcttggtcaatcataagaagctcttctttctcatattcctcaagaccttcagctactgtagacgtttcactcttcccacctcgtgaattactgtttacaagaccagtgatgccttcttctgcagtaacaggcaaagcagtttcacagcttgaagatgctgacttcaccctgcaaaacgttgctacacctgcaaaaatttcaataacataaaaactccaactttttaacattttctcaaatttcactctaaagccactgaaggcaaagcttgatgcttaccagaataaccagtacgacctttctcactagtgcgagtgcacgagaaaaacgattcatacccatcagctatcgccaaatctgctgtcaattcttgccttctcagtttcgtctcctagattcaaccagagtaatactcttatcatggattcatcggcgaaaccgaagaaaaggattgaaatttcaaaagtcgagtaaaacctggaagcaaatgatatcggcgtcgaacgaatcgagaagtttgagaagagaatcaaactgcgaaactcgttgcctaaggccattaacgttgtaagtcactatcttcatcttctccttcttcccactgtagttcgttcgacaaagatcattcctttaggggaaattgggtatctctaagattggacggttgagatcttagaagactaaagtcagtagaatcgacggttgacacgtgaatacgtaagtttgtaactaaccgtagcatatgatatcttttcaatggtggcgcgtggggagcacaagttattgatttgcctcgtcggcgtccaccaccattatcgccggatttttatatattcacgtagaagaagaatgagaagacgaaaaccaacttctacttcttctcagtggctctctctttatctttcttggagtttagttagagattttaacgttgcaaatggatcaaccaatgaaaccaaaaacttgctctgaatctgattttgctgatgattcctctgcttcttcttcttcttcttcgggacaaaatctcaggttttagtgcttaaagatgttaactttacatggctgtgtcatgtttattcatagtttcgtctaattacagaggagctgagatggtggtggaagtgaagaaggaagcagtttgttcccagaaagcagagcgagagaagcttcgtagagataagcttaaggaacagtttcttgagcttggaaatgcacttggtatatatcttttcacaagatgaatacagattttcaaaattttctttgaattgagtttagagtaatggtttctttctacagatccgaataggcctaagagtgacaaagcctcagttctcactgatacaatacaaatgctcaaggatgtaatgaaccaagttgatagactaaaagctgagtatgaaacactatctcaagagtctcgtgaggtgatttgattaactttgtccattctcttattggatttatagttgaatatgctctgctcaagtgctcatcttccagttcgtttgatcagctaattcaagagaagagtgagctgagagaggagaaagcgactttaaagtctgatatcgagattcttaatgctcaatatcagcatagaatcaaaaccatggttccatgggtacctcattacagttatcatatccccttcgtagccataactcagggtcagtccagttttataccttattcagcctctgtcaatcctctaaccgaacaacaagcatcggttcagcagcattcttcttcttctgccgatgcttcaatgaaacaagattccaaaatcaagccgttagatttggatctgatgatgaacagtaaccattcaggtcaaggaaatgatcaaaaagatgatgttcgtttaaagctcgagcttaaaatccatgcctcttctttagctcaacaggtgagtgatctcttcaatagttttgccaacaagctctttcatggactgaccagagtttacttccatgcaggatgtttctggaaaagagaagaaagtaagcttgacaaccactgcaagctcatcgaatagttactcattatctcaagctgttcaagatagttcccccggtaccgtaaatgacatgttgaagccataaaccaataaacatattcccctgaacttgtgtttaataccgtgattgagaaggtaccatgattaaacttgttgtagattatccacatgattaacgatgtattcttatcacaagcaaataaaacacaaaagcatttgcttatatctctttgcaactgaactattgtctatgaccgatgttataagacttgagaaacatattcaaacctaacggcagatgtgcgttcctcggtatcctctatacaaatcccatctaacagattgtgacaaatgatgtgttctgttcctgtacatgggagattagagtttgtggacttggtgatttgagaagttaaaaagtaatttacatcttttgtgaaagctggtaaccaggagggcttttaacattttttgacttgaggcttgcacttctcaaaagtctgcgaaactcattgatgctgattctcccatcttcatctacgtcggcctcttcaagaagtggttcgatggagccttttaaacccgtttgctgcaaacattgattctagtgagacaaggtagacaaagaggggagtgtgaaaagcatgagactgaccaatctaagttcttcgggagttataaacccatctccgtctatgtcaaacttgtcaaatgctgctcttgacctctgttgccacttctcagagtcatgctcctccaattggttcacgtgcaaagcagccaccacaaactcagtgaaatccaccaaaccatcagtgttgctatcattctgcagagacacataaacattttggatgataaactaacctgtcgaaggggctttaattagtcctaatactctaagtttacctaccgcttggagaatctctgcaactcttgcatctttgagtttccaaggaacatctttcgcaagagcctgttaagattagaaagtcaacaaactctgttgcagtcatgtgttgaaatcgcttacttgtgctgtcttcttcttacctgcctcatttcctcaaggcttatagaaccgttcttgtcaatgtcaatcgcatcaaactggtctctgagatcatccagctcatcctcattaattgttttcgccagagcctccaaaaacacaacaactcaggttaagaaaaatactgaaaaacttaatcgtatgaaatacaaactatctctttctctattaccctaagtgcaatctgcttcagacggctgaatttcacaaactgacgcatattgttaagaacagatatgtctattggaacctctgaggcctcacctccttctttcacccatgaatgtgctacaaaccaaatccataagttgagtaacttataagttaaccaaaaataatggaaatatatggcatttgcttgtgcataacatacatagcgcttgagctgctgttaaccgtgcccgaggctccttaactaacaacttcttcacgaaatctttggcaccgttgctaatggttggccatgggacttctctgaaatcaggttttttcctcatgacctgttttttcatgtcaatagtatccatgaacaaacagattatatagattggattgttttctcaagaagatgagtactagacctcattgaatattccgtcttgagtcttatcccagaagggtcttctcccgcagagcagaatgtaagtgatgacaccaatactccaaacgtctgattcaggtcctgacctacgtttcaacacttcaggtgcaacgtagtatgcgcttcctactatatcctgaaatttcactcctgccattttcacaaaatcacctccattatctaccattctgctctcagggacaagacttgacaagtgaaacttttacctggctttatgaagtccgacagaccaaaatctgtagcctttagagatgaaccttcttcggttgatttgaacagaaaattctgagagggtaagggatcataactcttcttaaagtgatgaagatgctttcacatatggatttgcaatttccaagcattgaatcaaactgaatcgtacctacctctggcttcatgtcgcggtgaactagacctcgtaaatgacattcagctgcaactttcagcatttgtctcaccacaaccgctgcatctttctcggtgtaacggctatctttcctggaaaatatatacacataagttgacttgatgtaacttcccatcttttcttacagaattttagcattacttctatgttaatacaaagttttgttaatcttacttagctagtattcgatctagcaattcaccaccgtcacataacctgggaaaagaaaaactcatcaaaaccagagtaaattcatttttcttgtatcacaagaaaaagaatgatagtaaaaacagagacaaacttgagacttactccatgacaatgtaaatataggtcttgtcctcaaatgcattgtgaaagcctaccacattctcatgcccacctaaagcttgtagtatcttaacctctcgcttcacatcttccacttcaatcggttgagtcatctgtaccacaccaaaaacgccatggagttaggtgttactcgtaccgctttcgcgctaagaaactgtacgatttgggagacactctaagggaacaagcgaaaaactagagagggagcttacttggttttcaagcaatcacattcgtaacaggttggatttttaggtttccaaatagtaattaaggatctttagctaaaagcaaataacaacaatagatgatatttttaccttggccttgtcgattctcttgactgcaacgcgattgccattgttgttatcggtggcgacgtaggtaaagccaaactggccatgtccgagcaatttcccaatggtgtatcggttatcgaaatccttagcgtacccaaaatcgatgcgtttaccgtacgggatccctccttggtgcctcaattggatcttcttcgtattcttcttgtttttattactaaccttctcactcgccttcccctgcgtcggagaatcaggattagggttccgactaccggtgccacgtctggtggctttaggagacgagaaacagagacccatgtgatgcttgttgggtccctactctaatggaggatattttcacagatgagcgaaaattgcaaagatgaggaaggtgaagcagattgtacttgtttacctaattaatgtttttccttagacaacgattttcaaatcttgttgcgcacgaaaataaaccactatttcggcagttattagcgttggccattcattttggttattaccatttaaacttgtgagttgttgtgtgtagagaaacttccagtttttttacttgaaagatgagatgttgcaatacaaatcattcaaaaaacaaaaaccctaacagagttttgagctcataaggttaactatttacaaacctaaccaattcaaactcagattctaccccaaaatggttaaaagtttccttcaaagcaagttagaaccaaggatgccatgttggatccatcatacataggttgcgaggcgacaaagctgcctccaccaattcactcacacctctttgtacagactgtggcggctccaccgagttctcatcctgaaatgaataacacgaaaatatcagatttattagttcagagaatggacaggaccgtctccgagttttatgagaatgttagtaagcatcaaaaactcgtggagatgtaaaaactgattctacctcttcagagaaatactgtggtgctattcctctgattcgtccaatgacatcgtccacgttagagttaactttgtgcttcagctcgggtgaactcaaagtagcaattcctgcaacaggaggaataggcactccaagaggtcttcttccaaaccatgacagaagctcatcgcgaaagaacatggctagttgataccgaagatgttcgttttgctgcaaaattgcaaaagagaagaagaggttagaggccaaatgatttgagtgcaccacttgagcttaggtaatattttctattaccttggaggaaaaaactgcttgagatgcggaacacatgtttgacatgagaggaccttcgacaccaaaatgagagagaaatgcgtgcatgttccttgtgaggcggaaaggcacaggttcgttgagctcgatcatcccattggaatcgtaagatgggtgaaaatctgtctggaacatttttccagaatttttggcgaacaagatcttgtttggggatctcccaccaatttgtagaatgaaggacatgaaattggagacagctagctggacagcaaattgcttcttgaaagcccaaagatgacttccgctcattgatgtcttgtacatgtactgagagaatatagtgtcattgactatgttctttgtgatttcaccataagcctgtagccgaagatctccaattgcttctggtgagatttgccctgtgatagcttgattgagtttctccttgaagtaggtaataggaagatctgactctcgaccattccttccacagtgattctcatacacctcaaggaaagtgttgtacatgagatcatcctcaaccattcggacctgtgacgaaaaatgttagcatgcgatactcctagagagatttacctactcttattatggacagcgaaaaggatagctaagctgaatatgtgaagtttcagggaaatctcgtaaagtgaaccggacatgaattataattttttcaaggtatacctgagaccagacagggattatgattggagtgtgaagtcctaaatggcgtcttctcgactctttatgcttgtcaaacatttgattcatcacgcggaaaagctgcaagattcgttcgtcactcctcgcattaggagttaatgatgtttgaacaataaaatgcttttgcgagccatcagagccaataagagtcaaacgtctgcagctgctcccatgccttcgtacaatttgtatgtctgctccaaccctatccaactttactgtatgatcaggtgctacttcctacgcatttaaacatataattaggtcaccaccaagcacaaagagaaaagaaaagaatgaagggcaaaacttctataatttatagcccctctagagaatgtaaacgttgtaagtaaacaagagacgaggataacaatccaaattacctggtcagcaaagtactgtcctggtatctccacatcaacaacattgaagtcgcgcagcaccttgctctcgtcttccaatctcaacagaacagggaacctgtcttcaacattgctctgaagaatgtttttccagtctttcagtttctttgtcagatctgcgagtgtgacagggaatgaattactttctggatcaaggtcacgctcgaaatcctgtttgtattctctcacaaatgcgacatgcttggtcacggcatctgcagaaaaacaagctctgcatacgcccgagagttctttcttgagtggttggggaacttcagcagtggtggcagttggatatttgtaacatcgatgcaacaaagcattcacaactgcaagaagtctctcttctggtaaagtaacaaacctcgaacctatttctgtgagaagaacctgagaggaattatacatcattagattatccaagtaaagaagcaggaaacgtgcaagtgagtcaaaatctgaatccaagctacttgtaccagacagtcgttttctatactctctttttgtatggagagaatataaagaaatcaagtatattcaccaacagaatactacctcaagttcactggctaagttgttatgtttactcctaagagcttccataacatcctttgcagcatcaaaagcaccagcagcagagattgccattgaactgctttgattcataggctgatcattccccgaatgcacattgtttatcatagtggcacgttcactttcttgcacatgtaaattaccaccatcatgggttccaacagccccactagtttgagaaccttgatggatttgagtttctgatggtaaattacctccaccatgacccgcactcacaccaggaacattctgctgcattctttgagccaaaactactctgctaagctcagatttatttactgcatcacggcgttccagtaagtatgtgcgaagccagtaatagagagcctgaaatggaaaacagtctcatactcatgaaatgaccaaaaacaaaagttcatctaaaaaattcaaaaaggaacttacctgcgggaacactgcagcaattttcattagaaccaatttgcaatggggtgcttcagttcgctgcaatgaaatcaatagctgtggtatccaagaaagccatacccagtgaggtacttggtccaagtgtttatcaaatattctaccaacaggctcatttgttggatcgaaactaagtagataaagaacacgagccatgtgacttctggaattggaaactccaaatcttataccctgaagaaagcaactgacggcatattctaaccagatttcatcttgtgtatcttggtatgcctgtaaaacgaaagtaaaatataaggtctaatatgaggagagtgactgttaatagcgtaggaaaagaagcaggatctaatcagaagaaataccatgtcacagtaatttccccagcttatccatcctttgggtaaatttttgaatagggtgattgcgttggaatatgcaagattagcaccttcagtgtcgtttagcttcaaatgaaaatccccctttagtcgaaatatctctgccttgttcttcgctagaaagaactccaaatttgtgctattaacaagattaagaccagtagcaagctctcctttcgtttccagatgagcttttgcttgctctttaattttaacaaaggcttcctgcatacacaaacatgaccaagacaactttaaaaataacaatctttcaacctcaaacaaacacagattcagggaacggcaacttattatataggatcatggcaaaggatgaggtggcatacatggcttcaaatatcacacacatattaatggatggattaacagctacgccaagacattttttaataaacgagggaaagttttttaaaaaagaagcaaattaatgtgaaaactacttgttgaattcaaagatgcagttctgcaactatatgaaatctgctcaaattctaataaagttaaaggtctatgagaactgtacctgtacttccatttgtgagtgcccatacattttttcaagtatctgaacgcaaacatcataaagcccttgtttccgagctatcctagcaagcttattgacgttccaagctttgtcacgataaccgaggtggtgaagtggagtatttgaagttacaaagtccttaaatgcatcaataacaacgttatacatttcattcctccactgcagcatatcataccagacggtcatattgtcccattcatttggagtcctcagcctccaagtctcaagaatatccttcagatctgcatatagatttccctgtcccccaacagcagcatttccaggaactttactcccatttgcgatgtcaacataaattctagaagactcttggacctccactagttgttggaattgctgcagtagaggcaccctagcatgaagagacatttccggtaactgccaccactgttccaaggcaagatcaacacctttcccaactatgttttcagcatctccgacaccatttgcatttttttcatgaagggaaaaacaagcttgaaccaaacgaagctttggcgtctcttctacttgtgctttgggtatcacatgatccttcaagtatgtccaatctggagctttccaaagactatcaagcaaaatttcataattctcagtgctttttccaaagtccaccagggcatcccactgaccaagttgagtggcacagtggagccattgctcctcccacaggcacatttcagtcttaggtacggtgttattgtaagtgccttgggttgccttaaccatcgcctgataaaaaaggctctgagcacgctgccaaaaaccatgttgaaccattgaaaatccagctctcgattcggtagtgatggacctactcttccacaatccaaatctcctgtcttcttcatttaacaaacgataaagctcagcaagagactcagcacatttcgagtcattcgtgaacagcatgacatgggtctctagtaaagtcaatgcgagatgccatgcattgtacgtttttcctatatatttgataagctcactaggcatcctaggttgagggtggctcaactgaagcccttccagaagtgcttgcacaacatttggcctgtgtccttgctgcttcttgtggtagtcctttgacaggagagaaatcataggtttagctaatgctatctgctcttccttgtgtagggttgcccacacaattggaaatactagcacccacaaatgataagcaacattggcatctgtgtgagccagctcccttaaagggataacaacatcagcaacctatagcgggaaaaagagtacatataatttgttcagattaatgcagcttccaaagtgaataaaacaccaaagagccttaaataattcataactattttcgatttaacaggacaaacgaaaacaccataacgactcagcaatcacctgaagtttgcttgccgcgctaagaaattgtgaatgcttcataacaatgctatcaaacattgaagcaacttcttcaggtccctccggcataacaggtggttggtgatgtactccaggattttgtgaaggtaaaagtggtactaccctggcagaatttggtgctagagtaatgggcttctcctcgattaagatggctaggaggagatcaagaccctgtttgagccaaaagacatcactcatagcttcccaatcttggttttggataatgtactgcaatcgtgcaaacaaattgtttccgagagattcgtggtataacaagaagaacttccttcgcatatcaggatcccttgcccgtaaaccaagcatggaatgtctctcaactttcagagagatctcttgtcggagtgccaacggatacctatcagtgaaacagatgatattgtctctctcataaaaagctttgaatcaacataagattaaaataagaacttactttgttgaatcggcacaaagtccatataaaagctggagatacaccttatcccactcatccaaagcaacagatgagaaatgctgcttatcaacctgtgaaagcttttgaagaaaagaaactatatccttctgggtaagaaaagcaccagaggacccagaagaacctttctttccgaaatcatcctcagcccacctttttaacatgtctagcacgcagagaagcaggctagaatcagtacccttttctgaaagcaaagtgttcaatatttgagtcacaggtcttttgcaatccgctaaaagcataaccctttcatcaataagttccaagaccaactttatattagatacgactgccccaacatcagcagattcagactctatccgctggctctgaaaagggacagcaaaaagccacaagagtaagccatagttggggaagcatgtaatggatacctgattattatttcgaagataggaaattttacaggagctagctaaagagacagaaatgatattttgactttgatagtatatacgtacagaccaaaaacatgccagcaagatgatgagtgagaggaatataaaagctaaaatcttacaaggcatgaaatgaagatcgtatagctatttagacgacacattatatttagatattctaatactgtcaataagatgtggtgaataccatgtaaaatccgtttaagctcaaatataaaacatacgatttttatctcttaagagaaaggtagctcttactaaagaataacttacttgtctaggatgagcacccgctgccaatcccagatcccgcgaaagacgctgaaggatatgcaccagtacataaggatcaagaaagtgtttctgaacctctgccaaggttttgaggacaacaagtacaaagctgactgaaccgagagagttatcatctccagaagcttgtgaagcagtaacaacatgcacatgtttctgtatcagctcattgactttctgatataatagctttatctcaggaggcgtactagctccatcctgtgggaaggcaatgaagaccatcttcaacaaagagcatagcgatttaccagcgtccaacatcttgtgtttgaaagatagctcaaggaactggtgaagaacagaacagtcagcaaagaatagaaatattttcatatattagattaaatctggagcaattatacctgtgagatctggctgatgttgttcttaatgaaaagatgtggctgcttctccagaaccttgttcatgacatccaagccctgagcaagtgcggtggacggatctgattgagacggtggcatgctgctaagcagcttttctaaatagttaaacttgacgttcgcatttggccaaacttccaaagcttgtgaaagaaaatctaaagcttgtttgtacatagtgttggcttccctgtccttaggctcaattaccacagctacctgttcaagaaagagaaaggaaacttaaaacgacagtcataaagagaataatatcacgatcaaccaacataattcgagactagaggtggtcaataaggtgtagaacttaaccagatccaaaagaaaacctacaatccgcataatctcattatagattttcatacagaatactatactgctttaagactgctaccgccaaacatcatttctttagaatgcaaattactcagagaggacgggcctctgtaattttgtaactcccccgcccaatagatcaaaaccagcaagtattaacatgccccaaggtagaaggtgggaggtgtaaagccttactcttataagaaagttgatgattagttcttccattgcagcatttggcttgaattcctcatcaggctgggtagcagatccaggagtttctacattggggattgacgatgcaccaccaggtgacataacacacaatgatgggagaccaggttcaattttaactcgtttacttgggtcttcagatatggaagatccagcggttgagagcttaggatcaacaccggatgaaggatgtaacccatcactgacctcactggttgcgtcgccatcagtaaccattttactttcattctgtctttgtctctcccagctgacaactaatccagcaagttcaattgcaagccgcctattttctgctgtagtgttatatggcaaacctagacgacttaaagaattcaccatctgaggaacaaactgtgctctacagctgtaaaaaagatctgagtgccggacaatgagttggaagatgtggatcaaatttggaattgagtgaccctcctccaccaaaatttttttggtgtatctaatccaaatcggcattcttgaatctccaagtggaagccttttaggtaaagctggcattagaatatccagggcttgcttaactagcatcttattctctggctggcatgtcctaagaagcgcaacaaaaacctacatccagtcgacaaaaaacatttgttaacactggattagatggaggagtattttaggcacatgcttgctttcaggttagaaatgacaatctgcaagctcgataatggaaaaaagaggtaaagatgacatattctcttataagaagttccaattttcactctacaatagaaacaatacggaacaataaacatcaccaaagaaattaaaatgcccactggtacctggcagaaaattgaaatggtacctggagaatgattttctctggagcctggtaagcatccaaaaagtggcaaacattaacaaatgcccactgtttactggcactatcttcccgtttgagatgattccatccaaacttgataagttcttttctgtgttgaaccagatcactctgaagatattttagaagcaaagtagctaactgcaaaagttcgatcctcaagggttcgtcatattcagcagaaacctacaacatttgagatgaaatgtaaatcagaacaagtacaataagaccatgtcagaaataacaaattggacaggttactatccttaccatttacatccagaaaataatacagtaatctttccccacattaatttctgtatcaacaaaaatttaagttgcttagaggagaaagaaaccaacctcttcaggtggatcaagaagcctctcaacaatggtcttgactatatcagggtcaataacttcccaagtttggccgttttggaaggcatgggcaagcattggaagaataagcatttgcattgcctgaaccagatgatcatggccaagttgtttcgactgaaaaaggtttagaaaatgcaaaacaattgcttttttcatgtttggtggatattcttctgcaacctgatgaaagaacctagttattttactagagctgcaacatatgagaatcaagcatgaaattttgagaaagatacctcaataatgtagaactccctcaaaaaggtgtagtcgatacgactatggaacaagaaaattaagagaacatcgaaaagaacattcatttcagatttttcatgtcgcagataattgaggaagcacttgacaagccatttgctctcttttacctgcgagtttgagaaaataaagatttgagatggccaatttttctgaataaatttaatattttgatggggaacgagtatcccagtaaaacaagatggtatagatataagtcaggaggctctcaacatacaagaccataaagactcccgataaacacaacacctagtatggactatttgaaacatctacatctatttacatcaggcaaatttgcaattgtgagatggtttctgtctttctgatgcccacatcagttttagacacggaaacactaaaagtgagcatttaatttcagtttgaaacacaaagctaatgtagaaaattatgaaaataagaagtagatgaaaatacctgaactaaagtcaaattttgctcattctgtaaacgagatgtccttgcatgtgatttccaaaggtgggccaaggcatcaaaaatagtacggttgctctgcagccagctgggtatcagtttcaccattgttttgataagatagagaccctgaaaatacgcatctgatgctacatttgattttgttgatggcgtgttagaactttctgatttcataggggtgggtttttcatctccagatgatgcagctggaggagttgaagctgctgcactcagtatggcatcagattttggcaaaatttcaggaaaggcatatgaaagtatcttgtgtggagattttgcaagttcttcccttaatggttggccagcatctgatcgaattatatacataaacctgacattatacggaaaagagggaaacactcattaccccatggtcacattcagcctaacatgagatgtgaaagaaaaaagaaaattctaatgcaatgttgttcttaccttcggaaatattttggttcacttaatctggaaagaaaataatcgacagctagagttgcatatcgattcaaaaacttggtaagcgggagacggtatgggctgttaatttcactgtacacttgtcctggaggaagagctgcttctaagtcgatagttaatgttacaagttcatctagaaattttgatgcagcaagtggaagtaagtggaagagctcgataatagctgccacagaaagaacaaaaaaatgtgttaatatataatcacatgaccaggcatctgtttttatatatttccaagaacgtgattaccagctgcaattttcggctcttcaccagctttccatgatttctgggactgtgcaagtttctctggctctaaccactttttaaggtgctccagcaacttacatcctaatgtcacattaaaccaatttgatagaagttcaagaagacgtgccagaccttggagtaaaggcatattgagattctttgtctgtgccagattaactagtataggtctgaggctactctgaagaagttctttgggcatccgttgttgattgataacctaaagaaaaacagagtttcagaacagcaaaatagtatattaaataacatcatttatcccagaaagagaagagggcttttaggtagaggaaaacctattccatcaagtctatcttcaaaatcctcaaattaaatgtgcgtgcaagaattggaaacaaaagacagataactacgaacctgtcttaacccctccttggcaacggtcacaatttctggtgctcgacacgttaaggacttgaaaaacatggaaattatcttcgcacgtagttcattgtgactttgagttcgaaagtcagcccaagccatagttgtgcacagaatctcaatacaagctgttcgaagtctgttcaatgatgtaaggactttaggactcatcaacttcacagcccataaagcttcatcagcctcagctatttgtaacgcttcttgcaagaaattaaccaactctggagtcacctttagaagggggggcctcagtgctaaacaaaaattcagagctgtcacagttccaacctataaggccatattaaagaaggtaagacagaagtccagaaaggatttacaacaaccaaaaaatagcagaatgaggcacctgttgatcaattgtctttgatcgaagtggacgcattataagtggctgcagcaaaggctggtataaaggctcaagcagttcagatacttcactaccagtccggctagccaaaagtgcaagacagttctgaacatttttcctcactgtgatggatgcattagaattgaacaattcagtagcaagatattctaccacatcttgaaagctttgtctgcgcgcatcattgtttgcttcgtcaacattattaaccactcttagaatctgtataagaacctgacttgtctcgtcttgctctttgctagcataaacaggaagcctcttttggacatagaccagaccacgtacaatttttacttgaaacagacataatgtttcaacattcactttccctaccagcgcacctaatcccattactcctcccatttgcgcttgccatgtgctcccataacagcaatgcaacaaccgaggtaaaagttgttcaaacactggtattcgcacacttggatggggtgaatataccggatttgtagaaggactggagacaatcatagatgcactgtgagcacccctagccatcagcacatcagcatgtttgatacgagcaaggaacagcagagtttcagcaaacacatttaacgaagtcagagcagctttggcatggagcctgttttcatctgcaagcacatcaacaagagcatctaaaaatattaagggatccagctgttttaagtaggtagaccaattattcttgggcttggaacttgttgaaatcaaagaacccccaagtggaccagcactagtggaagtatacgacgaagtatagtccccatgcaaaataattgcaaaatgccgacatatgtttacaacaaagtcatcatcggagtcgctgagatccggatcagaactggcagcaattatagttatcaatagtgtcttaaagatcgacttctcagcgattaactgcgtctttgttttaacccctaagtcagcctgcagcaggaaaatgatcctcttaataaatatatccttttatatcctatgacaccacgtaccacatatcatgtaaggagaaaaataacttgctcacaagaaatgacatgacacagtcctagctcgttttttcagaaaatacaaacacatggcaacaggataacagatacaaaatcgaatcatgtctcatgtcaatgtggttcaatcaagaaaccatcagcagcaaaaagatcctctctataaataaatcctttacatcctattagaccattacacaaatgatttaagttaaaaataggcaactcacaagaaatgacatgaaacagtcctagctccttttcttttaaaaaatacaaacgcatggcaacaagataacaaatacaaaatctaatcagtcaatgtggttcaatcaagaaactatcgcctaacaggtagccccgtcttcaacatcacgtgatgtcaaaaacctaatttatgaagcattgtgaataatggagataaggtaatggtttaagaaaacgtcagccaactgagtagcaactttgacattgaccagaaagctacagagtaaaactataaagggattaagattataagagaaattccaaaaaccaacctctatttctgttgattcactcctgcgccaaaatgaatcaacagaggaaagtaacaaagttgataattgcttggtcgtctgaccctcatcagtgacacacccaggcaaattaagctgagacaacaagcaaacacggaggaattttagagcttgctttttgtagtatatctctgtagtgaggtttttctgcataacagctgctacagcaagattaatgaatttgtccattggcacaagaaatggagtggacggctcaaaagtcagaactaagcgaagcccatgttctggattatctttgcattcaagtgtaagtggctctttcagaaatcgccggttgcgaccacccaactttcccacaatttgtaatgctttaccaccccaaggatatggcaccggcttcaagtgagaccataatgctaagatcacttcagacattacagttgccatacttggctccaaaaaatcaggatttagactatccacccagaattcaagggtgcgtagccccaagctcacaagttcatcacttcctctcaaacaggatacaagaggcctcatgagacggggaaggtaaggcaataaggagcttaagcgtgcagggagtgtcaaagaaagttccaacagaagatctctcatgtcttccccggctggaccctcgagcattgtcagaagaatattaagacaaggtagcagcatagggactaaatccctaagaagcagctcgaatttacatccagcaagtcctctgaaaacagttcggagcaattgcatataaccaagaggcttttcaacttcagtagcattcttcatgcagacttccataataagaggcacttgaggttgcaatatccgttcaaaatcagatggtgcttttgacacagccccaaagaggcaccggaacagatgcagaattaatttagttgcagctgaatctggattcttcagaacatcgagcttgctgcttaccaagaaattaatcagaacatctgcaaatggcttgtatactttgggagcttgcagaagagtggcaaatatttgaaccagttgagtattgtcgattatgcactcaaaaagttcaggcatacatatagagaacatatccattagatcacgaggttccataacagccaaaatttgggagaaaagatttagcatttccttctcctcatccttatctttgaagagagctaggcaatggacaccgctctttaaaacaccagaggctttccatacctgcttgaaagtagagattactagttgtttatcagccatacattattaatgcctacactaaacaatctaacattcaatacctcatcttctctcattcctttaaaaacctgagtaacagatgactgtgacgcaagagcttgtgggtgcattccctgaggtcggggcaaatgtgcatgggttatactccatatgattgtcttcattcctgaatagaaagtaggaaaagtgcttaacataaacaaacataatcaataagtataactgatccactaaggtgaaacgtcagtatggccaaaattccatacccatcaccagtgtcttgatcagattcttacaatcattcacttctttggaatgttcggcaggaacctgcaaattcaaaactgcctgcaaccagcatggtttggtaattaatatttttttgccagatactttctatccaaagtaaaatataatgaattattaataaagaaaataatgcttcagtagaaataataacaggctttagaaacgaaagtagacctctatataagaggacataagaacattaaagaacgctatggaactactaagtttggacataacagcggaagtgtggaacacgatcccccattggctgataatttgggtacttactaagacaaaacagccaccatagataattacctggacaggaagttcaagcttcgacctcaaagtgatttgatcctttccgtcaccctcctctaaaagctatgaaggagaaagcaagactaagtaacacatcattgaaataaaagagttgccaatcagaatcgataaaagttcaagatttctctttttttgcaacaaaagttcaagatttctcaacaaaaccatgtaatctgttacagctagacataaaatataaaaactggcatatcaagcaaaacctatacaaagacaataaacaacaacgctaaaaagctgaaacaacatggaaacttggaaagccaccagaattacctgaggaacagtacgcttgaaggtattgaatttcccaacaaaggcatccaagatacgtccctataaacagatgatgagtaaagtaagttaatgattagagcagccaaccgattctaatatgagctctcaggtgtaaagttataccaacaatattcgcgcttcatccattgactgctgatcaatgcctttctcaaatatcggttctacctgaacccaatataagtattaagttatactaaaatcttgattcaaacataatggagagattatgtcacataaatgttaagtaatatatcgaatttaaataaggcaaactagatgaaaaaaataggtttaccagatttaacatcagacgcgcacaagttgtatggatgttaagagagagggtcgagtcatgcatgttccttgaaaataagtagatgatccgcgataactgccacgttgtttacagtcaaataagatgaattgtaaaagaaaaatcacccatagagtagacaatggaatgggaaaagatctaaaagagagaagcctgattgatgttggcaagaaagattgaccaatatgttgttcctaagattagttgtttattggcatctcgatctgtcagaattttttgggaggccctaggtttcaagtctataagcaaggaacatatttcccaagtgtgagcactttctgatcacaattgataagactgttaagatgaggatctattttaatacacaaccacatatacatagcaagaactgtgtgtactggaacacattagtctcacctactatagaatccaatgttttgcaaagtttccagaacttaactctctcaactaagaagagctaatctaggaagagaggactaacaaataaaaacaaaaacaaagataaggtaaagtaagaaataaattgcacagacacaacgggaagcacctgagaaagggacaaatctgctcgaacatggtgaacaatctcggccagtaggctgtaagccagaggtctcaaagactcaaagcatgctcgccccgttccaactagaaccctgacacagaaaaaaatagcaaatagatgacataagtcattatttgttaatatattatactgcggcacagtgaaattatacagaacagtagaaggtctacttgataaaacaaaacagcttcctgacaggtgtacaagtttaagaattcagaaaggcaaaaaaggcacattatacctctcttccaaaagagtgtcaataagaggaaataaacctctcttgaaatccgtcccaagtacatgctttagtgagactaatagttcctgcatttcatagaccaaaaaaatattctttacttgcaagcccatgactgtattacaaggtgaaaacataaagaagaaaaaggaacagacagttctccacctttctgatagatgcagaatccgaacaggtgacaagcaaatttacaatgctcttacaaatgctttcttcatgcggcttgatatattcggcacaactttttaacaaataagtcaaaaaggaaacggtctgcaaacaaacactacaagtcaatatcccttaaaaaacaaaataattcaggtgaaacaacaaggcagtgtaggccttaattaaatatttttctcactgcccaaataagttatggtttccttctggatagagagccattgtctcaccttaacctgagcacccttcagttcgatgaactgaggcttcatatgtgaagaaactttctcaggtccaggaatagatatagcagcaaccatcaggggtaacaaattaggaatattaatctgaacaagtctgctatacagctgaaaaagaaacataacgacgagggggctctctgtgactattttgaatgaacgagtacttgggttgatctgcccattcctggaaggtgcagtaatggacagcgactgatcagatggtgtaggtatctccacaggtttcacttcttccattttgacattctcgaaaaaatggctaaccgtcaatctgaagttctggtatattttgcagacaaaatccaagaatggttgaacctcattttctaatgttggcctaaagttcctaagaagatcaaagatgatgcgaatgcatattaacccattttcttcattatctgtcgtgagcacctgcattgcaactttcaagaggtcttgcacaaaaggacgaagaacctcgctatgtggtagacgattgaggatctcaaccacaatgttgcgtagtttgtgctcaatattatcagtaaattgaggctttgtaatctgaagaagaatcactgaagatgcccggaagtaacatttcagaaaattcaagtactcagccgtatgtgtgatctctagactgtccctgacctccaccaccatcgcaagcctctcctcaatagctatagaacacaaaaacaagcttcgagtaagtgtcgctacatttttaaattaacttgaactgactcaaaatcaaacaaaaattcctcagacaaaatcaaagcttgaagaaattttcaaatccaaaatcaaagaaactaattctgagcaacaaacaaacaacccaacgacgaaatgaagagaaagagcagagaatgagtggtattacgtaggtcaggctccacgagacgacgagagtgttgctcaaaattctgaattggactcatggctataaaaaaagctgacccagacaagcgaaaacgctgtcttagggttccgtcacatagtaggaatagtaaacgttgcttcctcctcctcctttctaaaacccaaaccgcgacgatccctaacgctaagcccaaggtgctccactaggtcagacactaacaagggtttatcaaattaagctaatttaataagagtcggttatctggtataacaccaatagcctcgaggttaacgatggaagatgatgaattttccctctcgatttttttttttggtgtgggtctctctgcgagactcccctgaaaagagaaagcgaggagaacctttgagaactcgagcgtagcagtgcaacgaaacgaaattcagcagccgagttatatataaaggtcccaactttttttatataaaaagtccccattgttccctcaaatttcagaaatgcgaagaaaacaaaatcttatggttaaggaaatgtaattaacactgataatatagttgtgttcgttttttataatcatcgaacaagttttacacggagaatgaaagtttacagaaaaaaagagagaaatctttcacgccattttttttttctttcagaagaaaccaattggatgatattttcgtctattcaaccatatagttgaaattatcgtaaaaaattcggtcaaaacgaaaagaattattagaagcaatttctataatttgttctgtggtaaaatcaaatattatgttcgtgttacaaattctcagacgttgtcggagctagtaaccttgggtctataggacctattaggagtatgtcgtgaagtttctcttcgttggcccgatgatgaccgctctcgactctcagaatgataatctctcgacctacgatacttgcttcctcctccatgtgcagttcgattgttgtgattactaccattttgatcaatgctggatcttgaagagctaatgactgcatcagcaggagtactcggcgtggtgtgttcgtatggcaacggcttaatctcctccaaatcaggttccggggtgaatccgactggtcttttcgactcgtccattttcctaaacgtgatcgatatcctgaaagcagaaccgacgatagcaaaaacagtatgaacaaaacaaaacgagataacaccgataaattgcaaaacaccaaatccttttgtaaaaagagagagtaatggtttcattaccaaacatataaataaacgttgacaaacaatcaaggtgctaacaaattacctctttgtgggaacggcaggtacacaatgcttagcgacatcagctccattacccttgagcactagaactgatctgaagcaaaaaaagtgaaaaactcgtcaaaaagttaagcaacagaagcttcagtagaataaactcagagagggtacgcaaactttagtgatttacccgacaggaagcggtatagagtaagaaccggagaattcaccaggtcctaagactttgagatttgaaccaaagagtatattgcattcactgaggaatgatactgtgcagaaagggcggaggaagtcatggttatcgatgtgaggaggtatgcaatcgtcttcctcatagatattgacgatacaactatccggtacacaagttggaggaagtacatgccacccaaccaaccttttgattattactttgaaaatagatggcattggatcaacatctccacgttgaaggattccgggtgggtttcccgctttgtcctatccaaaaaacaaaaaactctttccatattcactatagttgataaaatgttttcatttttaaagatgaggaaagagtcacttaccggtgcatagttataacaacatccgaattgaatagtaactcgtcctttgcctctcatccacttatgcggagcggtaaaagtacgctctagatatcgaaaaagaaccaaaaattcaagattagataagtaccgtttagagttttcaaattcacattatgcaaaaagcaatgaaagaaaaccagaagcaaacctcgcaattctcctctacggcctttctcttgtagttcatagacaaaatcaacaatctttttctgctccaccgcgctaaaaacaccggtatgcaattcaagtccttcgagaatattaacagacctccctctaactttctcataacaagaaaacactttcattttcttcacattcataaaccgataacgctctctttcttccctagacaatttacgcttctcaggagtcttcatcgagtctccaacggaaggactcacatcaactccatgtgaacctaattcattctctttctggtcttcctcctcgagcccatcttcttctcccatatcagcccaagacatttgtgcacttgccgcctcagaaacagttgactgagatgatggcattgcatgacttacactgtctgacaaagatccaaatacaaaagccccagctttcaaactatctaatgagtgagaaacacacaacttcccgtcataaatattgtccatcttgttatcaacttcttcagattccatgttatcaacttcttcagattccatgttatccaccattgaaccagaacccgctttaacttctccattactacaatgctctgtaataaggaaacacaattacacataaggtaagagaacaaatacagaaatctcacgaagatagcttgattacatagaatattcgatatctctaatcatcacaaatctatgaattagtttagaaattattgtaactccaatcattaaattgaattcaatagctgaagaaaatttcgaaacagaacacacaacattagtagtaacgaaaattctcctccgtttctttaatcgaattatgaaaaaagaatcagaattttcaacagagaagaagaattcaaacctgggtctagagaacggattcgatcggagagaacatgagcacagtcgttgcagagatctctagataagaaaggcaaccaattcgtaagaaattcagaagcaatcttaagttcggatgattgatacttggcgagaaaaacatcttcctcataatttggttccattatcttctatcgcacaaaccaaatctcgctgtttccgtactttagtttcagtttgtacggatcgaacaaacttttctcgagttcgtttactttgctcttttgagtcgtctttcattgataacaaatttaggtcggatttgcttataaatatttacaaaagggtagttttggaatttaccactacaaaacgccgacaaaagttctggtccgtgaagcccatgaatcaaaaggcccacttaagtttacgttaacccggaaacgaaaatatttacaaaagggtagttttgtgatacaacagcttccactctacaagctcgtggtgaggaagagctcctccaatgtgttttagtatcttttttatgcgttcatgtctgttttgactttgttgccgagaaattttactaaaactagtaaagctaagctctttgagtcgtttttcatgtttaattgaagcagtagattgttcttcttccactattggatgccatggaagtagaaatcttcaggattcttcttggctttgattctgagatttttgcaatttgaaagtttaatcaaaggctactgtgatttttttggatatttttctatgatttgtgattttgagttgtggtgttttctctttttcccgttgttgagatgttgagaaaatttctgtccagaattgttgattcacactatttgctgattcggtttggtatgcattggttttgaaattaaaactgatttcggttcggtttcattggttttgttgaaaaaaactaaaagagtcacgcgatggagaatttggagagatgtgcgtcgataaaaaaagtcatgaattggaaagggtacgaaatagagccttctgattggcttaaaaactcaaaaaaagtgcaatagtatacttgttgctagctcttattatttgataaagttttgtacttgcatcttttttttcagtcaccggaagttggaatttcgtttgtgataggatctaaacaagtatcaaagtctacaaatgctggattaagcaagttaaagcctttgtgattcccctgtatcttcaacaacgtcgtcttcaaaactttatccaaagacatctgtggatagccataacaagccacagttacattatacaggaaaggtaccgcctaaggctttgcattccaaagaaattgtcacaatcactttgtttgatatgtttgttctgtggattgttaacattggtttatacttgagtgaggtcccagacaggaaatcaaactcacattatgcatgtagctactgtcgttctgttgaccatataaagcctttacttttactgtagttagtttatagttgcattctttagcttagttctctgctttacacactttgcaacctagtagaacttttctcttatgacacccgtggtcaatacattggttgacaataatgaaagtggagctgctataacatcttttctttttatcaagtgattttatgttcggtaatagcttactgtttcattaactctgacaaactgtttattattgcactgtctgaacacttaaagatgaacaactgaccataatttcactttcacatatatctgcagaacctcattgacctgacaggttctgagagctcaaaggctgaaaccagtggtttaaggcgcaaggaaaggtcttatataaataaagctttgctgactttagggactgtgagttcttggttatcattgttttcccccaagcgacaatagtttttcgaatttaagaaccttttttgcaagttggatcgttcttttgcaaatttgtaggtacttgttatagtatttgatactcttatttactttctgttggtgacatgcatagtgctgatttcactgtctcttatatttttatgatccaaacatgaaacacatacataatccatcctcaaccaatggaagagtctatcaatcaaaatcctgaagctatggaagcacttatctccaatctctttggaaacatctcgtccttgaaatctgcttatatcgagcttcaaagtgctcatactccttacgatcccgagaagattcaggcagcggacaaagttgtcatttctgaactcaagaatctttccgaaatgaagcatttttacagagagaataaccccaagcctgtatgtgtctctccacaagactctcgtttagctgcagagattcaagagcagcagagtttgttgaagacttatgaggtcatggtgaaaaggtcgctaatggtttgttctgtgtattggcaacacttaattattggatgataatcacatatcaaggagcaatctttggatgcatacgatgagaaagagaaggagatgatgatgatgataggcagcatcaacagaaccgagcttctatctgttttgaaggcgaaaggtactaatatagacaagttacggtttgcaatcatgtacttaatttccttagaaagcgttaaccaaaccgaagttgaagctgtggaagcagcattgcgtgaagctaagatagatacaagcacgtttcagtatgtgaaaaagatcaaatcgctgaacgtttctttagcagcaaactcagccagcaaaagtcatattgctctatggccagtctataaacgtggtgaccgcgcgggagtcaagaatctcttatccagtgatgagaaactagcggtggcaagggctgttgagtgttgaagccttaactgaaggaaaaccgaacctggaaacagagtcatacctaatactggacccgagagcttcaaagtcaggctctagtagtagtagccatgtgaagggaccgtttagagaagcgatagttttcatggtcggtggaggaaactacgtagaaaataaaagttggcaggagctcacacagcgtcaagagacagttgagaacattatctatggagccacagaaatccttaatggaagctagctgtgttgggacacaaggtgggactaggtggttcggtgaattcttgaccatccaaaactttaattatttattttggtaatgtttaaagacttaatttgatttacacaatactagtactgtatatgcttttatttaatatatccataaccaaaataaatttatattaattttattttgaagtgagtttgttgcttaaaaaataaaaaagttaagcagaacttttgatttccgaataattaatttctaggtcaacgaagttggttccgccgttaactagactaaagattgcgttttggatttactttggattctaagcttcttttttaaatgattgcagatttgcagaaagaaagcttcttcttttattaagttgtggacaaatggctggtactagcatggctgaacctgaaggtgtcaagatgtcccatgactgttcagaggaagacgcaagaaaggaattaaaggttttgttagatagggtcaaatcagctgcaacaagcttgagctatttgagatcaaaagctagaatcttggccgttcctggtctgtcactcggtgctcaacagctacaacttaaagatgatactacattggctggaaccaacaagaacaaggattccttggttatagaggatggagtctatactttgaatacgctccaatccatagaaatggttattactgatgcgctggagtctcttttgaggagggtcacagcggcagaatctgaaacgtgttctcataaggagaaggtgattatatgtgaggaagaaattacaaggaagacagtccaaatccagaatctgtccttgagattagaacagacggaacggattgtaatgacagagtgtgagtcgcttaaaaatgccctcactgcttccaacaatgttttagatacacttctttcttcctccagacggcacttccaaaccattgaagcccggtcagtctcatctcttttatttgcaacttgttagctgttttatgtaaatgataagacatgtatatatgtgatgttccttttggaaaggtacaaactacaaagtatgtaaagcaatgtctatgatagcgtgaagagcagaaaaatcaatatatagtacaagcagctgacgagttatagaatttattaacaattgctatgtatttcaatgttactgaagctattgtcatatgtttattacggtggaagcaggttggttgctaagtcgacacaattggaaggcgagaaagcgcagaaagaggtacaagtgcaaaagctgatggaggagaacatgaagctgaccactcttcttgataagaaagaagctcagcttctggccttaaatgaacaatgcaaagtcatggctctgaatgcttcaaacatctgattctgaatctttcatctcttggcaaaagagaagatattctaggtgtaatccttggacgacatagcatttttctatcggattcttttctgttttttttaagatttgaaaattctggtaaactatctgtagaacatggctttgaataaagcaagcatagttgatctgctcacttgttaaactccttgtccctgctcacttgctaattttctgaaaacattatcatgacactaaacatatgatatgagtaagattttgcaaagcataaatatttcatttggtttagacaaggatcaagtttcaagatcacataattcaattttggaggttgaaagaagatcatgattcaagaatatgtttctgacttggtattttgaaagaagttgtgtatatcttcttcttcttctcttttgggggacaaattattaaaaccaactatctattggtcgtctctaatcaatcagtggaaaaaacaagcagagaggattaaattcttccaccatggtcacactcacatcgacaggtattgcctcatgtgtactatatgttataaatcatttctctcctatggtcattttcattcacagaacatgagtatccacagatattaagcatttacaaacaagaaacaccttgaaatgacttctttagtctctctaaatctggaagagaaaacacatacacttctcctacaaatgggggaactagaatacagattgcgacactgacagttatcagagagtgtcttctttgctttgccaaaaactcacataaaaactgcaaagagtattaatcagttgaaagacagaagacaatgctttactctggtggccttagaacatggtggtgggagagcaaaacttctctcatcataagttatccaaaatcaaattttgtggctcagatttcattggaggaatctttgtcagcttgtggtgctgagttgttgttgccacatggaatagtcatttttttgcagacatggatcctacagagtttagggatatgagcaactcttttgtaactctctctttagttcttcttctgtggatttagcagacatttatatatttgtttaacatttaattatcttattttctcaagtttatttcttgtatcggtggttgaggtattatgcacatgtatattatgtattttaaaaaaagattttatcttttaaagctgtcccttttaaaggtattggattggaaactgaatttgtaggaatttttttggaaaaactcccttacaataaaatattatttctgatatattttatgcattttgtttgttatgagctgtccattttttggtattggagtggaaactgaaattctaaaaaaaataaggaaaactactctttatattcttttatgtatttttgtcgttaggagctgtcccttttataattttaaaattggaaattgaatttgtaaggaagttcggaaaaactctttaaaaaaaaacaaaaaaaaaaaacttagttctaatattcttttatgctttttgtcgttaggggttgtcccttttatagtttttgtattggaatataaattcgtagggaaactgggaaaaaaaaatctttcaaaataagtcttaatttcaatatgttatgctttttgtcgtaaggaactgtcacttttgtagttttataatttggagaaaatcttaatttccatcaccgaagcctgattggtgactatgcatggcttgtaaagagatacatcacatcatacctaccttgcaagatcaacctcttttgtactatagtgtaaaggttttaagtgtattatttttgttgtagacatgtaattggctaaggtatccaaaaatatgatattagtagtttccagaacataaatttcactttaatttagacagggcttcaagttcaagatcacacataattcaacttttcggcagaactgtttcatgtgaatataagtgtcaagattaaagataaaatgattacactgtaaatgtatatattttattaaatattgtcattcttttatgttgtgaatgtcacccacacagcttaccttggtatgtaagctatacatcttgaacatacaataacatcacaaaaatatttctttacgactttagatcagaagtaaacattcataaatcatagtttcacaatatagttcaataaactttttttgtttcaaataaatgaatatggccatactgaataagaacatggagtccctgtaatgtatatagtgactcgaataggtaaatcaagagaattattagtgtggaaaagttggttatgatgatgaagaattggggttatggggtaatgaagagtgtgagggatcatgtctacaagttagaaccacaacagaagcgccaattcaggacagccaagtgttgttcctttcacttccacctgattctctcactgtccttcttctcctttgtccctacacacaccatctcttatttttgttctgttttctttaaattctcttataatacatacatacatacatatatatatatatatcccataaatacgacaaaatcccatcttccacgttttgggttttcgtttttacttttctcctctcttctattttcacaacagtatcatttttatcgtttttcgtataattttaagacgatacaaaattcaattatatcacccgcccctattaaatgtaacggttgaagccaaactcttaaaaaaaattcttcgtctttgtcgaccaaaaaatcttctttcttatttcttgatatttgtcgtttatatctttaaatatgctaaaatcttacaaaaccaaaacaaaatttaaattaaaaggttactttagctaaaatgtttaagcaaatcttaaaataattccggctactagctggctcttcttgattaaaaccctaatggtgtggcagatgatgggaaatgaattgacgggagagtgaattacgggttgttttaagtgaatttaccaccagatcaccactgtaggtttaacatagatgtttaattacaagtttacaactatacatacaaccgatgaaactttttagactgtgtgaattcacctgattaaacaaaaaatattgattagacaaaggatatactattgtagaaacagccaaaaagtccttttcaaccacacttaaaatttccttttttggctatcaagatatacacgatatggtgtttctaccacggaaaatttgcaattaattcgactggaattatcacaaagccaaagatgaaaatgtttgatgatgttgattgattcatcaccattaaaatgataggcaaaaagcaaaaaaaggaacgaaaaataagaagttgaatatataaatggaaaaaagtacgtggaacacaaggcgtcggaggaatgaaatgggaacttgcatggatttgatactgtcaattaaacaaaagataggttccaacctaagcatttgttttcgttttcagattttcacatggggacgaagtttgcttagctacatcttttcccatatgtttttataaacatatttccgataaactatttagatcattatatttttagttaccaaattagttaacccatcaaattttcatattttaatcttccgtaaatgatattaatggtttgtaagttctaactctttgactgaattttgaaatgaccccaaaatgtttgtagatatacaattaacgttctcaaattccgctgatttttccgcatggcacttattatatatactgtatttttgtcggtgaccaacataatgttaagttccgcttggtcagtagatataaaatataatgtcatatgaacctcgtaataacccgtatatcctctcaatgaatttggttaaccaagaaaatataaaactaccaaactacattaatcatttggtgttattttgtacatcttaatttatagacaaaaaataaaataaaagaatgggcattaaagtgttggcaactctacttgtagcaaaagacatgtgatcttgtagttgcaagtacgtactttggtttatatatctctatacttcgtccgtaatccttttgtaaacggactcaatttatgacaaaacgggtatctaaatctattaacggccatatggtattttttggttatttattcatatattagttgtaataaaattggaagtttcagtagagacaaattctgaagaagagtttataacaagtgtagagaaaacagacactacttgtattaatttgtagagttgtgtctaaataaaaacacaaaatagagacaatgtagggtagtgtttatatagtccctaccttatttataagaccctccaaaaattttattgtatgcattcttttacatatttttggcctttcccttatggcttgtctctaaaactgctttgtttcctacatcccacatgatatttgctttcacattacatatataaaaaagaatattttgatggattgatatagtggtataggaaaatttgggagcattgttatatctttagatagtcctgagtttaattcttcattgatgcaaaaaaaaaaaaaaaaaaacttagaccatttggctactctatctaggccataatataacaatttggccttgtaagaaaaaacaataacccttgaaaatagttggacgttgtatttttatgtcttgtgataaaaggaaaatgttcaaattttgaagagatcatataagataatgtacgaataaaaacaagtgtttggacatttatgaaatttaataattatatttgatgtcatatgttacgtacttacgcggctttgatttgatcaccaaggaaacacttcatgtggttctgcatgaattagtcgttgttgtgtatataatacatataacctagtcacaaatcatccaaaaagtcataagtaaacctaataaatctatgttaaaagcatatatgagatttttcttattaaatttaataaacacttccaaaattttctctctcattgtgcccttaaatacccctccatattcctccccaccaccttcacatccacacctttcttcaaacataccaaactctctctccctcttccctcttctctctagccaagttagatttcaataaggtcaaatcatggcgataaagaagtcgaacaaagcggcgttgtctcaagcagcatctctaaagcaaatcttgaagaggtgctcaagtctaggaaagaagaatcaaggtaattgctacttcaacgacgtgccaaaaggtcacttcccggtctacgtcggtcaacaccgaagtcgctatgtggtcccaatctcgtggctagatcatcatgagttccagtcactcctccaactagccgaggaagagtttggtttcgagcacgagatgggtctcactatcccttgtgatgaagtcgtctttcgttctctcatctcaatgttcagataatactcgatatcgaggactggtcttcattagctcaactggtcattctctcaagaaatattccccttttaaggaagtaagagtttgatcacattgtcacactccagactcggaagatcaaatcctcaaagttattaccaagaaacaagaaataaggaatatatgcaatctattatttaggttttttttttctttgctaagaagacggaagcaaatggcggggatcgcgttaagtatcgactcaagatttgtggctatattaatatacctaacagttttttttaattaaccactcttttgggatttttttttccttctatatattttcggtgccttcttttatatattttattttcaaatattttgtatattagtttggatggaagacttttccctcaagtcaacgtgtattgttgaccgttggttcttgagaggaatagctagttttatttgtattaattttttattcaagaattttcattctaaaactgttgttaattattatcttctataaaaccttcataagttaacttaactagtgttacaaaataatgattgattagcaaataaatttggtttcaataaaataaaaactaaatacaacatattaaaaaatattataaaaaaaacattcacggtctatccagtatcaaccataactggccaaacatcaacgatttaccatttgtagttgcaatcttgtttctacttcatctgatatttgtagttgcaatcttgtttctacttcatctgagcaaagcgtaatgaaaactatttatatttcgatctgtagactttaatcgtaagaagaaggaaaaaaactaatcgtcatgagaagacgataagtcgataagtatgatccaaagtctacagtaatttctgtttgagtggggttcttattgataacaataattgctttttcgtcgtttcgttttcatgatttatcatttgttccaattgcctcgtttttgttttactatatcaaaaactcattttaatttggtaaggccgccttcaagatttgtgtcgatatataataatacaagcaaagcttatcacatagttatatttaagtgataatgaaatttattttcttatatattagagagagatataattctatcagattatgcttttaatattgatcctattcctcccggttaaatgatattaatacgatgcacatcgtaggtattaagctatcaagatcgtctatcgacatatgtgagtgatacatatgtcccgaaatctttattagagagattgtgtttttatttttggttttagcgtaataatatctatatattaaaatatctcactaattaatacgtcgtaggtaaaagctatcaagatagtctattgatcgacatatgtgagtgatacatatgtgtcgaaatctttatgagagatagtgtttatttttggttttagctgaataatatctatatgtgctaaaatatctcacaaaatactctgtagacttttaaaatatgattttggttagtattgttagatatctttaaataaccagataaatgaattgtaaaagggaaagtcattaacttgaataaatgtaaattgtaatatctgttagatataaacccatctatgctattatatggtattgagaacttttacatagtaacaaaacaataatatacatatgttttttttttgttttttttttgttacgataattagatgtttgggggattgaaataagaaaatgtgtgtgtttgaaaatggacagaacatgtaagccacaatgtctctcctatcttgactcttcttttcttttttattcttctttttctgatatttttttttttttttgtgattaatacaataagcgcacacagttatcatatattatagttttaaattagagtaccagacgacacaagtgaatttcaaatatcatattcagaggaaaacaaaacctgataaatgtattttattcaatataaaagacttaaaagaccatgaaagaaaaaagaagaagcagatgtctgtacaaactctgccttgcccatactatcaagttgctttgagtttataccttgtctccttgacattgatgagcattatctgtttgatctgtttcttgtcctttttcaaacttttcatttcttatgttttctaatatccatttgaatatttacattattattttcatgttgcatggacctcacgttcctatttctattttgtctctaagaataataattattcatctgaaatttaaaccaatgcttctttgaaaaaaaaaaagaattatttttctggtagagccattttctgattttcatggtagaatgtcaaaaattacactaaatatcaaagttattcgctatcatctcaactctcaagtatatcgaatttttcaaaagtcttcacaagaacatgataattacttatcattgaccaaatataattttgccatttaatgacttttccacctacatacatttatcattttttgatataatgaaatatcaaaatacatctttatcagagattgttcttcttttctccatgatgttgtcttaaattttatacattgagattttttgtagaaaggagaaaatggctctctgttttctttctttatgctcggttttgtaacaaatttttaattcggtctcggttatagtccggtctacttcaattttaagtcaattcagacaactagggcgttttaaggtgaggttttgttgttgtgtagagtaagtaataagacaaagattgatcttcactagaactgttctcttctcacatactcaaaacgcatgtaaacatataaacatatcatgaaggaagatgaaaatcaaacgaaccaaaagataatgagtgtgttatctcctagcgttttaacgtgcactgttcttcgatttagaggagaagaaacgacctaatcctcgcgtatgcttctcattatcttctttagaagaggaagaaacagagctagacttcatgatagcgtggaccgttggattcactgtgtgcttaacagaacgagatggttgaatgatatgaacatgtggaagatcatctagtgcagagtttggtgttacttctgaggctttgtgctgttgaaacttcttctcaggggaccgagatttgagaatgtggttgctctgtggctgtaaggattgtaactgttggctgagtaagtgaattgtttcttgacaagctgcaagcttctctgttgcagatactatgtctttctcctggaaacaagaaaattgcagattatatagtagatgtaacaaaacggatgcaaaaagctaatcttatcaataagatatcagtaagacagtaagaagtgtacctgattaggttggagtttggatgatgaacaattttcgcaagtctcattcctatagtataagtcaaattagcaaaacaaactatgcatagtggaagatctaagtaagttatggtttttgtacctttgcatcttttcttgaaggtctctgcatttagctagagtctcctcatggccatgcttttctgtggtgaaagccatttcaagtctctttgtctcttcttccaagcttttcactttagcttcaagttctttggcatgaagatcaagcgatttgtatgactcagtaacgcatttaagctgagtttccgccaagctttggagatcttctgaagaagtgagctgcgatttcagcttcgatatcagctgctctttttcttccaaccatgcctttgtactttcaagattctgcaaacatcttgataattctactgcaatgttctctttctccaactttagctgttccacctctttcaacaagctcttgcatgatgaatcatcaccattgatcaagttatctacacagtgatctgtcttagcaaatgtgtctcccagtggattagaatctgactcttcaaagagaagtgtgaccttatcgttgctctctgtaacagggatctctttactatggggcttgagagtcaaagcaccattgtttagattactagctagaaccgaaatgcgggagagttctagcataacgtcagaaaggcttgattcaccggttggatatttactaaccgatgaagagaaatcctccaagctctccctcagttgtccattcccattcatgtcctgaagttgtgttgcttcttttgtagttgattttatgaagtggtgaatattggcaacagctgcttccaaatcttgttgcttggtgttcttctgctccttttcgctgttttggatatccacatgtttctctagagtttcatcagtaacttcaaaaagatgacttgacattcgtttggttgatgatccttgcatctcttggatcgaaaatcttgcggcttcaacgattttgtcaatgctaatgccctcttgagattcaaatatcctgttgattcttgagcggagaaccattagcagctgatcaagtgttgttgtatcctcatctggctcactggacttactagaggactgtttttccacagatcttctactgcaaacactgttggaagattttgaagctgagttagctccatctggatcactacctactaacttttcaatctccaagaagtcatccatcaactccagtctactagaactcctaggctttgaggaaccattaacacttacttttctcactttatgagaatctagtgaggttgctgggccacactcagaagaacttccttcttcatcaaatccatcttcggacaccgaggtgacactaggcggatagtgatgatcatgaccactggatagactttcagagagatttctgctatttgattttggagcattcttgtcattgttaaacatatgcatctgcccttcaagaatcttaagcttcccaagagtcttagcgcatacatttctcgaaacctgcagttcattgttacgagcagagagatgttctttaagcgtctgaatctcctcctccatttccaatgtacgtcttgtgagatatacattctctcttttgcactcttccaacttatgatcagtagaaatctctgcctttgcgatgtgtgcattgtgattttgagacatgtttctctgtgctcgagggtctgtgaattcatgccctaagccttcaacttctagcttcatttgagccatagcagcaggaccaggaagctttttccgcagaagtcctctaagcctatgacactctgcttcaagttttgcaatctttttcacaccttccagatgctgcttatttgcgatatccgccgacttcaaactcatgtttttctcttcattgcggatctcaacttctttggaagcaacgtgaagatcgtacttcagataactaatctccttctcagccaactgaagattagtcttcaacttttccacatcagcttcagctttagacctctcctcactaatccttactatcatctcagatcgttcttgcaacgatctagtgagtgctgcattgtcagaagctgcccggtgtagtccttcactcaattcatcgatctttccttcaagctcggctttgatcttatcccattgactggtcttagcaagaatcacatcctgcagcttcttatcactctcttctttcacaatccttatctgccttgtacactctttcaacgcatcatccaaatgcgatgctcgatcctctgcagtgagctttaagagtgtaacagattcgagttgacgtttaagtgccaaagtttctgcatcagccttctcccatcctaaaaaaagaacaaaagactataatcagcaacaaaaaaaacatctcaaaacaaacaaaaatgctgaaataacattttacctgaaacagcttcttcagcgactttggcatgttgaagaatcaaagattctttagtgttgatctcagagtgagcaagagtgagtttttctttaagatctttaacttgaacttcaaacaatttgacctgatcctccattctactcatatgtgtgtatgaatccatagttatctgaacatagtttgtgtttttacacttctcctgacacacaaatcaaacacacaaaaaaagacttcaaatgaaaatttctatctcacagaaactgacagattatcacaaaactatataaaacagaggtttggtgtaaaattaaagcacctgattctcaagagaagccaagtaggacaaagaacaaacaggagttgactcgattccaacaactggtttctcagtcgtggctttgtccgaagactttctcttccatggccaacctctaccctccattttttttgctccaaaataatagtactctgcagaatccgtagaagaaggaagaaaataagctttaataaaaaaacagacaaagaactgatagaagttttgaaatttgaactaacgtacaaaaaaaggaaacaaaatcttccgtaaatgttactttcaatttcatccgacaaaatcccgctatatatttattatactgtatcacctcaacaatgaccgttttgttgtttctttctttttttccgcagtgattcacatttaatgatttctttccaaaactatgtaaccaaatttattgaaaagtctactaaaaaaataattcaaatcccatcgcaatgggcgcgagcgagtccttcacattaaacctgatcataatcatcatcagctaccacagtatcgcacttagaacacacacaatcaaattcaaacaaactttcgcttgacaatttcaatcgaaaccatatcttttcaagtttagctaactatcggaaagaaattacataccgagactaatgattccacagacttgagagagcgcaaagatcgaagaacattcgtcgagagaaagaagaagaaagtgggaggagcgtgtatgtgccagagaagaaggagcagtggatgatttatgcgcttgggctgtcgctttttttcaactttgacgctccacaaagacacaacaacgacatctctctatttcaaaaaagttttatttttttattcattttaaatacattttaaaaaaattaacaaataaatcgccatttgttgttcttttttcaaaaacggaatacgagggtgcagttatcctctacgagcaggtgcatgtaataccatctgatggatttgacttatcgtttatccacaaaagattcaaaatcttcccggtttttaagtttgggcttcataaggcccaattagtggcaaatccatcacagtccactagggtttttgagagactggatataaaatttgattttgttcattgttgtcattcgccgtaatctgaagaagacgaagcaaatcctcccacaaagaatcatccatgggtcgtgttatcagagcacaacgtaagggagctggttccgtcttcaaatcccacactcaccaccgtaaaggtccggccaaattcaggagtctcgatttcggggagagaaatggttatctgaaaggtgttgtgacggagatcattcacgatccaggacgtggtgctccattggctcgtgtagctttccgtcatcctttccgattcaagaagcagaaggagcttttcgttgctgctgaaggtatgtataccggtcagtttctttactgtgggaagaaagctactctcgtcgtcggaaatgttcttcctctcagatctattcctgaaggagctgttatttgtaacgttgaacatcatgttggtgatcgtggtgttttcgctagagcttctggtgattacgccattgttatcgctcacaatcctgataacgacactagcaggtttgttgtattcaataccttttctggtgattcgattgattaatgatgtataatgtaatgttttgttctactgaattgttttgtgtgactgaatatgatatatatctcatagaccagttggcttagctctgctgaattgtatcatgaaaattgtgtttagtataccatttcagttttctgattgcgtagaattgcagtgaacacaatttttacttacgagcattgttctcagtctcacagttacgaatttgcgcatgattttgataggattaagttgccatcgggttcgaagaagattgtgccaagtggatgcagggccatgattggtcaagttgcaggtggtggaagaacagagaagccgatgctcaaggctggtaacgcataccacaagtaccgtgtgaagagaaactgctggcctaaggttcgtggtgtggctatgaatccagttgagcatcctcacggaggaggtaaccatcaacatattggtcacgctagtactgttcgtcgtgatgcaccaccaggaaaaaaggttggtcttattgctgcaaggaggactggtcgtctcagaggtcaagctgctgctcttgcttccaaggcagactaaggagaggaggattcaagatgaaattgttcacttttttgggattttttgttgaaaccttgttttgaaacctttagatttactactatcatgttctttgatacgtttgcctatcaggtagaatctgcatttcagggataaatcttaactttgattgctgtttcgttttgacaagctaacaaaattaagattttttttttaaatgtcaagaaattattacatagttaagaaacaatcccaagagtttttgtttaaaaaaaaaattttacccgtcgtttattttcttcaccatctcattatacctattgaggtttttgcttaaatcggctgataaaggcattaattttagcattaaattcatcttgtttcacacttctaactctcgggactttaaacgttgtaactttaggctctttaaccgcagccagcctcaacgacactgttgagctaccaggcagagtgtcgttgaggctgcttaagtaaacacttctatagactatctccctacctattttcttaagtaaaccttgccgtactatgataccatacggagatatgtttatgagagacttattggctaagacattgagcctagaactaatccccaagccagtgctagctataaggggtgccaagaaatcagcttcctcgccattcagatatgccatgtaaagtaataaatttctatcattctcgtctaagccatcatagataaccctcaattcctcaacttcattatcaaaaatctcctgcaggtaacccgaggacgaaaatggtttagtcatgctagaactagtatcttcatttgcagcagtaaaaacatggactccacatctcgtcactgcacaactcccatctagaagct

SEQ ID NO: 676 - DNA, 94695 bp, Arabidopsis thaliana
gaattcatgccctaagccttcaacttctagcttcatttgagccatagcagcaggaccaggaagctttttccgcagaagtcctctaagcctatgacactctgcttcaagttttgcaatctttttcacaccttccagatgctgcttatttgcgatatccgccgacttcaaactcatgtttttctcttcattgcggatctcaacttctttggaagcaacgtgaagatcgtacttcagataactaatctccttctcagccaactgaagattagtcttcaacttttccacatcagcttcagctttagacctctcctcactaatccttactatcatctcagatcgttcttgcaacgatctagtgagtgctgcattgtcagaagctgcccggtgtagtccttcactcaattcatcgatctttccttcaagctcggctttgatcttatcccattgactggtcttagcaagaatcacatcctgcagcttcttatcactctcttctttcacaatccttatctgccttgtacactctttcaacgcatcatccaaatgcgatgctcgatcctctgcagtgagctttaagagtgtaacagattcgagttgacgtttaagtgccaaagtttctgcatcagccttctcccatcctaaaaaaagaacaaaagactataatcagcaacaaaaaaaacatctcaaaacaaacaaaaatgctgaaataacattttacctgaaacagcttcttcagcgactttggcatgttgaagaatcaaagattctttagtgttgatctcagagtgagcaagagtgagtttttctttaagatctttaacttgaacttcaaacaatttgacctgatcctccattctactcatatgtgtgtatgaatccatagttatctgaacatagtttgtgtttttacacttctcctgacacacaaatcaaacacacaaaaaaagacttcaaatgaaaatttctatctcacagaaactgacagattatcacaaaactatataaaacagaggtttggtgtaaaattaaagcacctgattctcaagagaagccaagtaggacaaagaacaaacaggagttgactcgattccaacaactggtttctcagtcgtggctttgtccgaagactttctcttccatggccaacctctaccctccattttttttgctccaaaataatagtactctgcagaatccgtagaagaaggaagaaaataagctttaataaaaaaacagacaaagaactgatagaagttttgaaatttgaactaacgtacaaaaaaaggaaacaaaatcttccgtaaatgttactttcaatttcatccgacaaaatcccgctatatatttattatactgtatcacctcaacaatgaccgttttgttgtttctttctttttttccgcagtgattcacatttaatgatttctttccaaaactatgtaaccaaatttattgaaaagtctactaaaaaaataattcaaatcccatcgcaatgggcgcgagcgagtccttcacattaaacctgatcataatcatcatcagctaccacagtatcgcacttagaacacacacaatcaaattcaaacaaactttcgcttgacaatttcaatcgaaaccatatcttttcaagtttagctaactatcggaaagaaattacataccgagactaatgattccacagacttgagagagcgcaaagatcgaagaacattcgtcgagagaaagaagaagaaagtgggaggagcgtgtatgtgccagagaagaaggagcagtggatgatttatgcgcttgggctgtcgctttttttcaactttgacgctccacaaagacacaacaacgacatctctctatttcaaaaaagttttatttttttattcattttaaatacattttaaaaaaattaacaaataaatcgccatttgttgttcttttttcaaaaacggaatacgagggtgcagttatcctctacgagcaggtgcatgtaataccatctgatggatttgacttatcgtttatccacaaaagattcaaaatcttcccggtttttaagtttgggcttcataaggcccaattagtggcaaatccatcacagtccactagggtttttgagagactggatataaaatttgattttgttcattgttgtcattcgccgtaatctgaagaagacgaagcaaatcctcccacaaagaatcatccatgggtcgtgttatcagagcacaacgtaagggagctggttccgtcttcaaatcccacactcaccaccgtaaaggtccggccaaattcaggagtctcgatttcggggagagaaatggttatctgaaaggtgttgtgacggagatcattcacgatccaggacgtggtgctccattggctcgtgtagctttccgtcatcctttccgattcaagaagcagaaggagcttttcgttgctgctgaaggtatgtataccggtcagtttctttactgtgggaagaaagctactctcgtcgtcggaaatgttcttcctctcagatctattcctgaaggagctgttatttgtaacgttgaacatcatgttggtgatcgtggtgttttcgctagagcttctggtgattacgccattgttatcgctcacaatcctgataacgacactagcaggtttgttgtattcaataccttttctggtgattcgattgattaatgatgtataatgtaatgttttgttctactgaattgttttgtgtgactgaatatgatatatatctcatagaccagttggcttagctctgctgaattgtatcatgaaaattgtgtttagtataccatttcagttttctgattgcgtagaattgcagtgaacacaatttttacttacgagcattgttctcagtctcacagttacgaatttgcgcatgattttgataggattaagttgccatcgggttcgaagaagattgtgccaagtggatgcagggccatgattggtcaagttgcaggtggtggaagaacagagaagccgatgctcaaggctggtaacgcataccacaagtaccgtgtgaagagaaactgctggcctaaggttcgtggtgtggctatgaatccagttgagcatcctcacggaggaggtaaccatcaacatattggtcacgctagtactgttcgtcgtgatgcaccaccaggaaaaaaggttggtcttattgctgcaaggaggactggtcgtctcagaggtcaagctgctgctcttgcttccaaggcagactaaggagaggaggattcaagatgaaattgttcacttttttgggattttttgttgaaaccttgttttgaaacctttagatttactactatcatgttctttgatacgtttgcctatcaggtagaatctgcatttcagggataaatcttaactttgattgctgtttcgttttgacaagctaacaaaattaagattttttttttaaatgtcaagaaattattacatagttaagaaacaatcccaagagtttttgtttaaaaaaaaaattttacccgtcgtttattttcttcaccatctcattatacctattgaggtttttgcttaaatcggctgataaaggcattaattttagcattaaattcatcttgtttcacacttctaactctcgggactttaaacgttgtaactttaggctctttaaccgcagccagcctcaacgacactgttgagctaccaggcagagtgtcgttgaggctgcttaagtaaacacttctatagactatctccctacctattttcttaagtaaaccttgccgtactatgataccatacggagatatgtttatgagagacttattggctaagacattgagcctagaactaatccccaagccagtgctagctataaggggtgccaagaaatcagcttcctcgccattcagatatgccatgtaaagtaataaatttctatcattctcgtctaagccatcatagataaccctcaattcctcaacttcattatcaaaaatctcctgcaggtaacccgaggacgaaaatggtttagtcatgctagaactagtatcttcatttgcagcagtaaaaacatggactccacatctcgtcactgcacaactcccatctagaagctttttctgcttgttcacagtaaagaattcaaatacgacaagatcagccaatatactggagtcatttccttcacaggcagtcagatgcatatcgaaatcacagaagacaaacatgtgatccttgggaacaccttcccctggaatccaacaatggaagtttttttccagcctatgagatacacattcagtgtctttccatctgcaaacacaactaatgctaaaagcaccagcctggtattcctccaaaaatgcaacttcgactaaaatagcaaaaccgcgaatgagtctccatgaagaacccagttgtatgatcacggaagaccctggttgcagatcaaatgtgatatttttactttcaggtgaaggcacagtaaagttgagagccaaagatttgttgagttcctgttgccgcaagcgaaaataaatcagatacaacaacctgtgtcagagagagagagaggaagagagaggggtacctgtttctctctcgcgatgtgtgctacattagtcagagcgttctttacaaattcattgaccacgcttgcagaaagagcaaagcaattactgaatgtgtaatacctaggaagccgctcaaaattggaaggaattgataaaagagacacacaaccatgtgcattcaagacttctagactttggggaagctgtggaagttcttttaaggcagtgctaacaagatataactctttcagatttggcgggaaaccctcaatatcgtcgagatctgagcatccagacagattaagaactttaagagattcgaaatcaaccatgtaaggcagttttcgcaaatgaacacaatctttcatattcaggcaaacaagtttgccaagattttgagtagacgtgactaatttggccaggcttgttgattgctcattgttccaagcatttgaaacacctgagaattctggtaggagattgaaaagctctcgattcaacttagcttgttcgaagagggacacaatggatattggtaattctcttatgccagttccctggagatgtagttcctcaatatttggtgaaacttctgggaaacttttgatctctctacaacctgagagatttacaactcggagatgttgtaattgacccgtggctggaaacctctgcaattttctacagccttggagatcaattagctcgatattttgagcttttaaaatatcgtcaatcgcagtaagctgttgggaatgacaaagcttgaccaccttcagcatctcgaggctctgaacagaaaatcatattggagaagaaataacaaaaatttgaaaaaaaagctataagacggcggataggagtttgcttaccttggttcctgcccaaagtttctgaagctgactgtaagagagattgagttcaacaaggtggcatggatcaaagtcttgtggcaaggattgcaaaggatagttctcccagtggaggagtcttagctcatcaggcagaaacttaagtcctttcggaaggcggaggctataatggttttcataactggaacaataaatcttcaggaatctaaggcttagcatattctcaaaggcaccaggcttcacatcaaatgttaagttcgatgtgtccagaagtatgccttcgatatcttcagtgccctgaaatataagggaaggagatagatcaagaagttggttcatctccaaaagtaattaagttttgtataaaaatgatagaatatgccagaccagagtacgagtatatgttgctttgggatcttcatttgcttcgagttcgtcatcttcaagaaggaatttgatgctccaaggatctgacagtctgcgacgcctctcgatctgtactgtttctccatcgattatttctcggccaaagtcttggattattctatgcattttcactctgttttctgaaatagtcaccagacagttctccacaagaacatcaatcccaacatgtggaaaaaaaccacacccctcaagtagtcgcatcacatagtcaacattttctccactgaagaaacaagcaatgtccagaaaaatgttcttctcgttgtcatcaagtgtttcgtagctgctcttgaacaaatcaaaaatcttatatggagttcgttgtttgagtttgaagaatgtagtctccatttctgaaagttcctttcccttaagcactctgcagtaaaagctgagagctaatggatttccactagcatagtcaatcactttcagtgatagttccagcagattttgttcatttatatctcttctaaaagcacactgagagaacagctgcagagcctcattctcattaaagctctgaacctcatacacatgattgatctgacaaaggcggaacacttgtttatctctggacgttatgatgattaggcttcccgggccgaaccaatgaaacccttcgagaaaagactcggcaaccaaaggattgtgcacatcatcaagaacaacaagagttctcttcttgcttaatttgtccctggggaggctaggtctcgtaatgctactgcatacacgaggcaattccttcaaaattttcccaaaatgttcctccagcaaacggtgaagccccttcccactaaaagccttgtcaaagtgtttgatgaaacaagaagcttcatagccaccagagatttggtcaaaaaatgctttagcaagtgtagttttgcctatgccgggcataccccaaattcctatgcgacggacaccccatggttgcttgcaaagcaaatgttccatctccagcagcctcgagttgattccgatttgttccgtgggaaagagtttctcatgcacatctttgacaatctcttccacaagttcgctctcactgcattcctccctgtttgcattgatttaaaaatcacagagtgaattgttgcggaaaacactaatgaatattgaagaacaaaaaatgttttggataaactgcctcacattttgtcaatctatcataataacattattagttccatataaaacctttgatttgtataatatttctttgtggtgttagatttgtataatatttctttgtggtgttagatttgataggtggaaaacattttgaagtagagacttttaatcttctcaaagtgcaaacgacatattaatcaatccacagttacctattgtggtggcctggtaattctctcagttcttggagtgcgctactccattctcttatccggtccactgacttgtgctcctgcaccaccacatctgatgaactaatgccataatacacaggaaccaccagctggccggttttcctccgacactgaaagaccctcacgagcatgtccaggcatgaggtggaggagacgcagctctttgagaaaaccagcacggaagcgctaactctctcaatcacatccagagtctcactgtaatttacaaatgcagaaattcctttccggcgaaaatccatggagaggtggctggcgaaggagtattgtagtgtatcttcgcagtatatgtagacagtgggaagtaatccattaggtggcggaaaatccacgttgtatatatattggatcccttgttcctctaaaagtctttgatcttgtgttgtgatgataatccgacttccaggaccaaaccaccgagcttcgtttgccaaggcatctaattgtcctatgctgtccacatcatcaagaacaagtaccactttcttgtctttcaacatttcatgtgcagcttccaattgaagaatctcaccagtaaacttgtgatttaatagttgagacagtaaatggctttgtaactgcagtttcctgtcgtcctcattgtagcaagttcttggatagcatcctttgatatcaataatgatagtactcaattcgaattgaggaaggagttgttggtataaacgtttagcgatggtggttttaccactcccaggaagaccacatatacctatcaatctgactttatttgagtccagacctagcagctctttcatcttttccatatgagcttccatcccaactaagccttgggaagcacttgattgagtggaattattcattatactagaaatatcattagctatttttttgaccatagccttttcatcatccctaaacatatagtaaataaatagtcatgaataacttaaaaacaaaaaattgtttgatgcattaagaagaggcaagtggtaatgaaaaactgaccagtcgcgtgaacggtaaccatcgattgtggccacttgctccaaagctttaatccatctatcaatgtcctctttgttttttctctcacattcttctctgtgcttgttcatagccgtatcatcaatctttatggacctaaacatagtcatcaaacacatattaaaaaactgtgaattactttcatgtgttaagaaagattaagaagactaacaagcggctggtaagtttatagactctaggcaattccgccaaagctctagtgcatttccaaatgtcttcatctgttttaccctttcgtgtttttctgaaattatccccaaaatctccagtctgcttcaatacatcaattggatccaaattatagaaaatagtcaccactctttgacccaactcttctttgcacttcattatctccaccaactcgtcgagacaccacggagagagagcgtagttccttgagagcacgacaatcacgattctcgagacactaatcgcgtttctgagctcaggtccgatcgacacgcacctctcggtttcattatcgattagtggctcgaaaccctttcttcttaactctttcctaatcctactgagaaaggatttgggtacatctacagagctgaagctcgagaacacattgtgttcccaattgcgagacgaagccgttatcttcttcttcttctgcggattggatctgatgaatttttcataaatcagaaatgaaaccgtacccaaaatcgtgattgcagccgcacagatcctaaggagggaagcagaggaataatccatttagagtacgattgcaaaagagaaaaaagaccttcgtctgcacaaagaagaagaccaccattattgactccattagcaccattggttacaaataaaatatatgtatttttcgtattgggaatttaatatatttttttattaggtaacggtcacgagaagtcattaaactatcaatccaagtcgctgtttgctttagtgttttagtcaatggtcttcttctctcttccacacttgcctcttgaaaaaccagagtcctagttccatgctttcgatttcaacgcgagacatcatcgatcatggtggattattcttcttcttcttcttcatccgttcaattatctccgccgcagcatcaagtcttcctcaatttccgagggaaacaactgcggaacggtttcgtcagccatctggagaaagccttgaggagggatggaatcaacgtctttatcgacagaaacgaaaccaaaggtagagatctcagtaaccttttctcgagaatccaggagtcgaggatcgcgctcgccattttctctagcatgtatacggagtcgtattggtgcttggacgagcttgtgaagattaaggattgtgttgacttaggcacacttgtcgttattcccatcttctacatggtggacacagacgatgtcaaaaacctaaagggcgcttttggttacacgttctggaaattggctaagacttgtaatggtgaaaagctcgataagtggaaacaagctttaaaggatgttcctaaaaagcttggctttacgttgagcgaaatgaggtaactttatccttgaattgtcaaaggacattactttgtttgcctattagggatcttatggtttatgtgattgattcttttcacttgtcttgtagcgatgaaggcgaatccatcaatcaaattgtaggggaagtcataaaggtgctatcatctgatgttatgcctgatctagaaagggaaatccccattgatgatccttttccaacaggagaacaagtacctgaagctgctcctgactcgcctcctcctctgtttggcattgaaacacgacttaagcaattggaagagaagttggattttgagtgcaaggatactcttaccattggtgttgttgggatgcctggtattggtaagaccactctgactagtatgctttatgaaaagtggcaacacgatttcctacgctgtgtttttcttcatgatgtccgtaagatgtggaaagactgcatgatggatcggagcattttcattgaagagttgttgaaggatgataacgtgaaccaagaagtcgctgacttttcacctgaatccttgaaggcactcctactgagtaagaaatctcttgttgttcttgataatgtgagcgacaagaaacagatagaggttcttctcggggaatcagactggattaagagaggtagtagaatctttatcacaactagcgacaggtcggtgatcgaggggatggttgatgatacatatgaggtcctgagattgactggtagagacagctttgagtactttagctattttgcctttagtggtaagctttgtcctccagtgagaactttcatgaatctgtctagattgtttgcggattatgctaaaggcaacccattagctctcaagatattgggtaaggagctaaatggaaaagacaagactcactgggaagagaaacttagcaagctgatgcaaagtcccaataagacaatacaagatgtcttgcgggtaagctatgatgaactaggtttgtctcacaaagatgtctttcttgatgtcgcatgtttctttagatcaggggatgagtattacgtgaggtgtttagtggaatcttgtgacactgaagccattgatactgtgagtgaaataaaggatcttgccagcaaattcttgataaacatttctggcggacgagtggagatgcatgatttactgtatacatttggtaaggaacttggttcacaagggtcgcgtaggctgtggaaccataaagccgttgtaggtgcgctgaagaatagagtggtaagataaaccgtagaactgtttgatagcgactgtagcaaaatttgaagttctcttttcatgataattagaagctcactcagcactcgacttctacttgctgatttcttgtctttaattggttaaccagggagccgtgagaggtatttttcttgacatgtctgaactgaagaagaaacttcctttggacagaagtaccttcatcaagatgcgcaatcttagatacctcaaattctatagttctcgttgtgatcgagaatgtgaagctgatagcaaactaaactttccggagggacttgagtttccgttggatgagatacgttacctctattggctaaaattcccgttgatgaaacttccaaaagacttcaaccccaagaatcttaccgactttaacctgccttacagcgagattgaagagctctgggagggggctaaggtacgtgtgtctttgttttataatttcaccgttatgatttttagcttacttgattagtgttgcttaatttttcttactgttcattgcaggatacacagaagttaaagtgggttgatcttagccactcaagaaagttatgcaatctgtcagggttgctaaatgctgagagtctccaaagactaaatcttgaagggtgcacgagtttggaggagttgcctcgtgagatgaaacgcatgaaaagccttattttcctcaacatgagaggatgcacgagtctccgggttcttccgcgtatgaatctgatctctttgaaaactctcatcctcaccaattgctcaagcattcagaaattccaggtgatttcagataacctagaaactctacacttagatggaactgcaattggcaaacttcctaccgacatggtgaagctccagaaactgattgtattgaacttgaaagactgcaaaatgttaggtgcagttccagaattcctagggaagctgaaagctctgcaagaactggtgctatctggttgttcaaagctcaagactttttcagttcctattgaaaccatgaaatgcttgcagatattattgcttgacgggacagcacttaaagaaatgccaaagttattgcggttcaatagctctagagtggaagatctacccgaattaagacgtggtattaatggcctatcctcattgcgacgtctatgcttaagcaggaacaatatgatcagcaatctgcaaatcgacatcaatcaactctatcatctgaaatggttagacctgaaatactgcaagaatctcacatcaattccattgcttccaccaaatctagagatcttagatgcacatggctgcgaaaaactgaaaacagttgcgtcgcccatggcccttcttaagcttatggagcaggttcagtctaaattcattttcaccaactgcaacaatctggaacaagttgcaaagaatagcatcacatcgtatgctcaaaggaaaagccagctagatgcacgtagatgctacaaagaggtctgtctcatttcttactctatctacttgaatctctatagcagtttatgataattttctgtttttgtgtcattttttgcaggggggtgtttcagaagctttgttcatcgcttgctttccaggaagtgatgtaccttcatggttcaactatcaaacatttggatccgcattaaggctgaagttgccgccacattggtgtgacaacaggctttcaacaatagctctatgtgctgttgtcacattccctgacactcaagatgaaatcaaccgtttctcaatagagtgcacttgtgagttcaaaaatgaacttgggacatgtatacgtttcagttgcactcttggtggaagttggatcgagtctcgcaagattgattcagatcatgtgtttatcggttacactagtagctcacacataacaaaacatctagaagggtcgttgaagttgaaagaacatgataaatgtgttcctacggaggcttcaatcgaatttgaagtgatagatggagcaggtgaaattgtgaattgtggtttaagtttggtgtacgaggaaccaaaccatgtcgttgttgaaaggaactgtaaaggagcttcatcaagaagagatatgtccgttggagagagcatattgagcattgctgctgggtatttgtccaatgttttgaggtttctgtggctaggtgttgtattctttatggtttatggattttctaaaatttttgttaaataacttttttttgtcttcattaaattacatgtttatgtatagtgaaatttgttactggaccgggactaatccatgagtttcttagttagctaaaattcttccaacgggttaagatatcaaatgttgtttcatggatcctaatgtctaatataaccaagtatgtatttgagtaatctcacatttaaatggctattcaaatcatcccacagtagaagaactccacaaaaatggtcgtctttcatgctccaaacatcattcattacatttgacatcatcgaatttcactctcttgcccacacaaaagaaaagcctttcagcgattcccttttttgtcaaattcacattacagtctcgtgagagaaaaaaaaaaagaagaagctttttgactaatattttggaagacacccattggtcaagattctgagataactttaacttcatattattattttccccgaaagagagagtagactagaagtggtcagtgggtctaacacatatcctaaaatagtcgcatgtatatacaaaccaatgagaccatataacacacatacaaacatgtctatatataacccatcattagtttgattaaaagtgcgtaattgttcctaattataatcttacttactatctactttttacttatgtggagcctctccaatggttattacgataaattaacaaaaagtactgtgcttttttacacttgtttttgagaaacatttataattatttttatgaaatgttatcactagaagttcttaaacaactaatgaatcaaactatcaattgtccacgaacaaattttgataaatattttttacgcttgttcaagaattttagtttaaatatttattaaattagaaattaaacaaaattgtttttcttgaatcatttgcattcttgatacaatgttttagattcgttatacataggaaaaagatagacgatagaaaagagagaattgcataaaatacatgagagtggtttagttggcccaccttaagtatgaaatggacaaatcacaagccttgtctttccttcaatcacatccctcccctttaaaagctaccatcaagtaaaatctccattgccaagattttgccatctcttttcaacacaaatctatcaataactatatatcaatacattcaatttttgaagtactttagtgtctctaatagtagaagatcaatggtacggatgtcgattcaattagatgctcacacgttactacgttagcatgattttcttattgcgccaatttcttaagactttattagtcatgaaaacctaacatttttaattatttggacagaaatacttctgatttgagaaaaaaactctattcacagatgacacaaaaatatttcggagttcagaaaagttttgacatttgtttttagtattacatgtttttagaaacttttgttttgatagaaataaaataaaaaaatgaaaatgaatttgcttaatttcagtgaatcttttattcatttacattgtataacagaacaaataagaataaaaatacgaaaacaaaatgatttgagataaggaataattattataagaatgaagaaaaaaaaaaaaggaagaaacgggttaggggctcttgaaactacgacaaagcatgcccatcggactcccatcttgtacaccgcacgctcgacaactcataggcccactttgggccaatcttatttttatttctttactctaattaaccgttaattaacaatcgctaaccctctcacgaaatcaattcaggctgtttacttttactttgattttgtatataaattagaccacacataagctataaataattcatgtaatgttaagtacaaatcaaacaaaaaaagtttgtgtaacttaatttagatatatacgtgaactctgcactaggtagaattaagttttatgtccgactcctcgtacttaaaccaaaaccctaaactataattcgttacatcaaacacaaaagtaaatagcatatatcttcactcactcacagccatatatacattattcttttttcacgaaaaagtatatatagtagaagaaaacaaatctttcacacatctttatatatgttatactgtatcaataaattctacgtacctatatagcaaacgttacgcaccatattatagtgttatcttttatcaaacatgtaaatccctatataagtcatagtccaagttggaacacaataatccactgatgaatctgttctcttcttctctatcactcaataacgtggaagaagcagtctctactgatcccttgttattgctctcttcgttattgtaatgaccgattttattgttatcttcttcatgatgacctccaaaacccgaaactccatcttcttggctcataagttgagaagcaacaaatttatcgagtgctctccaatccgtcgtcatcactgatgttttcttcttcttcttatctttatttccactacttattagcgcattgaagctcacatcctcttctattaaatgtcttttgtagatatttttattcttctccaatgatgtaattgacgtcaagctcactggtcttttggtaagagggagtgaagggctttcaagctgcggaagttgaatgaattgatcgcagtggatgaagtttaaaccgatatctgatccttctagttcttgcttgaacattaaatcttgtgcaaaaacgttttgtttctgcttagatacgtagttaagaggctccgtaactgagcgtactccactcggtaattcgtcgtaaaagtaacttgagctccaagtttctgtgttcttggcttgcccggtcattggctttttcttgaacgctctacaaaccacccacccttcttcctatgacacatacacaatcatattaaggaatggtttattatatttggtgttagtaactaagtatgccaaacctttaggccaatgtcaaacaaaaaaaaaaatgtttcttttatttgcagtgagacacaataaaagcatgccttaaaagtgtgagaccacaagatagaaagctagcaataagcataggtacatactcatatgcaagctaaaatcaaactatttttttattttttaaattgattttgagatattgcaagaactatgatactcaaaaacatttttcatagtatttacaaaatttgcttatctaaaagcttgataagagatttgaaaagatacgtataactcactttaattaattcatgtatttatttagacgacttttaagactttaaagtttaaactcctattgtatatatattttaaactcctaaatatatgaaaatcctattcatatataaatggagataaaaaggaacgaactttggtctacatggaactgaagttttaggacagatcctttttactttttgttttgtgattaaaggtgtaacattttacataagtcttaaagatactcgacttttacctaaaaggttaaaatgtgtctcgtaaaagagcttatgagcaaacaaaaagtcgcttggacccatgaaggacgactaaacatccatgtaattcccggtagaggataaaatttagattgaacatctagtataacaattatcctcaaatctatgtatttcaaaatgatatcaggtaaaacgagaatacctgaggaggtgcattctcatctgactctagccggtattcatgcatgatccaatcggttttttggccattaggggctcttcctttgtagaacacaagtgtttttctcataccaatcagttttgacttgtcgtaaacagccttgtctcggcccgtggctttccaaaacccagccatggtcgctctgtttgttcttgttcctgttggatatttcttatctttgtggctgaagaaataccattcatttctttcctcatatccgattcggcagctctctataatatacataattaatgctcatcagatctatgtattcacattgtcagattaagaagaagaaaaaaatcctaaattaagtatgcatcatgtattttgtgaaaaccttgtaaatcccatggttcgattctgtagagatcaatatctcttatgacatcaagatcgatcttttgcgatgcaacttttttccttaaatagtaaccaacgagctcttcatctgttggatggaatctgaatcccggaggaacactacatgattgatccaccgattccattatttctgcataacaccaataccacaatgagatcactatatgttatatatacgtatatataatgatatgtacatgtgtatgcatgctacatcacaaagagatggggttatatattagagagaggtagagaaaagttagataattggtttcatggaaacagggagaaaaaaaaagaagaacttatttgtaattgagtttaatcatcagctcatttggtggttagtttccactacttacttttcatgttgatgcacttattaaacacatgtactcaggtattgtttttgatttcttacaaagaattaagaaaatggaacaagatcatgcaagttaggtttaaaagttgaagaaatcaaagaggacatgcatgagggcttctgttcatatatgacgcattgacgctaaaagaaaacggaaaagagagttttgttgtatcatgcgttcctgttgtaacgtggtttatgaatggtggcaatgatcatatcgagaaccggaattattcttttgtagacatatattactatactttatagcgacccaaacctagctacattatatatatacagccttatagaatacaaacaaaaacagctttttctacataacaaaagcaaaagaaatcatcaagtcttagcaaacagttataatggtttcaaagtctatgtctgttttatcttcattttaaagaaagctcaagactgtactaaatatactatacacacatataaatatatacgtacaaattcgaattatatgcagatacaaattactagggtatccgaaaaaaaagaaaaatataggtattaggtttatacaaattaacgagccttgaatcatgataaataaaaatacctgagagatattataatggatatacaaaacattatgcagatcggtcaacacgacaagctaaagaaccaaggaaaatatagaaaaaaggacgacgagagatcgatgctttaatttggtgcaaaataaaaatgcacatgtaagttgatgagacgatgcaaatggactcttctgagcttgaaagcccgtgtaaattaggttttaccttttcttcaacctgtggaattatagatatgtgtataggacactatttactcgtttggaaacaaaagaaacgagccgttatattaagaagaagaagaagaagtcaaagaaagatggctgtgtagaagatgatgttcatcgagagagagaactgatattgatcttggttataagtttcggtgaatgtgaagagaaagagagagagagagtgagaaattgatgattcgatgacatataaaaggtatagagagtgtggaccgctcaattgcgcgtggctttctccatgtccccatttgcgtacgtcaccctcctcccgcttcttttcacattcttcttcactttttaaaaaaatatatattttagctataatatattttttattaggagtaaaacggagttaaagactttaagatatcaaacttattacttctgagttctgatttttcagattgatgtattatgaatatttgcataattgcatacatatttgaagaaaaactcaaattaatcatgttttttttattgtcatcagttctaggtttgcaagatttttgcatactacagggatattggacgttaatataaatcgaagttatcacacgcacaattaaggaatgatccatttcttttagtcaaatatggtattcaattctttccacttttttttgtcgaaatcaaaattcaattcattgtacgcctttttaccagtatatatatttcttttggtgtaaaatcaatataaacatctttaattttgtgtcatgcaaaaaaaaagagtaaataaactaccaaaatttatattttgggtttatatgtacattgcatctctaccaaaactgccaaataactctgacattctttcagctttgggacctaacttagtttgtacatataggaatgatatgtaccatttacattttttttaattcatatacaaggactaggtttaagtagttcaaaactagcgagttgcaactgctctatagtatttcagcaaagaaaaataaaggaaaatttaaaagattatataaaaaattccgtcagaccaataagatcacgggttttaatgttgcaaacattctgacattctggaacgtgccacgctggcacaacagagaatttccctctgccacgtggtagagattaaacaaaaccgcccgcttcacatgcctgtgaacttcacatcatccgtcgatttaccaaaagtatcctcaccacttcgacttttctaagggtatattcgtagtttaaacagcatctccggtgacagccttctcttctccaatcatttagcgacaagaaccaacgagaagggagtgaaatcgaacaccagccaccacgtgtcagccactggttggttgtagaactattatctttacgtagaagacaaataaagctagtactaatatatacacatatcatgcgaaacaagaataaagttataatcttattttggtaccaaaatgatttgatctattttgggagcgtccttgtaacatttagaaatatggtagtcccaatttttgtcatatattcacatgttcttcagaaatatatatgtcgttatagacattgattactgaagaagttgtaaatgacttgccaacaacaagatacagaattagaaagaaagaaaaaaaaacatagcaaagtgaactaatctggtcctgcatgctttggacctgtgccattatagctaatttcaacaaacgtgtttggacataacttgttgggcttcaaaattgcacttattgccgttgtttcgtcgttgactcttgattattaacaaaaagtttatgattttctaaattaaattttcatacatataattcttaaaattatatgttaaagaaataaagtatttctactaaataatattaattggtagaggataaattaaaaataatattaattgggtttaataggaactttttttttttttgtcaaagagtttaataggaactttaatttagaaaagaaatgtttttttttcagggatcaaacacgtggcccaacagagagttatagatgagctgattatgatttaaagttgcaggatgcaggaggagggtatgatttggtttaccataatttgattagtttcccaaaaaaatttaataagtagctttaggttttcttatgaactttgttctttgtcttaacgaactctaacgttgacaaaagtctcggaatcaagcttcatgcacgtgtcaattgcatgtttatattcgaattgacgaatcgttttgcttgttttctctgcacgtttttttttttttttcgttttaaagttgacgcatgcttttggaaaataaataagaaaattattaatgctaaacgcatgctagggattatcttgttattctgttaggctgttacattaggaaagagcatatgtctcttttcaataataagttaatctcatttgtaacctttatctataaatattgggttgattttttgtgtcttcacatttttttttagatatcaaatgttgtttttttctaaaatatatattaaacttcgtacggtatgagacacataattcattttgcatattgataaatagaaataatgattgtagggatctaaatacgaaaaaacacattattataataatctcgatagatgaatatataaagtaattatttatagttcttgcttgagtcatgttctattggtattggcatgccgacggaatccattaaaacaaaagtcgaatttgttatggtgaaattgttattaattcttctataaatggtgagattttaaggtgaaacttgctgtttgtcttcttcacttgttgtgttggccgttaaggtgaaaataataatgacttggtactttgtaagtgaaaaatgagggaataagagatgtccacgtaggacggtggtgggtcggccggcggtcactaatcaagcggcggaactcatcatccctaagtgggtcccatccaccctcccctgagtttttggccggtgaataaacaaactctttcaataactttattttctttacatctctttatttttcttgcttggagtttctaaaattcttatattcgatctactggattttcacaaaaatattctagtagattaatcagaacatatgtatgaatatagatgttgatcttgatcaagatcaagtgacggtgttagtttttttaaaagcaagtgactgtgttcataacttaagaaaattatttatgaaaagagaaagggagagagagaggttagcgtaaccggcaaaagaagattctagtgggacacattaagatcattttacaccattgctagttgttacaataacatttgtccaaattctttctaaaatgatttgataataaatcataacattttttcaaattctttcaaagatcatttgatcataaaccattatgattttatgaattttattggttcatttttttcattttaattatgaaagagtcatgtcatgtctaagcaattatatagctagttgacaaaccagtaaactgtaacttatatatatatatatagaacttaaagcatttgtatctttgtcgtcgaaatatgtatcttgacaaattttgcctttggatcattattgaaattaactacatatgataagcttaaagaaacaagtcaactctaaatcgccgtcctatatagatcattcacatgcacttaagattgagataatgataaaattgtcatcttatctaatgctgattttgagaaaaatagttgcacttctgaaacctataaaaagtaatatatattagttcaagatcgacatgatcacactcgctagtgctaagaactaagactaacaaaacataaaccaatttttaacttatctggaaaaacatataaaacaatcttgaacttatctatttaggtttactaaacattttaggcaaagttttattagttagcttttaaatattagagtcaccatattaattctataaccaccagtcgtttataattcctttatttatacagtatttaacaaaagacgattagttaataacatgattagattagtataccaaaactatttgattacatagatgatgagcatatttgtttgcataaatatatagatgcactcatttgaagtatatgaaccagccgttaaacgagaatatgacccatgctctaaggtgggtcgagctatgtaagaattcacaagaagaaatcgtcgtgttatcataaaactatatatagtagaagtcatactggaattttaacttgtaaatataggtctttctaatcacgcaacaatcttgagatttactcattcctttttgtctcctcccactaacataatggggcatacacaaaacgggcacatatatatatacaattctctcattatgcttatactagaagtgtaatccataagcttctttgcaacgttacttataattttcacaacttgttcaaatctatgctaatagatattgcttaatttaccatttatcccagagaaatagatcgaaaaggtgattaatagtcattttgcacccgaaaaaagagaagaaaatgatttattagtcaaattccttaatattttcaattatatgattgtctatcaaattatcactttatagatatacgttgtatgtagtagacacacaaaaatgtacacatccccttcaagcaagcttggtatagtgttcccgtgtggtaatgtcatgtgcttatacgactggaaagacccaatacattaatttttgaaatcgtgaagaaaaagagacgatgattgattattatttattataagaaagagtagggatctatgtactgtcatagtatgaaactatgaatgtgagtaataatactatatgagtatatgagaattgatggacttctaattatattagcaaatgcaagcagtaccgatcattgttctttgcaagtcaatatgaaactgatgggtgtattattagaatgattaaacgaacttaaagaaaaagaagaagactaaaatttatgcagaaaataaaaaagcaccaattgttgatagattcgtgccatgggagttgaaatttacatatgataaaagctataaaggggatgtgtataattactggtgattgcgtggtttgtccacgtacatgataatttaatacgttagttttaaaattagagattggttaggaaaaattgaaaatatatttcattggctgaaaaatgaacgtgtgggttgtattctctcttaagtttgtcttacatctttcaagtgaaatccaaaatcatgatagttccgtaataatcacaaaaacagcattacaaactaattaatgatatctttatgaaggtgaaattcgtcccaatattgggcctataaagcctatatcaaatcagggccacatgggttggtgattgggtataagaaaatgaagatatacattttttctggtagttgttaaattgggcttaaaggcggcataccttaacaggccaagccgctaaaatccacagcccaaactagtttaaccgctaacttttttaaattgtttaattaaacgatgtcgttgtagaatttcttcacagttcacacatttgttttcaacccaaactcgaggtttctaaaattcctaatagcttttttcatggatcatttcattgttgggttcgtattttaaaaaaccaagatccacatgaacttcgacagtggacttttccacgtgcgaaaacgacaggagccagagtcaaacaatgccagggtgtacgaacttgaggcacgtgacgacatcagtggctcaacggtcttattcagaatcagcagcaaactattggcacgtgacaaagaaccgaccccacccaccaatcattttgctcccttgtctccttcctctatccttacccccaaaaacaagtctagctttgattaaaacaaattttcaaaatcgcattagtgattttgtaattttaattatggaattaattattagttgaatgatgttttttcttatttagtagaaatcaaacacacttcggcgcaaaaaaacataagacttgctaaagcgagtcccacatgcatcaaatcccggatgcgttaattacgtttgactgatagataatctctagtggaccactcgagattgtaacaacaatttaattcaacttcttggtccaaacaaaagacattaaagaagctccaaagaccaataaatactgctgaaatttttaataattgcttcttgttttttgttttttgtttttgactaacagtttaaatcaggaagactaaaaataagaaaaacggttaggccggtgaaggctgagaggttgggtcggcggaggaaggaacgtcaggaccaacacgacagccttcaagcatgaaaacaacatcggacattgttggacggtctagaggatctgttgcagtacaaagaagtccgactttgattcctaataagaactcttcccattctgatgattccgggtcaagttcgagtagtcctggttctagtagctctgtaacttgacctctctgaagctgtttctttacccatttcactatatcctcgtcttgtgtgaacattactggtctttttccagttaggatttcgagtaggacaatgccgaagctgtagatgtcagattctcttgtgatttccccggacaatgtggcttctggagagacatatcctagtgtcccaatggtgtttgctgtgacggctgatcttgatggggatcgaattgtgagacggtcaagcccgaaatcagatatatgggcttcaaagtcagcgtcgaagagtacattctgtggcttgatatcaccatgaacctatttggaataagagatgttaaaaagacttaaaagtgatgtataatctagaatgtgatttaaactatacagttcttaccatgttggattgatggaggaatccgagtccgcgcgcgatcccgagagctatgaggtggcgcattggccagtttaggacatggccatcttggtgggaagcttcttggagcagggtagataagttcccattgggcatgtagtcatataccaaaagccttaaatctggtggacctgcgtagtaacctctaaggactgtgatgtttcggtgcttgactttaccaagaacttcggcttcctttttgaacaagttctcatttaagagtgatccattgggtaagcggcggatagagagaaccattccgtcattgtaattggctttaaatagcaatccatatcgggttctgctaagaacgttttcttcatcgaactgtcgtgttgcttcaattgtttcagctagagtgatcttgttattgaacatcactagctttggttctccgttttctgtgcttgatctgcttgtgctgctacgaactctacttcctgcgcttgttctaccaggactgcgtttcttctctcccgttgtagactgttgtttcagcttcttcctccatttcaagagtgtgtaaacgtagaagcagcagaagagtgacaagaggaatgcaccaattgcagccataactatcatcagaatcattttccttttcttcttcttcccctccgctgtgctgctttcacatcttctgttcaatggcttcccgcagagctctgtgttgcctgaaaattctgatgtgttgttgattcttgagcctaaagaagctggaatctctcctttaaggttgttgcttgagacgttgaagtataccaggttactagaaataagggcgaggctagccggaatctccccggttaagttattaacagaaagatccatctttgtcaagtttgataaaccagaaaaagatccaggtatgactcctgaaagatgattgtggtcaagtgacaatgagttgagagacgagctctgagagatttctggtgggatttcgcctgacaagttgttctgacccaagtcaagcaccttcaaacgcggaagacgagagagatcagctggaatatgacccattagccggttagatcttaactcaagaacttcaagagctgagcagtttccaatttcaggtggaatagacccagagatgtgattatctgacagtgacaaagaaaccaacaaccgaagaaacccaaaagtctgcggtatttccccggagaatgagttcgagctaaggttcacataccttaaactcaccaagctactaaacccttcaggtacaaccccagagaagttgtttccctgcaatgcaatcacttgcacgttgggcaaaccagagagctcaaccggaacctcaccagacatattctgcttgctcaaatcaagagctgttaacttaaacagattgcctacactagctggtatctcaccagaaaatccattcccactcaaattcaaaaaactaaggttacttaagttgctgatactaaccggaactgccccggaaaaccgatttccactcagatccagctcagacagacttgtcaacgccatcaactccaccggaaaactcccatttaagttgttttcacctaagtttagcctctcaagctgctgcagattcaccatagacgaaggaacataacctgagaagctgtttctgcctaaagataaaacctttaaagccttcatgtagccaagaaattctggaatctgaccttttaaactatttccttcgaaatctaaaacatctaacgaaccacattgcttaatctcaacaggaatctcaccagtaagagagttattagccaatttcagttcctctaatctcttcaagttaccaatatccggcggaatctcaccggaaaacaagtttccagaaacatcaagattctttagtgacaaaatattagtcaaccacaacggaaaacgaccggagattcgattttcctggagatccaagacctgtaaaccggtacgacagttcgccgtcgtctcaggccgtacgatatcggagaaagcattgaaccctaactgaacaatcgtaagcgatgtgttgcagaagagagaaaacggcacagtaccggaaaaattgttattggagagcgagagaacctccagtttcggaagagcaccgtacgcggcgggaatcacgccgccgatttcgttctccgacgcgctcaagtgaactaaggaggagcagtttgagatagcagacggtaatgttccttgcaagagattgaaatcaagccataagtactgaagactttggaggttacctagactcgccggaatctcgccggttaactgattatacgagagattaagaagctgaagctgagtcaagttagcgagtccactcggtatctgaccagagaaggtgttcgacgaaatgtcaaggaactggagactcgatggtaaaccaacggggatctcaccggagagacggtttccagcgacgttaaagacctcaagcgaggtgagattcctcatcgccggaggtagtttaccggagagtgagttgtactgaagaaagacggagagtaggcgcgtgcagtaagcgagtgaagtagggatagtaccgttgaaagagttagaccggagactgagcttccgtagcatgcgtagaccggagatacgatcggagattcgtccggagagttggagacgaggaagacggatctcagtgacacggtggttagtacagccaacgccacgccagtcacatggagctgctggtgttgaaggatcccatgaagttaaagcaccgagagggtcatggaggttgagtttaaacgccgtgagagcatcaatctcggcttgagattcatcggcgtatgagactaacggcgcgtaaatgaccaggaaaatgaagaacagagatatatccatggccatagatctgtggcagtgaacaaaatgaaaacttagcttgaagaaggtgagagaagtgtcgccatgagtgtggtttttttctgggagagagaatgagcagaaaaagagtaaagttaaagtaaaagaaatacaaaaatctggttctgtagataatttgaagtccgcactataatccatgcatttactaaaaaaatgatactatttgttggaggggaaaaaacattattctaatcattatattgtccttgcaagtttttttttttaaaaacaaatacaaacagagaaaatcacattattttgttttgttttctggtccactcgttttaaactacggcgatcgattttcacggcgagaaatgtcgtcggagcttggctttgctttacttaccaccttcacggtgctcttgtcgtatttaagcttttctaatgggttactgcaacctcgtaggatttctcatggattgtccaaaagtagcaagtacttgacgagggatgagctctggttcactcaaaccttagatcactactctccatctgtaatcaatcttcccaatttcgtttcttcttcgattttagtttctgtttctctttcgttattgaaattcaaaattcgctgcaaaatcctagttaccagttccagctgtttctaattttatttcaggatcatcgcaaattcagacagagatactatgaatatcttgaccatttacgagttcctgacggacctatctttctcatgatttgcggcgaaggaccttgcaatggaatcaccaataactatattagtgtaagatatttttccgtgaaacatatccatttgattgattaatttattctcataatctctgaaatttgcattggttttgtttgttaaacatgttcttcaggtgttggcaaagaagtttgatgcaggcattgtttcactcgagcatcgttactatggaaagagctcaccatttaagtcgttagccactaagaatctcaagtatctttcttccaaacaggccctttccgatttagctactttccgccaatattaccaggcaagtagtagtcttatactcttatggttattactttctctaggatcaaatgtttaagaagctgcgtttattagcatgttttgggatttgtttgtggatgcaggactctttgaatgttaagtttaatagaagcagcaatgttgagaatccgtggtttttctttggagtatcttattctggagctttaagtgcttggttccggcttaagttccctcatttgacctgtggaagcctcgctagttcagcagttgttcgtgctgtctacgaattccccgaatttgatcaacaggtattcgttacaatattcaactttaagtgaagaaatgttgtgtttcttcatatagagtttagttgctgacagaatcgagatttttataccttattgaatagatagctgagtcggctggaccggaatgtgaaactgcgctacaagagactaataaactcttggaactagggcttaaagtgaataacagggctgttaaagctctcttcaatgccacggaggtctagctttactgtttctgttttcttttgtttgaatcttaaggaagtaagaagtctatctccaatctgattaagtttctgaaatctgtagcttgatgttgatgctgatttcttatacttaatagcggatgcaggagttatggcggtaagcaggttcatttcatatttataaaattttcattttctttctagttttagatgtttatctggcagattcaatacggaaacccagataaactatgtgtaccactcgtggaagctcaaaagaatggtggtgatttagtggtaagttctttgtttttttagatcgctctttacttatgcttggtgtatatatattgacattcatcatatggtttgcaaacagaagaattgtatttggtgatacataacattggatgtgttaatgcaggaagcatatgctaaatatgttagagagttttgcatgggagttttcgggcaaagctctaaaacatatagccggaaacatctactagacactgcggtcaccctagagagtgcagataggctttggtggttccaagtttgtactgaagtggcttatttccaggtggcacctgcaaacgatagcatccggtctcatcagatcaatacagagtatgcacagacccaagcttatatatcatattcagaattctgattttgtcgtttctatttattgtcccatttacacttcttttcatttcataggtatcatttggatctatgcaagagcctctttgggaaaggtgtctaccctgaagtcgatgcaacaaacttgtactatggaagcgataaaattgctggtatgtaatatcggaaaacttctcgacgatccttttagacttgtgcacattccaacagtttcttcgcatcttcttattctcaattttgtagcgaccaagattatcttcacaaatgggtcacaggatccatggcgtcatgcatccaaacaaacctcatctcctgaccgtaagtcttcatttagtttgatcaaaatcgcatagcaataactcaggcatagcctatgtcgttatgtagcagtattcagacaaatcctttgtctgggacactaaaaagataatgtttgatgacacagtgccttcgtacatcatgacttgtcacaactgtgggcatggaagtgatcttcgaggatgcccccaatctgcaatggtcattgaaggtatattaccggcttcttctctgtttccgatgcctgaagtcaatgacaagcatcagaacaactgttaagaaaatatgatgtcccattcttttcctgtttttttcctcccatttgcaggtgatgcccagaattgcagttcaccagatgcagtgaacaaagtgaggcaacatatgataaaacacatcgacttgtggctctctgagtgtcgtggataggttaggtcgtgcagagattaggagttccatgcagagtcacacgaactgcgttctgcaaataaataaaacatcagatgtacgctccaaacttatatctgtgtaactgtaacctctgaaactgagtcacgtagcaagtccactcggtatctcgattttaagctttcatccactaaggcgaatacagtagcacgagatatggccactcgggaatggaggttcagattctatctcttaatcggtggtccatcttggcttctgcctctcattgttgaagacaatcgaccttgtgtcaagttttatctgttttgccctgttttaattgtttggttgttctgttactctgtttccatctttggttttaatttctacgacgacaaaaaaaaaaaaaaaaaaaaatttaaagtccgcgttataaaaaaaaaaatgatttttgttacaaattactaattagggaaacattattctaatcattatattgtccttgcaatttataagtaaaaacatttcttttctggtccactcgttttaacttccggcgatcgattttcacggcgagaaatgttgtcggcgcttggctttgctttactcagcatcttcgcgatcctcttgtcgttatcaaccttgtctaatggattacttcaacctcgtaggatttctcatggcttgacggaaagtagcaagtacttgacgagggatgagctctggttcaatcaaaccctagatcattactctccttctgtaatcaatcttcccgacttcgtttcttcttcaatttgaattttcttcttgcattatcgaattgtttctaatttcgggattcgaattgtttctaattttatctcaggatcatcgcgaattcaaacagcgatactatgaatatctagaccatttacgagttcctgatggacctatctttatgatgatctgtggcgaaggaccttgcaatggaatccccaatgactatataactgtaagattttatttgattgattaatctattctcatcgcatcgaaaaatttctaaatttgctctgtttttcttgataaacatgttcatcaggtgttagcaaagaagtttgatgcaggcattgtttcacttgagcatcgttattacggaaagagctcaccgtttaagtcattagccactgagaatctcaagtatctttcttctaaacaggctcttttcgatttagctgctttccgccaatattaccaggcaagtactagtcttatggtttttgtttctctaggatcatatgtttgagaagttgcgtttatagtagcatgttttgggattttttttgtggatgcaggactctttgaatgttaagtttaatagaagtggcgatgttgagaatccgtggtttttcttcggagcttcttattctggagctttaagtgcttggttccggcttaagttccctcatttgacctgtggaagccttgctagttctgcagttgttcgtgcagtctacgaattccctgaatttgatcaacaggtatttgtttcaagattaaactttaaatgaagacatggtgtgtttcttcatatagagtttagttgctgacagaatcgaaatttttgtgccttattgagtagataggtgagtcggctggaccggaatgtaaagctgcactacaagagactaataagctcttggaactagggcttaaagtgaataacagggctgtgaaagctctcttcaatgccaccgaggtctagctttgttgtttttctttctattcgttggatatttaaaaaattatggaagtcaaaagtctgtctctaatatgtatatgtttctgaaatctgcagcttgacgttgatgctgatttcttatacttgatagcagatgcagaagttatggcggtaagcttgttcatttcgtactcttatgattttcattttctttctagttttagatgtttatcttcaaaaattttggcagatccaatacggaaacccagataaactatgtgtaccactcgtggaagctcagaagaatcgtgatgatttagtggtaagttcttttctttttagatccctctttgcttatgcttggtgtatatatgatcaatgattgatcatatatgctagaagaactcgttttgcaaactaaatatttgtatttgctgatacattagatgtggtgtattaatgcaggaagcatatgctaaatatgttagagagttttgtgtgggggttttcgggctaagctctaaaacatatagccggaaacatctgctagacactgcggtcaccccagaaagtgcagataggctttggtggttccaagtttgcactgaagtggcatatttccaagtggcacctgcaaacgatagcatccggtctcatcaaatcaatacagagtacacacagtcccaagcttttatccataacttttttcatggtttatatttattgtcctgcttacgtttcttttaatttgataggtatcatttggatctatgcaagagtctgtttgggaaaggtgtttaccctgaagtcgatgcaacaaacctgtattatggaagtgacagaattgctggtatgtaataacggaaaacatctcgatgctactcatatattttcgcacattccaacagtttcttcttattcgtaatttgcagcgaccaagattatcttcacaaatgggtcacaggatccatggcgtcatgcatccaaacagacctcatctcctgaacgtaagtctccatttagtatgatcaaatccttataacattatctcaggcttagtctatgtcgtacagtagcactcagacaaatactttctatgcgacactaacaagttaatacttgacgacacagtgccttcttacattgtgacttgccacaactgtggccatggaagtgatctccgtggatgccctcaatctcccatggtcattggaggtatattactggcctcttctctctttccgatccctgaagtcaaagacagactagtattggaacaactgttaaaaaaatattatttttccctgcttttttcattctcatattcaggtgattccaagaattgcagttcacctgatgcagtgaacaaagtgaggcaacatatagtagatcatatggacttgtggctctctgagtgtcgtggagggattaggagttccatgtaaagagtcacacgaagtcagaaactgcggttatgcaaataaataaaacatcagatgtatgtttcaaacctgtatctgtgtaactgtaacctctgatgtatgtttcgaacttgtctctacggacctaatacagtagtttacacgatgagacgatagaattaccgtcaagccatgaattgagaaagctgtctaaaattattttagtaacatatcagtctctttcgtaattactgtctaaatatattataaattgttacctatcacaaatccgttgtagtctagctggtcaggatactcggctctcacccgagagacccgggttcgagtcccggcaacggagatttttttatttctcgggattgactttgtttgtgaaacgagtcaacagagtgaaggacagatgtctcctgctattggaccggaaggaaaatataacggatgactcatatagtcacggattcatctttctcgggatttcgaaatttgacggtgatctgatttccaacgattttttctcttccatggctttttttcgctgatcggtaaatcaaacgtttgtttcggtttcgatggtggaagctacgtcgaatttgacgccgactcagagatatgcggccggcgcattgtttgcgatcgctttgaaccaagcgcaaatcaaccagactcagccgctgggaaccccggcggcggaagacgacgacggaggcgatgaagagcgaagaagcaattgcagtagcggagattctgtctccgatgaccccagcctttgggtacacgagacgtctggccttcttcgccccgttttcaggtgctttcccaaaatctcttgtcgatctcatcgattttgaaattcctttcgagtcttggttgtctatgaccgttgaaatcatctggttgattagtagttcgctttagctctgtttgtaattcgtttctatccacagatgtcttgagattgattcaccggcttggcttggtctcgagcaaacagcttgctcttctccggctaagcaccacatcggggcggtatggctatttccggagttcaaattttgctgttatggatccgatactcactgttgagttattgttcattaacttctattttgtttttattgtagttcacgaggttactctcagaagaagcgaatgatgcttctgccgagatggtggagcaagagatggccttagctaaagctgctgatgctatggtgcatagcattcaatgctctgtatctatagatgctaagaaggagaagcatcaagaatacgaaaacgaatgccgtgagaaatatgctgttcctgaggtaaaatcaaaagatgttgatttggataaagagaaggataagaaggaagcggctgaaagtgctgcaagagaaggtcttgaagcgggtgtggttattatagatggaagccacaagcctgaagttcttgaaaatgagaagtctgttgaggaagtaacattgcttagtcatcagaggaagataaatgttctttatgagctactttctgcttgcttgtcagataaacatcacgaggataagaaatgtaaacggtgtagaaaaggctatgatgcgcgtcaccgtgttgctctccgtttacttgcgacctggtttaacattgagtggattaaagtggttcgtatagttatttcttccagaacatactcattttgaaatttgctttaacatagaatcattgtacgaattagctatattgctctgagttaggatatggaactggcagtgctctaaattccagtagtttttcatgtgctaccattttgttttctttttgttctggcagttggttagtgaatgatgattttgtgtctcctttcattcttataaatgattaatatttatggatcttcaatttctaggaagcaattgagacaatggtcgcatgctctgccatggccattcagaagtctgctgaaatgaagggtgaagataatctaactcctacgacttcatgggctaagtggaagcgaggaggcatcattggtgccgctgctattacaggaggcactttgatggccataactggtggtacggcaaattcaaagcgttaacattctaaattagagcatattttgaactggttacctatcttacatttacatggttatattcaacaggattggctgctccagctatagctgcaggatttggtgcattggcaccaacactgggcacaattattccggtgattggagctgggggttttgctgctgcggctagtgccgcaggaactgttgctggctccgttgcggttgcagcatcgtttggaggtgaataagagtagatgagttcactttttgcactatatggataatcagtgtgcttacaactaggcactaggtgttttggtttctctttcatccccattaatgtattaaatctttgttaaggagcgtttacaatgtcactggtgcttcgttttaaatgttttcgtatccagctgctggagctggtctcacagggactaagatggcaaggagaattggggaccttgatgagttcgaatttaaagctattggcgaaaatcataatcaaggagtaagttcatatttccctatgctactagattattgtgacatatcataattttgcagtttggagaacgaaatattggttgtatttcctctccctccttcatctggaaatctccttgctctgagttttcccgtttttgagggccacgtttttcgctgatgggaacagttttgtggaaatcaatgtaacagcggttagcagtggaagtcttggttgctggtgttgtttttgaagaagaagattttgtgaaaccatgggaagggttaactagtaatctggagaggtatatgtcgttcgagaactttagtatcttaataaggaaataggatttaacatctggagcttctccttgcgttggctttactcattcacgtttgtactgattctcaagaagtgaactatagttgcttctataatagtctgatttcttactattccaggtacacgctgcaatgggagtccaagaatcttatcttagtgagcacagcgattcaggattggcttacttcaagtaattggtttttatcctactaaataacatgttgatgtaaaaatgtcaaattactaagattattgtggtattgattatgatttctccaggacttgcaatggaattgatgaaacagggagcaatgcacactgtgttggcctctcttttaatggcattggcatggccagcgacaatcttagtagctgctgatttcatagatagcaaatggagtattgctattgacaggtaacgccttttcccttgctaagtagtcagtctatgattgaagatgatgcaccatttacccatcacatctccaaataatgaccaattactttgaaacttttggtattggttttgcatttgaagtgaactaaatccgtgactattataatctactcctgtaggtcggataaagcaggaagacttctagctgaagtgctacaaaaaggcttgcaaggaaataggtacagatttcatgactgctgcaatgaagtaaatataatttctatattcaaaagttatgtacgtaaaggattcatgtcttgttttgcttctgtttcctcaaattttgggaattcagacccatcactctagttggtttttcgcttggtgctcgtgtcatcttcaaatgcctccaagctctggctgagacagaacaaaacggtaatttccaatgtgcaagatagaagattgctttaaaagatcaaatctttcttacggagactcttaacatgtctttggtagctgaacttgtggagagagttgttcttcttggagcacccatttcaatcaatagtgaaaactggcgagacgtaaggaaggtaattaattctctgatagtacaaacactacattaccaaaatataggtcacatctatggaatcaaatcttaaatgagattttcaaaagagaaaattaatatctctggtcctgtttgatagatggtcgctggaagattcatcaatgtttatgccacaaatgattggacccttggtatcgcatttcgtgctaggtacataacatacattccattatttcaatttttattctcttcacctaacaataccaacttgttcttttgatcctaactatgatcttcgacagtttaatttcccaaggattagccggaatccaaccaatatgtatccctggtatcgaaaacgtaagccatctatctctttcttttgtcacctctatgtattttatccattaatgaaacaaataattagctgatggagtgaatattcagtaaatgattctgtcaaacaaaaagatataaggtcattttcaataaatttgtaaagtttttatcataattatatcatttcacctctcgatttcaacgtgttacaggtggatgtaaccgatatggtggaaggtcactcttcatatctatggaaaactcagcagattttagaaagactcgagatcgacacatattaccctgtttttcgagacactctttaaccaaaatcaaattagataagtatcacacaatatagggaaccaaactttgtcacatgtttgaaatgtacacaaataaaagtcgataaacgttagacattaattaaagcaaggcttgtattttgtttgtttgttttagctgtcgtctttgggttttttttgtttaaacgttcgtggatgccggcgaaagacaagggcttctgtattgtaattatttgtatgaaaacacattgcaccgccatcgttgactatggccgtgttttagcttcgccgttcttgtttccttgtttacatacaaaagtctaaactgatcgaaaatgttactgaacaaaaaaaaagagactacacttgaatttcagcaattatcttatttagatttcagtaaaccaattcctattgtctcatcatgagactctcattatcctctttgcttcactccactagtgtccataatattacattgtaagtatattaataaccaacaaaattttatatatttggtttcaatcatctaataaattagccttgacaactcactgggtttgccctaaatttgtcactgtcttaactttgcctctccatgacaatagtctgtcgtgaagagactactacttacccgtttattattattttttctacgttttttacatacatagctatatattctgtttcagccagatgtaaagttttttcctcgaattgatgaaaccaggtgcaatgtatctgtagatttcatagatagaaaatggacattgtcgttatccttttaacagattaaagaacttcgaaatgattaaaaacgagggagctagttaaaattaaaatatcttaagccatatctttctctcgttattcaattgagaatgcataatccattcattagattatgaaacaatattcgttttccaagtgattatttaactgagccattgtcaggagggtgttagatcgctttcaactaaaacaataattgaaaggccaacgatgattttcaggtagtgcaagaaggtttaaaaatcatatagaaaaaagtgagatatccaatcatatgtatacaatattacatggtgaatatgtgaacaatatctactctcagatgcttatcaggtatgtttactctaacaatgatttttagtggcatttatcgaactatattctattttaaatattgttttattagcgatgtgatattattctaacagatccgtatacactatcataatttgggatctccttggttcacattttcaccaagtcacatgttctgaaatttagacaaatgaaaatggtcattaaatgaacgtagacgttaagagttatttttgtttgtttgtttgctaaattataatcgtctttgtttgaacgttcttcgacgccggtgaaagacgacaacttctgtcttgtaattatctaaaacgtcgtcgtgctcaatcaaccaccacatgtcacccgtttacgctgaccttattgcttgctctaccgttcttgtttccttttattgtcaaaattgaaaatgtggattttgatgttttttgtatttttatgtctggaaaaaaagtgacatgttcgagacaattttttcgaggcagtattaaatttagtttaaatcaagtaacgtattaatgtttagtaagtctaagatagagttgaaaatcatatatttttaatccaacgcctctgtctcgtgggtctcaatggcatgtgcctctgtgcgtgcttcaccactcatggttcatccaagttagaataaattcaacggtatataaataaaagccaatatatttatttatttacaattacaaccataaattcatcacctcatttctttcaaaaaaatctatttcaatccatccagcactgcatttatttcagaaaatctaagcggccttaccaaacaaagttttaatgaatatggggtcttatatgactcagtgtccccacaatcacaagtacagaactttatgaaaatgatcaaaaaaaatataaaggcaatgtcaatttgctggtgaaaatattgctataattaacttgatgggtcgagaagctgtcttctctagaagacaagacaaaccctactcgaaccaacccctttgcaaagctgttacactacagtcttttaagctttaaatgttacgtttggcttagagctaattttagcgatatgtgatgtgcctcactcttcacaactcattacctgtctataaaattgtcactttcttatacctacacccaaaaaaaaaaaaaggagacatattttttgcattaagaatagtaaatttatatatgcgagatattcctgagtccacgtagggtggtacgttacgtatgtgtatatgaatgtgctacgtgtgtagctacgcaaagtgtaatgaagtaattgcaatatactgatctcgtcatggtagttgaggtagtgtttgatacttgatgcattcaggttattataaatgcatagttttgaaactttgatgtcaactttgacattatccatctagaaaattgataatcgagtgtgttaagagtaagcacatacacaagtgttaggtgcatttcaccgtagtattcaaggtgccgagtcctacaaaagaaaaaaaaaatctatacaaatgatataagatacctaaaatcactaacaaaataaaataaataatctcgagattaatgaaacaaaattaacaaaaccactctgctttttttttggtaatgaaacctgtatgtttggagtttataacaaaaaacataaatatgataaaatacatttatttgcaaaaaataaaaaagtaaatagtactcagtaaactgaaaataaaactaataaaaaccttagaattttttttataaatatcatgtggttttaatctgcgaccttttgttgggcttgtaaaattataactttaactctgatttacgcttaaccagcgaacttccacccctaattgacacaatggcaaccatacaaccagaacaaaagaaaaaggtgaaataactaaaaaaaaattttttttttttttttaagtagaagttctcatccaagatcgatctttgcaacatgctaaattacttattgaaaaaaatcttatttttactgttacatttcattcaaggaaaatccccattaaagaaaaaaaaaaaaagggcaaacaaagagccaaatctgttttcatcagaacacacgtgtatacacatacatacatatgacatccacaaatcctcgatgagggcaacttcaaacttttcagttttcaccataccaaaccccctgccacgtgactcgaaccataaacttaaagagcacagatgaggcgcgtggttggcacggcgaaaagccgcgtggctttaggagccgtgagaccaaacacatcattcatgtcgagctcacttggtttcatcccatcaggtaatttccacgtgaagcaatgtaatatatgagccacggctaagtcaagcgcgtataaccctagttgcatacccgggcacgatctacgacccgacccgaacggtataaactcgaaattgctccctttgaaatccggtacgcccggttccaaaaacctcgatggtctaaacgtgtccgggtcagtccaagaggttgggtcgcgtcctatggcaaacgcgttgatcatcacacgagatttcttgggaatgaagaaaccgtcgatactagtgtcctccgcggtttcgtggaggaggagagggatcggtgggtgcatccttagggtttctttgagtgtgcatttgagataagtcaacttctcgatgtcggattcttcaactcgtctgtcaagtccaacgacttcggcgagttcttgttggacccgttttagatcctcggggctccgtaataactccgttaaggcccactctatcgccgacgctaccgtttccgttcctccaaacataacgtcctaataaaatcaaataaaaaaatcaaattagaattaaatataacgtcctaataaaatcaaattagaattaaatatatccacactagtccactctttcttttttctctctccattttttgtctcttcattggtttcataattattgtagatctgaatattcaatgcttctatatatattaaaaaaagatcatgctaaaatctgttgctttctctagtaaaatagaaaattaccttcctaattcaaacaaaaaaacttaggagaaaataactggtcaatggataagtattattacgtaacgcattaagaaacatgactatgactagtgctttttgaaatataattaccatgatgattgctttgatattgtcacgggtaagtttgatggaattttgaagatccgctgtctcactgactaatttggcctcttcactgtaaaaagcaagaagatcatcaaccatatcggtatcgacaacatccccatcatccacagcgttttgattctccttcttcttcatatgttcatcgataatatcgtcaataaatccgtctagatcattacgggccttcacgagccgcttgtttatcccttgcggatcgatccacccgaaatatggtatgaaatccgctacgttgaaggctccaaaaagcttagagaactcttgtaagattcttatgaactcgtcttgtcccttctcgcaggctgacccaaacgctgcccggtaagttatgttgcgggtcagtgcaaaaatttgctccccgacgtttataggcttacctacaattgttttggttaaatgttaaagtacatactaaagaaagaagaaatgagtactttcactttttacatatttgtttaattgcacatatatatagcaagagtggtgaatatgtgaagtagcttaccaacgttacaagagaccgaccggaccattttgtccacttcatcacgaactgaagcccatgactcagctcttttacggctaaacaccttcatgacacacacttttctcatctgtctccaaaacggtccgtagtgagcgaaagccatgtccgctcggtcgtaagtcagatagcttatagctatagttgcaggccggttcgagaagacgctgtcttggacttgaaggacttgtcgagccacctcgggtgatgagacagcgtacatatggaggaatcccatgcggagatggcacaatccgccatactttttagctaaattggctaaaccacggtgggtgagttggtccatcattaacatgttgcctatgatgggccaacctcgtggaccgggaggatatggaggccttcgccgccgtgtgatgaagctgatgaagatgaaaagagagacaacgatgacaagagacgtcgtgggatctgatagtttgcttagtgtttgtgatatagaagactccatattgagtgttttttttggattcgattattttctgaaatgttgtcaggaggcaaagttctccattttgggatgtgattagagaggtaggttttataatcaaattgtgtggtccctttttttgacatttttgtattatctacttaaatttcttcatccatatatgtacacaccatttcttatattttcttgaaaatatgaaaataattagtataccttttgaaaaaatctacatatatatatttttcaaccattttaacaaattaatcatgtacttgaacttatttacaatattatgccactagcattaattatttaggaatgaaaatatttaattaaagattcaaatcttctaaatccttgctcaaatcgtttcctaaaatcttgattatttcttcctaaaatttcgtttatttaataggattctaagtattactttgaaaatcttggtcataactattccgtgatttactgtgatcacaaatatattttggtatgattttcctaaaaacaggaaacaaacattaaaggttagataaaaaaaatctgtcataaactgaaatgtaatcaattataacaatcatttattttcttttaaaagtttgcaaacgacaaatgtgttgcaaaagaaataatttcctaaaaaaaaaaaaaaataaaagaaataatttcctataacttaataactgttgtagacttttaaagaaaacaattatgtaaatatataatttagtttaaggaaatctagtggaattacatacttatacgaaataaatagtataccaaacggattttactgaattcgagcatataaatatgacgaatcatgattgactttcagtgggttttaaattagtgaacatagctgttgaaaaatgactgtataggactagtttggcaaaaatattggtgatataaacgcattatctcgatatatcttaataacaaattaaaacaagaaattctaaagtggctaaacaaatatattttcaacaaactccagaaactcgccatttttgtatttaataaactaaataaatttagccaagatgaacgttgtgcatgacttttcaggtagttttttctcttttttttttctttttttcgtaatgactttttcagttaggtttagatttttgcttttggatttatgctcatttaggtttagacacaaggtttactaattagatattaattatacaagtaattatttattactattactgaatacctgtgcatcttagacagagatactaataatacttgaaggtccctttaattttaattattttgtcgttactcacaatttagatacagtgcgttacacaagactttgaccaacgcagttcaacttacattatcagattacactgcataatctgtaaactaacaaatgtattaaaattaaacctcaatctagttaaaaacaaagacacattgacaacaaaacataaaaaaataaagacaatttcgtttgccaaccagtgggctaagacaaaactctgtaggctgtatgtctgtatcgcaatatatatcacaaaattggaccgatttgggtgaaactcaaggacactgtattccacctgttctgcgatacatgaagtgaaaccgacataggagaaagttcaaatgacacaattagtagtactatttaagttctagatcatattaagtcacgctcgtttcacgagggtgtgtgcatgtatggtacctggcgaactctgtagtttcatggaataaaaaggtaataagataatcacatgtctccacccaaacaaagctaaggtcaataatatcaaatatcgataatagtattctaaaatatcatatttttactttttgtaataatatcacaaattaatattagaataattcaaaaaatgtggtaacaataaaaactctaaattaaaaatagaactccaaatataaattttaaattttatttaatttattttcgttaaagaaatatttcatacaaaaatttgtgatatttttgaagcaaaaaaactattgataatacttttgaaacaaaaatttaatactgtggtgttttattttatttttaacccctactagtattatatatccgctacctgcacaatttatttttttaatctaaccacgtttttaattagtttcattgctcagttgaatattgatcaaatgggagagtgggtcgtgggaccatctatgagctcatagtatcgtcgtttctaattagtcgaatcagattaacataagcattcctaattaaatcgaataatatatgcctgttcttaccaacttcgtgtcttttaaaactatttagtgactgcaatatatcaacctaaaatattagtttcttaagaatatatcaaaattttgctaaccaagaaataaaatggttaaacagtttttgtatatttaaaaaaataaaaccactatttgttacttattatgtttctgtccccctatatacagaataaaatggttataagaaaatacataagcttttaaagccttaattgccatcaaaattatcagtatgagacaagtacttcgcgtatagagtaactccgctatgaactgtctgaagccaacaactactcgcaaaaagacacacatttccttttcacctttgattagtataataaggaaaaatcaaactatcaaaagtctttaaacacacactgcgatatttatccttatttatcaagacccttatttagctatttattcaatatgattaacacttaaaagtggtttgaaaatatgtttgatttgtcacatttgcacaattgaatattataattattatatttggatatttttccgaaacaaatgaagatattggttttttatttaatatacaaatatatgcttagctgatatttgctcaatattaaaatagcatacacattaaaaaaaaatgtattcaggaaaaaaaacctttttttaaagtagcaattcataagattgattattcttcaggtattttgtaagataaagtaagaacacatttaaaataaatcgtaaaatacaacacagatctcaaccacttataagttataacgtaactataggtggctggcacaacccggcttattgacatggatgaatcgcaaattcgtaaccattatttttattattaaccgaatgtctaattgtcttatactcttatctgatctttcaaataataagtttcttttgagtggcgatccattgaaaatacctggagagtggagactactaaaatcctttttcagacccaaacacttaaatagaagcctagtagcctacacagtttattgtaatagttgaggtcgcttcaagaatgtgtacaccttcctccatgaaatttaagttaggatgtcgttatcttgtaaatataaaataacttatacacgtacgtgtataaataagattatagtcaagtgtagtatattatataactaaatagtaaataatactctcatatttgaaacataagtctcctcaaaaaagcatttgtgaaatggtttatacgaccttgcgtgatgatgtaaggtttgtctccatgatatgcccttgtatattaacccaagatatgagagacgtcgagaaacatacaaataatgcactataatttataacagtaaagttttaaaataatgtttcctaagataaaaaatttaaaataatgttataataggtatcattaattggaatttatattcaaaatgaaaatagacaagtcttaagaaaataaataataacaaaaactaagaaggagaaaaggtttcctctttgattagaatgcaatatatggggttattttccactgttctcaattaaaatattcttctgaaaatccacattattccctcattttcatgtatataattctcttacatggccagttgcaactacaatcctaagatatacccgacaattatgttatgtcatagtttttagatatctaatatagctaattgcagcttaagaaattataaactatgtcgttgtcaagcaaaaattaatgttagactatatcaaattgcaactagtaccaaaccattgtatattcacttatgacaacctaaagatatgactcacgatatttcacatgctttatgaagtttggaagaaaacttgtacattaccaatcgggctcattattagctactacgacataagtacataacgcacataagaggtctcacttagttattttcaccatctcgatcaatcttttaagcgttctttatctagctgtttagtttgctaatctaaaaaatttggtcactctcatatttgtacttagttagaatttattccaaagttgcaaattaacatgtttagcgatttaaatacaccaaaaaaacattatactttttaacaaaaatatatattatatacatctacaataatgtagttaaccattcaatatataaacctgataattagctatttgtaagaattacccttcaaataatatcacatcgaacctcattttatagttcgttctttacgtcgtcataccgtcatctttacataattgccattaaatataaataacgattataatctgattaattgaataataatgaaacgaccaaaaagagtaaataatggaaaaaaataatggaatatggatttgggcctatcagttacgtctcggtgcgtttgtggtttccgtcacttcactcgtctccatcgtttttttcttgtcaatttcaacagagttctcgtgtaaatgttttcacatttacagtctcctgtttttgctcttcgtacgaactttattagacatatattgatctttatttatttttcgattaactcttttatccaaaaaaaatcggataattgatgaactcggcatagataaatcataaaactacaccttgttttttttttttttttttttttggacaaaaaaaactacacctcgttaagtattacttttcatgactaaatatccagacactcccgaattccggatatctaataactttcaaggtaaagccatcaaataacgtttgacccaaattctataatttgtaaatgaattacccagtactgagaactattgggcctaacaatatcggcccaaaatagaaacgacttggactagattatacagtttttgaattatcttcagatctcaaataacgtttgacccaaattctacaatttgtcaatataatattctggtactcctaaaacaagtgtagggctatttagatatctaaataccacaagcgtcttcgtatgaaggcattatcaaaactagaaatagcgtaaaccaaaagagaaggcatccccacaaacaaacaaattatttcgtagggtacgttagacaaacacccttttggcgctcacattacctactattaaaaataaaaataaacagatatgctctttatttccaaattttgttttctctttatttccatttattagtgtgtcttcttatgttggcctacataatatattattcttatatgacattttttatgattcacatgcattatacgtccccaattagatatgactatattaatgcaaagaggacgtaaattaattcaaacacggttgctttaacagcgttttcgtatatagaagaatttttataagcaggaagaaaaaaagcaaaacaaaagaaagggagttttcttagccttatcgaacgtagatagtgtatcgtggagacgtggaccgtcttgcgcgtgaagcaaaattttatagtttggtcactctatgatagatagataaaatgcgaacaaagttttaataatgaaagaacatatacttattgaaaattaaagtgggataataagttggtaggttccgtatgggaaatgcatgcgcatgagattaattaaataaattggataggattaacagtcagttagagtggatagaaatagtataaaagggagaggaatgagagggtgtcgaagcatatagaagtggatatagttcgatgatctatttgataaattaaaatggagagtgtaagagagagttcattatcaagcttgatgcttttcttgttcggtcttgcttatgttgtgttcttgctaaactcaaactgtgttaatggattacgagacctaaaggagagagatgcaagcgagagtaattttgtgaatgctacttcttcaagcgttttggactctaaaagtactgccaacatttcgaccgttgagtttgaaaatgctttagatgatcagaatgtaaataagactgaaaaatgtgaatcacgagccggaggcggaggaggaggtggtggtggtggtggaggaggaggaggaggtcaaggcagtgggggcggaggtggagaaggaaatggtgggaatggaaaagacaattcccacaaaaggaacaaaagtagcggtggtggtggtggtggcggaggaggaggaggtgggggtagcggaaatggctcaggccgtggtcggggtggaggaggtggtggtggcggtggtggaggaggaggcggtggaggaggaggaggaggcggcggaggaggaggaggaggaggaggaagtgatgggaaaggcggaggatggggatttggatttggatggggaggtgatggacccggcggaaactttggtcgttgttggtatcccggttgtactaaaaagtcaacggaaagtcataattaaaacatagcaatgatatgtcttaaagccatgctttttcaccacaacataaacacacaataattcctttgtttttttcctttttcaatggccttaagacaacaacgatttctttctgttttgcaatgtcttgggggattgtgcttccaatgaaaaactaaatggtaatgtttccgaatttgtttgttcttttctcactgatctttccacattttgctacttagttataaatgattttcccaattctttcacagtttcacttccggaccaaaatttttgataaggatccaaaagttgtgttttaatcaaattttaaccaacctgatatcataattttaaccaaattgttactactaatctttatgtgagggtttgctttagtattttacatgtacaaaaaaaataaaaaaaatggagtcaccaatatttgtgtatgcaaacagaaagtataccagtttgtattcttaaatatataaacactgtgtcaactatcaatgatacaataacataatttagaaaataaccaatgcattggtatttgtagccgcacaagtattagatcgatatggattgattttcagtttttttaacataagagtgtgaatgaggggctcgtacgtcgtaaatttttagggttgtgtaattgaaaaattaaattgatttttggtcaaattttatcttttatcttgtctcaatgttaacaacttctatactggtttaataaaaatatacaaaattctactttaactttaaggggcaacgacgatattttgaaaaaacagttataaaggcaaaatttcaaaataacgttttaacaactttttttttttttgcattagcagttttttaaaaaaactctaaatgaaaagagtgtgagctaagaggaagtaacagtagttaattatggttgtggtcacaaaaatttgggtaacggttggactgtatttaacaaaacttttaatgatcatgatttctaatcatgcatactctatcaaataaaattgtctctaattatagcttaacttcatgaatgtgaaaacagtctacggatctctctctgattctctgtttacaagattacacaatgcacatggcattgataaaatttcaagatagaaaaaaatggcttaaacccgagccggatccgccactttcatgagccgtagctccaacactttccggtgagagttagagtgaatctcgttggtgaatgttgggctacaagcgggtctatattcgggtaaaagtcgacccgacttaaaccggaccccacaagcattacacagtgtcttcgcacctaatggacccattctccattgaggcgtcttctggactccacaatggctgcagcaccgcctcagctgctgctgctggactacgccaccgtacgatgcatccaccttctgtctccctctcttcttccttctggcaacagcggtggatagcagaggagatggagactccatagaccagatacggccgttggtgcggcggcgtttgcttctaggtttaacaggaacgcactgtctccgaacctccaccgacgcgactggattcaccgggaaatcactcgaaatatacgattctgagaaagaatcctccacgaagttggataaccactctaagtcctccaaatcaccaaccttcacaaacaaaacaaaaatgagattaaaaacagagcaaaacagagcaaaaacagggtagagagaaacagagtgtacaaaacaggggagatagaaacagagtgtgtaagtgggctcaccggagcgtcgccgggaaaagataagagatcctctggcggtgaaagacgggtactttggtcagaaaagctcttaaatttctcacgttcttgttcgtcttcttttctttgtgacgaagacgactctaaagaagtgtcggcgttagagaggtcgagaagatcgtcgacggaaaaatcaccgagaaatgcttctacacactccatttttgtctctagccgtatgaaagcactacaagtattttaaataaaggaggagcgaagcgaatccatatttgaaaaagtttgttcgtgttccaatatattttacacaaatttcattctttctttttcaaaattttaaattctttacgtgtctatcgagtgagagagacagtggagagtggacagcactgattggggtttgtaagcaagagtgggttttaggtttttgtgattttggaagacttgtttggtatttgtctcgttacaaatctcgtaacaaatcatgcattgccatgtcagcatttcacattgaaaaggaaaccaaaaatacgtttccttcgtaagtaaaatgttttttttttttttttttaaatgttatctgaacttatccgtagaattttatttaaagataaccgctctttgtagtcaattcaatttattagagttcttaatgccaaattttaagttcataatattaaaagacagcaaagatttcttcataatttagaactatcatttttgacttaaccatcggcgcagagtttgcaagtctttttaagttcttttactatcaaaataactgaataaagtcattcagaactagtggtattctaacgatctaatggctcaacctaattaatcatgaccgttgaaagtgttgttgggccaaaaatatcgtcggttaatacaactttccctctatataaagctagtttcttgcaaaatatggtttttttttgttaacataaaaaagaaactagtagcacatatatatatatatatatatatatatatttttttttttttttgttgtatcagtatttcgaaggttttacagaaaagaagaaaaaaattaacaataattcatacgtcgagagtaatgattggactatcaggcttctcgggcccactcgaccgtcggtggaaggcccaattttaccaaaacaaacaaaaacgttattagtaagggcctattatttatttcttctttaatttcaaggaaagagtgaccatcatatgttgagcgcgtgaaaatatcgctcatggttatatatttgttttttctttgagataataatttccattagaaaaagtcggtttcaaagttagaaaaaaaacatctaaacattcacgtaaagtttaccaggagcaatggagcataaacatattcaaattacacacatacctaaatagtaaataataataaaatacatagacttgtatttttattataaatataatgaactacattccaaacaattgggtgtttggtctagtggtatgattctcgcttcgggtgcgagaggtcccgagttcgattctcggaacacccctctttaaattctctactgctacatcaatttttttcccctcggattaaattaacgcaagaaagtcgtagactgatgacatacaatatggtggtggctcactaaactgactatatgcctaattagcccgatgggccacatgggctcaatgcaagtcggtaaaaggtggaatgttattgaatgcgatgtatgttggcagaggagtaaccgtacaaattagactattttatacccatgaaatcattatcgttcgataacataagatagtaaactttcatgatctcgttctctatgcatccatctctcatctgtgtagtgtagctttttttttcttttttccccacagtatttatctcgtaaactatactttcatatagtcatatatgtgatatgaacattgacactgtacgtaacttatatgatgattaagtttacatgaaaaccattcaagtttttttaaaagcgtaaatacaaaattacttcatgaaatttacgtttataatttaaaatgaacttcgatttaagttatttgcattcagagaaaatagaaattaattaaatgtagcaacgatgtaagtgatagccataaaaatatcacattctttgtatatcggaaatttggttgagcttttaagtcttgaaccctcggataaaaaaaaatgtacacttgaaaccaatatagcattgctccataaatatcaatatcttagacccaaaaaacgatattgttattccatatcggattttagtcatttcgactattttcccaactatttttcctactgaaagattaattacagatctactattggccccaacatttggttcactagacaacctgtaataatatagttcaagtagtactattcacgtttcaacacactaacttttattgagcttcccaactacatttacaatattaatcgtatcactccacataatatcatctatactctagtttattcgacataaaagcatatttaaaaattgtagatgtgaatttgatagttgacaaaccaaatattttactgtacatatgaatttgatattagttgcccggaagcatttaatgaccggtgccagtaaccagacgtttcggactatgttaggtgagacaatgaatagagacacatcaataaatgtcaccgatacatatacttcatataatctaaagtatttcttgaaaaaatctaacatgtgaactaatgaaaatctatcaattacaacattaaattcaacgatatggacttccatcttcttgataacgatcttcaaaagtaagtaagacagcaaacctatttaatatttttaccttattattccccaactagttccttttccacttttaaccatcaccctataagtggttataactagtaacttgaaatagaaacactctatctctaaaagaggcaaccaaacaaacaaggtctagctttttataaccaaactctgcttctgaacagagttagtcaaagagagagaagccatggaagctatgaaggagactgtggaggagagcttgagagagatgagagagacgtttgcgagtgggaggacgaggagtctgaagtggaggaaggcacagatcggagctatatacgagatggttaaagacaacgaagacaagatctgcaatgctctgtttcaagatttgggcaaacacagtactgaagcttttagagatgagcttggtgttgtcttgcgaacagctactgttgcaatcaactgtcttgataaatgggccgtccccaaacatgtaagaaccaacactgagcatatacagttattgaattagtccgaatttaggtttaggtttaggagattcgattatttagaaatatgcaagattaatcattttatttggttggataattgttttactggttctgaaaaaacagagcaaacttcctctgttgttctacccagcaaaagggaaagtcatatcggaaccctatgggacggttcttgttctgtctagctggaattttcctatatgtaagattcggatcttaaaatagttgactatttttattttctacaagaaaggattacaattttgagattttattttaatgtttgttgtcagctttgtctctggatccattgattggggcaatagcagcaggaaataccgtgcttctcaagtcatctgaactaagccctaacgcatctgccttccttgccaagacaattccagcttatctcgatactaaagccatcaaagttatcgaaggaggacctgatgtcgctactatcctcttgcagcatcaatgggacaagatcttcttcaccggtatcaatccattcactcgcgatgacttgcttgtagcggaatacgcgtgattgatgttgttgtttgcttgtagggagtcccaagattggaaggatcataatggctgcagcagcacagcatctgactcctgtgacattggagcttggtggaaaatgtcccaccattgttgatcatcacaccatttcaaagaacatcaaggtctgcgctttactctgtttttcttacctcttgatttgattgcaacagaaactcttgatcgtaaaagtcgctaaatttgaattcttggtgatgttatagtcggttgtcaagaggattgctggaggaaaatggggatcttgcaatggacaagcttgtatctctgtagattacgttcttatcgaaaagagtttcgcgcctactctggtaggtgaatgcacacaatgcaaacgcaatcgcaaactctgtttctgtaggatttctaaaagtgtggtggttttatgtagattgatatgttgaagcctacgataaagtctttctttggcgaaaatcctaaagaatctggatgtctctcaaggattgcaaacaagcaccacgttcagagactgtctcgtcttcttagcgatcctcgtgtccaagcttccatcgtctatggtggttctatagacgaagataagctgtacgctttattttattcatgtttcttggatcacacgaaatcagttctaccggtcattttaaccttaaatatttttaacaggtatgttgagccaacgatcttgttggaccctcctcttgattctgagatcatgaatgaagagatctttggtccaattctcccgattatcacggtaagcatatttaaagcatacagtatatacattagtaaacaatcaactaatcgttgttgattttgtctatttcctcctatgtgatgaaggtacgtgacatccaagaaagcatagggatcattaatacaaaaccgaagccacttgccatttatgcattcacaaatgacgagaaccttaaaactagaattttgtcagaaacatcctcaggaagtgttaccttcaatgacgtcatgatccaggtatatatattataggcaatattggtatattagctcaaagtccatagttagaaaccaaaattgactatgagttatttttttatcaaagcaataacagaacttcagatcttgataatgactcaatatgtggctgttgtgatcttatccatttcgaatttgtgtttaatctttggactatagcacacagtgaaaaacacgaaatataattgttctcatatggttaagttttgaatggaattgcagtatatgtgtgatgcgttaccttttggaggagtgggagaaagtggaatagggaggtatcacgggaaatactcatttgattgtttcagtcacgagaaagcaataatggaaggaagcttaggtatggatcttgaagctcgataccctccatggaacaacttcaagctcaccttcatcagactcgcatttcgtgaagcttacttcaagcttatcctccttatgcttggtcttaaaagataaaagggggaaagtgagagacagagacacatacacacaaacagagacaatataagtgattgaattacatcacacttatgtttgcttatcatatcttcacctaataagtctcattccgaatgttttacatttctttcaagcttgagagattctatataaagtgatttgatatctatttctacgggatacgttcttagtaatcgcggtatattttagtgaaaaactttaagattgcgaaacacacagatgattatcacaaaattcccaaaatatagtctttgatgaattagagatcacgtgaaatgatacttagatgaaccattggactatacaatggatgaatgagatacctcaaattaaattcatattcatctagcaatattgttcttataaaaggaccaccgtatacttatatacacacacatacagtaatatacatatattggattataaaaggtgtacgtatgcgtgtcttgtcgtccaaagaaaaaaagaaaagaaaagctgattgaaagtatgggtacacaccacaataataggttactgcatcactgagccagtttctttcatccccaccctaactaaagctctatcaaaaaccctagctagcttctctttttttttcttcctatatctatttatttagttgttttttgggtacgtcgtccttactttgcccctctttatctccaatctctgcaacattcctcattattaatttcatctttacatctctccccctctctctctttctctttgtttatgtatcctgcttgaactcaattccaaccagaaaccatatttcttttagttgtgtccttcacccttggagagttgaaaaaaaggaggatgtttgacttgcaattcaaggcacgttccagaggctaaactacgtgaacttcaggtgatctaatcgtttctttgtttccccttcttgaatattttttggtttaccaaagtgaacgagtcatatatggataatattacatagtagtgtataattgcccggaaattaggattaagtaagctaattacacattgttatggttgccaaattccgggtggagaacatgtgcgcaagcagattagcgagaaaagcttacatattttatgagtgagtcatttataatcaattgatattaatgcgcatactgcgaccgatttaggctctaggaaatatgattactatctgataaatttatcaaaatgctaatctttggtattaattgcacacatagattaatggcgttaaactggtgtgacaaagaagattagtgtttaatgttttcctacatatatatgcgattcaccataatatttataaggtaagtaaaagtactatcaatctgataaactttttccaagcctttgagtgagcacctttttagtttacacttgataagtcttcttggattactcataacaaaaacaaacaaaaatattggattagaaaaccatgatgatctagatggtcttgcgtgagaaaacatactaattaattaggttctacgatcatatctatctagatgatcaacatttattaactctaggaaaggttttattgggagattttttgagtaaatcttacgaataattaattttacataacagtaagctctaaaactaattgtttttttcttccataggcacgtgatgcagtaacgtacgaattctattattaatccacgagttgcttcatatatttattcgtcatttattcttcagacaccaattcattgtgaagtagaacactacgagtgtaacaataggaccaatactataatcgtaagttcgtaacttatatttttaacaactttgccctcatttgctttcctgtcgttgtcactatttaattcacgctaatcaatttaccttcaaatctatatagattaactttacagtaacaatataaaatgttgatgctatatgaagatattgttctgagtatcaaatcatgtaggcttcactagaccttatgataatattatagtttacctattattataacgtagaatttcttgagtttatccaatgggagaagcaaccggcaacatcggcataaacatggaaaaaaaacgtatcgagaaccaaaaacacttacttgtttatataaaacccacaaatactaaaatttataataaagattcattaccgtacaatttaaatattaaattaacacatacattatacatgacaacaaacagacatacaaatgtttaaatcgtctaagtattacatatgattgaccagagcaacaaaacaaaagacacattacatatatagaatcactatataacaaaaataaaaagtcaagttcttgatttaatcaagatcttggtggattttgatagaattgcgtacctggtggcatgaacacactagtcgtcatgttacttgaatagtaaccaccagaatttggatctacaaacatggccgatgatactcctccgccaccgtcggtcacaactggaggattaaacggatgtcctcctcctccgcctcctgcggatgagctctgatgatcgcttccgccactaccgccactcatgtagctgctttcagggccttggtcatacagaattcctttgaagagatgacctccaatattgaccgtcgtttgataagcgtactgaccatctcctccatcatctacgccactcattttaacacaccgaaaaagcgcatctgagctcacttcccccggaaaacttgcctcccccatttctaaccctaaaaacatatatacacaattatacacattaatcaacgtccataaacacaagattacgtttatgttttaatgttatgtttcacttcaaaacagaacacaacatttaaatgttttttatcaaacattttttcacactgaaatttgattaaaaataaatatagaatgttgtatttttaaagtaaacaaaatttgtgcaagtagtgaaaggaaaattaaactcacatatatttttgtgttgaaaaattcgtgtttcttctaacaaaaacatatggttcgaatatatgaagttgtctggatatcaaattgtttataaagacataaaaaaaaaaaacctgctgagtgggatggcaagcgagaagaggaggatgttcctggaagagtagggtccctatggcgttttgggatactcgaaccgcctcctccagcaccgccactaccgcttccgccgccacctccagatgtggacatatgaagctgctgttgtctctcgcggcgcctcgcaacggggatccacgtgctcctgacgtgagtggaacaatcgaatccacggcttttacagcaagtcctgcaacgcatatgagtgcagtctttcttggcttggttcccacagtcccgacagctaatggtgatggatcttgatgaagtggctaaatcagagacgtcgatctgatgacctggataaagatctaagctttgttgttgtggatgtgaatgatgatgcatgagcatctgctctggtggaatctgccatacttgttggctcgagcttgggttgatattattggtgtttgcgtttgatctataccaaacccaatttgtcttttgttgttgttgattttcttcttcttcgtctccgttgttgttgttgttacctcctaatgagaatatcccagccattttttaagacctaaaacttcaaaccctaatcttgacccaactatatccataattcagaaaccctaattaccatgaaatccttatccttttttctccttcttcttctcactcaaattcagccttatactcccttagcttgtgggtgttgttgctgctctccgaatctaaattcgaatgttctacaagatctctctttctctctctctcttggaacaaagtgtgtttcttggtagtgagtagttgaagtgagagaaagtaagaagaagaaaaagaaacagaagagaagaaagaaagaagaatttaagctgtctacttatttatgaatctttatttttctctataaatttctgcaacgccgccatgggcgtttttagatttctctctcctctgctctgctcatccctagaatttaagtctctctctctctccactactctgatttggtttttgcagattctatgaaacccaaagtgaaaagcttttctttcctcttctcacttcggctttgtctgaacaaaacgcttctagttctgtccgtatgaaagtaaaaaaaggattaaacaaagactttctctctctgctatctcttctttctctctctaccgactcagagtttcacacccacggggaatgatccaccggtcctagctttcttgttctcatcccatggaccagagtttgccaagtggcgaatgtgcttaagcttgttttatcttaaaacggatgaattcaattcttttctttgaaagttagcatacatatttttttcgtggttatcaaaaaaaaaaagctagctcatgtgtccgtacgtattaatgaaccgtatttaatttaggttaatttgaaatcctacgcgattagaaaattaaattcttctttttttctttttctttgtccttaagcttttttttgtttaatctcaaacaatagtaattgctcatctagctgcctcagggttatatcttgatcaaatttattagagcgttcttaacgatttgtttggttaatatgtttcgaaagtctaatgttacgtattcaaacatttaccctaattaagtaaagccatatttagattttttctgaggtaagtaatcttgtgatcaatcagaacaactctttttttccttcataaaatattccatatatcattatcatacatgtaaatatatatatatttatcgatgcttatgctatttgagtagacaatagattgttttaaaaatagttaaaaaaaacaagccattcttaaaataaaaaaacttacaagtgaaaagaaaatttttggaaaaacgtcaatagtgtccacaaagggatgactaaaccatatttaaatttaattttacatgcataattaacaagctcttctaatttagactgccactttttccggtaagttatatatttaaatatccgcaataaaaacattcaaatattctgcttgttaccctctataaatcataacttaaatccatgtgtataaaatcattaagaattagagttatagtcaatagtgtatcaaatcattcaccatggagtagttatgaaaacagagagattcggggcagtgaaaaagaggctctctttttattgattgtagcaaatgatcatatttatatcgttatcgagtgatttgaataattaaagaaatatttacaaaaaaaaaactaaggaaagatgaaaaaaaaaagcatgttactctttggactctatgtggctatacaagggaacactgcgccacctacgtgtacttttttgtattcctttctttttactgtgaattatataaatttccacgtaaacgacgaagcaaactattgtaataatatttggtattcgtagtttttccgggtttatggtttctaataaatagtctttgtttgaaatgttgtggtagaccaaaaacctgttggattagtctggattttcaagatccagaaaaaaaaaatctagtcatttttaaatcggcccatattgatgaacgagtgtagtcacaatgccacctacgaatccaaccagaaacaatcatgtaagtatatcgtttttgtttaggtgtttagaagaattaatagtggactcgtaccacatgatgatccatccatgatcgtacaaattaagtttaaaccctaaaaaatattaagatttttataaaaccggcgttatcaagatcggaccgatccaggttagtccagtccaaaggttttggaaagaaaaagctatttaaaattgtaaaatctaatgattattatacaaataagaaaaacaaaaaaaaaagagacagggaagggaatgataagtgggagaggcccgagaaaaagacgttcagtgtcgctcgctgtctgtcccttaaacatgtcgagaggtctctcgagccctgtgtgtgttcgtgtttgcctctcctttgcgttgactctctctttcttcttctttttttttttttttttttttctgtgtgtgcaaccaaactctctccttctcttcatatagtttgattaaatatcttattttgttttttagtttcatgaataaataacaaatagtgtcccttggggttagggttggggttgaatggacgtaagccatataaaagctgagattgtcgttgcagatgagataatgaaatatatattgattgtaattgatcaaactacgaaactagaaaacaaacaaaggaaaaccacgaaactctaactatatagtcaactttaatacattaaatgaatttacaatttatgtgaataagggaaattgaaaggtgtttgcttcatgaaaggagtacatcgtttgtaagtctattctctagaaggtcttaattatcggatggttgcttcatgacaggagtacatcggagcaaatgggaacaacaagaacgagacaataatggagaaaaaaacgaaattatattatactgtaatggctgtcattttctcagcctttaaatgtggctttttgttgataataacatggcatatttgagtcttttagagaaagagtctaatctattattggatatctacatcaaccatatagttaaaaaaagattaacagttatgcaccaaacttaaaagtatatatccccttccctttctgattaaaaaacataagatactgctaactatatcttttgatatcttttttgcgtttgcatattggatatagagatatgattgcatataattgggtatctttggtgtgttttctatttatttcttgtcatttgattttagctggatacataaaatgttcatctatacattcgtctttatatactaaaatattacatttataatttttaaatgcattatacttatctaattagctctcttaaacaaaaaaaataaaaaaaaaaattcgtaaatatatatatatatatatatatatatatatatatatatatatattgctgcatttgcgtttcacgtacgtttacgtcaaatttgtttgttaaagtgcttaacattttctattaaactagctctattattttaacatataaacgtaacacgaaccgaaagtttgatgaaatcctctaatgatacttaagtttaatcaaaccctctatgggcatggatataaagttataattaaagagctatggatcttactcgatgatgtaatagggcaatggttgttgaatttcgactatagtccatgcgttgttagtgattggtcggtcggtccatatctttttgtaatgatgtgaatcgtgttttttcacttcacacactcattatccattttatccaattggcatgcaaattattttccctaagtcacaacaaataattgactacagaagaagattccactgcacatttacctccattgcccatttaatgatttttctcgtctaatgaattttaatgagattaaattaggcttctgtgagtgtccccactctatgaaaattaaattaaattcatacttttttgtgacaaagcaggaccacttcttagtcgatatcgagcctagttaactttgaaagagaatttggttcatacaatctcaacttatgattctttaaatagaactatttccagagacttgcgttagatcataactgtcttcctgacagatacatacgctgcatatatatgtattagcaaaattaaactagtgtttttcagattccagagagccatattaacatttttactaaacttgttgcatctccctcctcttagcatccacgagtaatgcaagtcgtgcacatttacttttagtttcttccagttcctttgctaagttacttacctgtctcattatccatttatgtctatgttagaaccgctgtaacaaacaaaggttttgtctggtattgtgtcgcggaatcaaacttaccgtctgttccagttcagtctctttctttacatattcctcgcacctgttaaagaaagaacacatcaaactgattgggattccaaatgtgatagctgaaatgagtttgttcatgttgtgtgtatatatacctcatgaagagttgtatgttctcttcgcttatctcatgcgctgacttgccaacgaggttgttttcagtatcctgggagatattttcatttttttttataaatcaaacttgtgactaaaagtgaaacatcatcaaatgaattcacttacggtagccgcaggttgagggttgagctgcactggttggaagttacctcttaaacctgtttaatttctcaaatgcggtgctgcaacagcagctatacggcttgaagtggcgttactaagactgatttcacgtattatcggaccaccttgactgactctatcagaaggcaaaggtaaaggattgaatgtattaacagtaggcggttgatcacgtattatctgaccaccttgactaatttcatcagaaggcaaaggcaagggattgaatgtattgacagtaggcggttgatcaggtattgctatccttttcgacttatctgcaggcattccataagtacagtatccgaatacgtggcagtgtgtattcctgtttttctccataacaagcagtggaatagtcaaccaaagacattgcggtttggaaccaaaatgatattgacataaatatattttaaaggttttggagaggaagaggagaccagtaattagagacaatctttttcagccttgcctccaaccgctgaaatagagaagacctctcaaaatcttgcttatcgtgggccggttctataaagtttgcttcaagaactcctggggaacagattttggttaatgagtcgctcctccagggttttatcccaagcaaaacatattcagtagaatatataaggagaatgaatcactatacccacaacaccactgcctctcctttcccctcccatagtgaccttccagaaaggctgtaatggtgcaagagagatctcaacttaatcaagccatatgcaaatccggacgcttatgtaacaaatatactagcaaaccaatccttgaatgttctattaagcatttgcattctcgtactataagtttgatttctctgaattgtcaagtaacttttttactacagttgtttctttagattatctagaattctagatcatataaatgtctgctatatgaaagtgtacccggatgagacggtttttgtgatagacattgaaaccacaaactgcaagcttaggcgcctcctttataaatccaactttgatttcagtgggagcctgtaacaagaaaatttagtggtttttttttctcacaacctaaacctagaaaacaatattaatgtttgcaaataaaaacgtaaacattatatgcaatggcaaaatagcaaaacaattagccgaaactcaacaacaaaactagaaagaaagaggaggtattactttttcctttgttgtatggggattgtacttaatagtctcaggtaatcttaattcatcagcaatgttgaactgctccacagggattccacgaagtataattttgaaattattgaaccttttgagatataacattgaagcataagcctaaggaagaacaaataacaaagtcaatcttcaaacatccttgaaacaaagaactattaaaaaaaaacatattaaggatattaccctcagagagtaacgtaagtggtatgaaatatgagatctcagttccaataaattatgatgcacccgtttactgtcatggacactttcatctcggagtcggatgtcctataccgatatcaaagtaaataatttaaaaggtttgtaagaatttcgtcagcaaagacctgacctaagacacctctggcaggatatctcagcgagtatatataaggacaagtgtgtgttacctcattgtcgtcgtgaaaactcagctcgtagattccttcatcattaagccacaagttgtatataattacttttgttccatgagttccaatatcctcgagctggtgggtggaagatggaaataaaaaagttaacaaaacagaccgctatcacacggactcaaaatcttcagaatgaatttaagggagccacagcacattaggacacaagtcaaggaagaacaatgatgcaataaaatgttcatgagctgactttcgaaagaaacaacctgctgccaaagttcgccctctgtagaaaacggagaccacttgagtataatttcaaggctggcagcccaatcttctgcagatccatagataattggttgtggtcgctccttggatgtatcaatatcaatctgcattgcatatcggatctatcacttaagaacaaagaagagttgcacattctagagtttacaataattctttatttcaggcatgaaacaaaaaatgctgaagattttaccataggaacaacgacatcatcctgaccagtttttctgaggaatgtgtatgacagaaggccaacgctctgagtagatttgctaaaacagaaaagataaaaaaaaaaggttgaaacaagagtatataccaaattcagagtgtacatgatcagatatatcaataccctccacgagttgagcgagtaaaaacaatatcatcagctccaagtctcatggtacttgtcttgaaaccatttccatctgaacacaaaaggtgaaactctggttagagaccgcctgttggagaccaagacagcaagaccaactcaactagaaatgagctcaatatcataataactaagtaaaacaattacactgtccaatcgtcgtattagacttctttgatgagtagcctaagctcatgcattttctgagcccatcgggatccattccaccgccatcatcttcaagttggaaaaaaagaagacaccatgtcattaacaacatacaaagcctcggtaagggaaaagcactacacactctataataggaaatataccttggaaaactaaagctggggaattatctttgacaatattgatcttatcaatcttaacaaacgtagcaccattttgtatctgagatataagcaattcaacataacaacatacagtaccaatgctttaataaaaaaattcactcgcaatgagcatgaaacgaaaaagatcatcaaaaatgaacttaagaaatcatttcacccctcaggcatacctcgtcaacagcattgtcaattagctcggctattgctgcaatacattacaaggaaaacaatcatcaccgcatttttcttcattctacacctccgaggaaaagaaaaaaatcacaaatttatctaattgatggcaccagtagagccaattcatagcttacctccaaaagcctatttgtgtgaagtagcattcgagtgaagaaactttggatgaacacgagcatgctcaaccatacctgtcaaatttcatctcatcaaaataccacaaaatcataatcgttacgcttgtgtgtgtgtgtgtgtgtgtgtaagagaaggagaaggaaatgacctggagcagctggattagtaacaccggtagggatcacgaagttttctccggccttccaaaagctccggcactctaggttttctcgaggagcaaccgtcgcgtcagcagtcgtacttggaacttgatgtttgtccattagggacgccatgcttcgaaaagctcctcttcctcctactccgtcgtcattgtcactgtcactgtcactgtcgagattaacgacaacagagactcccgcatttttcgactccggagccattaccggcgacggtaaaatcgaatcgacaaacaaattcgaattcaatgaaacaccgtcttctccgatttgactagatagcgactttttaagtaagaaagaagaaaagcaaacgtctttttcgtcatcattgcttttccatttttttatttggttatcagtctaattgggccacaatgcccaaatactttacaagcccatttaccagaagtgttaagttactacttactactgtacatacgctacaaatatgcacatgctattaaacaaatacaagaacaccatgaaagttacaaaacaaaaaaaatcaagaccacaaaaaaaacctgaatcaaactagggttctttagattcaagatagaattaactcttaacgttttaactaagcttgttgcatctccttcttcttagcatccacgagcagagcaaggtgtgcacatttacttttaaattcttccagttctttttctaagctcttcacctgttttatcatccaatgtataccggtgttagagtccatgtaatacatagatgttttgtactgcggaatcaaacttaccgtctgttctgtttcattctctttctttatatattcctcgcacctgttgaagaataatatttgattcagatccccacagagatatgatatactgatacgtatttttctcttcttataaatatacctcatgaagagttgtaagttctcttggcgtatctcacccgctgacttgccatcgaggttgtttccagtatcctgccaagattttttcactttagatcgacttgtgaataaaactattatcatccactgaattcacttacggcagctgtaggttgtgggttgagctgcacgggttgaaagttacttcttaaaccagtggaatttctcaaatgtggcgaagcaaaagcaactgtacggcttgaggtggcgttactaagattgatttcacgtattatagggccaccttgactaattttatcagaaggcaaaggcgaaggattgactgtactgatagtaggaggttgatcaggtattgctatctttttcgacttatctgcaggcatttgatatttatggtatcctaaaaggtggcagtggctatacctgtttttctccataacaagcagtggaagagtcaaccaaagatattacgatttggaacaaagattatattgacaaaattatttgaaaaggttttggagagaacgaagagaccagtaactatagacaatctttttcaacctcgcctccagccgctgaaatagagaagacctttcaaaatcttgcttatcgtgggctggttctatgaagtttgcttcaagaactcctggggaacagattttggttaatgagtcttcagccaggtctttacgtcaaacaaaatatagtccatgaaatcacaaaggaaatcaatcaatatacccacaacaccgtggcctgtcgagtcccctcccatagtgaccttccagaaaggctgtaatggtgcaagaaagagagatctaaacttaatcaaggcatattcaaagcctttctttaatgtttaagtaacaagtatgctagcaaaccaatttttttaatgttctattgagcatgtctttcttgtaaataagctgatttctctgaattgtcaaataacaatcttactacagatgcttctttagattatctagatcatgcaaatgtctgctatatgaaagcgtacccggatgagacggtttttgtgatacacattgaaaccgcagattgcaagcttaggtgcctcctttacaaatccaattttgatttcagtggaagcctgtaacaagaaagcctagtgttttttttttctcattccctagattaatgtttgcatatgaaaacacaaacagttatgcaacggcaaatagcaaaacaattagccaaagctccacataacaaaactagagagtagaaaagaaaaaaaggaatcacttgttccgttgtagctgtatggggcttgtacttaataatctcgggaaatctgaatccatcagcaatgttgaactgctccacagggattccccgaattataattttgaagtttttgaactttttgagatataacattgaagcataagcctagggatgaagaaataacaaaatgaatcttcagacatccttggaacaaaacataattagaaaaaggaagaaaatattaaggagattaccctcagagaataacgtaagtggtatgaaatatgagatctcagttccaatattttatggtgcaaccgttttccgtcattcacactctcatctcggagccggatatcctataccaatatcaaaacatatgaccagacctaaaacaaaaacacctctggcaagatatcgcgtcgagtatatatcaattgaggaaaagtgtgtgttacctcctcgtcgtcgtcaaaactcagctcatagattccttcatcattaagccacaagttgtatataattacttttgttccatgagttccaacgtcctcgaactggtgggtggaagatggaaataaaaaaattaacaaaacagactgcaatcacatggaataaaaatcttcagactgctttaggggaactgaagcaaattgggacacaagtcaaggcagaacagtaatgcaataaaatattcataagctgactttcaaaagaaacaacctgctgcaaaagttcgtcctctgtagaaaacggagaccatttgagtagaatttcaaggttggcagcccaatcttctggagatccatagataattggttgtggtcgctccttggatatatcaatatcaatctgcattacatatcggatctatcacttgagaacaaagaagagttgcacattttcgagtttccaagaattattcatttcaggagtgaaacaaaatctacaaatgctgaagattttaccataggaacagtgacatcatcctgaccagtttttctaaggaatgtgtatgacagaatgccaacgctctgagtagatgtgctaaaagagagaagaataaaaaggttaaaacaagagcaaacgacatattcagagtgaatatgaccagatatatcaataccctccacgagtggagcgactaaaaacgatagcatcagctccaagtctcatggtacttgtcttgaaaccatttccatctaaacacaaaagggaagctctggttagagaccacctgtcggaaaccaagacagcaagaccacccgactagaaacgagctcaagatcatattaactaagtaaaacaattacactgtccaatcgttgtattagacttctttgatgagtagcctaagctcatgcattttctgagcccagcgggatccatcccaccaccatcatcttcaagttcaaaaagaaaggagagaaaccatatcaataacaacatcccaagccttggttaggcaaaagcaccacagtcattcaaaggaaatgtaccttggaaaactaaagctggggaattatctttgacaatattgatcttatcaatcttaacaaacgtagcaccattttgtatctgagatataagtaattcaaattaaccaaacacggtaccgatgctttaaaaaaccagatcactcgcaacaatcaaaaacgaaaaagataataaaaaatgaacttaagaaagcatttcaatcctcacacatacctcgtcaacagcattgtcaagtagctcagcgattgctgcaatacaatacaaagaagaagaaattgacaaagatgatcatcacaaaatcacaaattaatcaaattgatcgcaccagtagagacaattcataggctcatagctttacctccaaaagcccatttgtgtgaggtagcattcgagtgaagaaacctgggatgaactcgagcatgctcaagcatacctatcaaattccatctcattagataccataatcgtgatgcatgcgtgtgtatgaggaagagagagatgacctggagcagtaggagtcacaacgttcggtatcacaaagtaatctcccgccttccaaaagctccggcattctaaggtctctcgaggagccattgtcgcagcaccagcgattgtacttgctgattctcttcctcctactactccgttgtcactgtcactatcactgtcgagatgaacaacatcagtgactgctgcatttttcgccataggaggcattaccgtcgacggtgaaagtgaatcgagaaaacgaattcgaattttgtgaaacaaacgtcttctccgattagtctagacagacttttcaactacagcgtgaagaaacgcaaacgtcttcttcgtcatcattattcattgccttgcgtttctttttttgggtcaacagtctaattgggctccatatctcaaatacttataggcccatttctcaaaaatgtttatatgagtaatacgcttatgtacataccgttacatatatgcacatgacaggctattaagcaaatacaagaacaccatgaaagttgaaaaacaaaaatcaagaacaccaaaaaaatctgaatcaaactagggttttttaggttccagagagttttaactcgtaacgcttttactaaacttgttgcatctccttcttcttagcatccacaagcagagcaagttgtgcacatttacttttaatttcttccagttctttttctaagctctttacctgttttatcatccaatgtataccggtgttagagtccatgtaataaacggatgttttgtactgcggaatcaaacttaccgtctgttctacttcattctctttctttacatattcctcgcacctgttgaagaataatatttaattcagatccccaagagagatatgatactgaaatgtgtttttctcttgttgtaaatatacctcatgaagagttgtaagttctcttcgcgtatctcagccgctaacttgccaacgaggttgtttccagtatcctgcggaaaaaaaaaatcatcgactttagatcaaacttgtgaataaaactatatcattgactgaattcacttacgccagctgcaggtggttgtgggttgagctgcacgggttggaagttatttcttaaacctgtgtaatttctcaaatgtggcgcggcaacagcagctgttcggcttgaagtggcgttactaagattgatttcacgtattataggaccaccatgactgattctatcagaaggcaaaggcgaaggattgtatgtattgacagtaggcggttgatcaggtattactgtccttttcgacttatctgcagggatttgagcagtttggtatccgaaaatgtgacagtgattttgcctgttcttccccatagcaagcagtggaatagtcaaacaaaggtattgcagtttggaaccaaaatcatattgacaaaatattgagagatgactgaaaaaggttttggagaggaagaagagaccagtaatcagaggttatccttttcagcctcgcctccagccgcagaaatagagaagacctctcaaaatcttgcttgtcgtgggctggttctatgaagtttgcctcaagaactcctggggaacagattttggtaatgagtctcccctccagggttttagcccaaacaaaacatattcaattgacatatagaaattataaggagaatgaatcactatacccataacaccattgcctctcgttgacccttccagaacgaccttccagaatggctgtaatggtgcaagagagatctcaacttaatcaagccatatacaaatggaagcttaagtgaaaatatactaacaaacttacgaaagttgcttcttgagattaagagcatataaatataactgcaacatcaaaacgtacccggatgagacggtttttgtgatagacattgaaaccacaaattggaagtttaggggcctccttgatgaatccaactttaattccagtggcagcctgtaataaataagaaagcttagtggttttgcactcgcagtctaaaacattaaaataaaaccagcgagtaaaacgaaagaaaaagaggaagtcttagtttgtattacataatccactgcagctgcttggggtttgtacattattgtctcaggatgtctgaattcatcagcaatgttgaattgcgccacagagactccccgaagaataattttgaagtttttgaactttttgagatataacatggaaatgtaagcctaaggataaagaaactatgtcagcctttgcacatccttgcaacagtaaaaaaaactaattagaaagaagatattcagaaggattacccttagagaatgtcgatagcggtacgaaatatgagatcttacttccaatgttttagcgtgcaaccgtttcccgtcctgggcattttcatctcggagccgtatatcctataccaatattaaggaaaataattgaaatactttaaaacccaacttttgcaaaaaacttcatcataaaccctttaaggaagtgtaagtaccacatcatcgtcgtcaaaactcagctcatagattccttcatcattaagccacaagttgtatataattacttttgttccatgtgttccaatatcctcgaactggtagatgaagaatggaaataaatgaatgaataaacaagccacgttaatataacactcggaaccagagttttttaaaggaaacaacctgctgcaaaagttcgaccattgttgaaaacggggaccatttgagaagaatgttaaggttggtagaccaatctccgggagacccataaataattggttgggggctatcactggatatatcgaaatcaatctgcattgcagatatgataacatcaagacaaaataatcgttgcagattcatgagtttccaaacaaaaagctacataagctgaggattttaccataggaacgatcacatcatcctgaccagttttcctaaggaatgtataggacagaagaccaatgctctgtgtagatttgctaaaacagagaagataaaagtatgtttaagttaaaaacaagagcatccgccaaatccagacagtaaatgttccagatatatcaataccctccacgagttgagcgactaaaaaccatggcatcagctccaagtctcattgtacttgtcttgaaaccatttccatctacacacaaaggtggaactatagttacagacctgccttttgtagcaaactagaaagaagattgatgtccgatcaacaaaatataacaattacattgtccaattgtcgtattagacttctttgacgagtagcctaagctcatgcattttctgatcccattaggatccatcccaccaccattatcttcaagtgaaaaaaacaaaagaaggataatgtcatgcacaagattcaaaaactcctttacgcaaaagcaccaccaatacattcaaaggcagtgtaccttggaaaactaaggcaggtgtattatctttaacaatattgatcttatcaatcttgacaacggtagcaccgttttgtatctgaggaagaattaaacaaacataaccaaacactacacaattccattggcaatgagcaaaaacaaaaacagaacctaagataagcatttcactccttacacatacctcatcaaccgcattgtcaagtagctcggcgattgctgcgattcaatacaaacatgatcatcacaaaactgattcgttctaccaactgatagctaaaacagagtatattcatagctttacctccaaaagcccatttatgtgaagtagcattcgagtgaagaaactttggatgaacacgagcatgctcaaccatacctgtcaaatttcatctcattaataagtactccaaaacccataattgtggagcgtgagtgagagagagattcgaagaaagaacctatggcagttagagtaacacttgaagggatcacaaagttttcgccggctttccagaaacttcggcactctagggtttctcgaggagccaccgtcgcagcatcagcgatcgaaactttctgattctctattagagatgccaagctcggaaccattcctattactcctccgttgtcgtcgtcactgtcactgtcactgtcgatatttacgacatcggcgactgtgtaatttttcgccattaccgacggcgacaaaacgaattcgaacaaaacagcgtgatgtttccctatttgaaactaaaacaacgcgttgtgtgcagatcactagagcttttgctttaagagtcagtttaactaatagtaagaaaattttaatctccgatactgtatatagctttgctcttatggcgaaaaaaaaaaaaaaaaaaaggctttgctcttacggtgcagatcactaaatcctagttgggtcaaaagcccaagcccaactatgctaaaagcctataaggctataacccattagatatataatgtctggagattatgtatcgaacataaattaattactgaatccaaaagtgttaatgatagtatgatagtacttcacaaaaattgtttaagctgatccgagatattttgagagttggaaaaatcaaacacaaactttattaaagtctaaaagtaaataaataaaagaacagcaaaaatccaagcagaaaacaaaatacgtaatctaaaaagaaaacaaaaaaaaataaagttctaaatgaaaccaacgactaaagaagtttaggccctagtgttgccagattctaattcctctactggaaagaaatatctgttatgcaacataattgaatcagcggcaacaggttcattgtcttggttcctatgccatgtgtagtatgcgtgagttctattgtaaatctccaaaactgcatgaccaaaactagcttctctatacgccgaatagctcggttgcggatcagtaaaactgcaaaattagatcaaagccacaacaagatcttagtatcatatcaacaatatgacaacaaagcaatcaaataaaatgtttttcttttttacctatttgcgattccttcaatgtttcctccatctccgatagtgatgtagattggagcagaagggtctttcacaggatagctcaagccattggtgatgttgtatttaatattggagacacgttcggatctctcataggaatggacgtgaccagacaaaaccaaatcaaccttgctgttaacgaaccacgactcaaacattgctctcatgctctcaccttccatgtaatggtagttattactgttgtaccacggcgagtgaaccatgacaataagccatggagtctcttctctgttcaccttcttcaactcttgctcgagccacacgtattgaggtgtgtattttcctgaaatatgaataacacgttattcaaaaaaaaaacaagaaacaataatcttaaagatgttacgtgtttactaattaccgtaggcagaataagaggagaggacgatgatgtgagcagatgcacgtctaatagagtaccaaagaggagatatgctcttcgaggccttgtaggcgttatgataacggtgaatgtagggcttgaaggcatgaggctccccctaattaagattcatatggttattaaagttgaaactactgatcagaaaaaaagcaataaattgagagaattataatgtgaacttacaatgtttgggacaaaatcaatttcgtgattcccggcagcatagatgaaggtttggtaagcagcacaaggctccacgaatcttccccacgaatcccactttctctgatcatggtttggatggtcatctgcgtaagataagtctccagggaagagaacagcttggcctttagggtttgacatgtaatgatataatgtctcgttagaagctaaagtttgtccaagatcacctacaaaacacaatgtaattattagatcgagttggaagtattagttatatctagtttcaaaagataggtaaaagaaaatttaattaccaataatgccgaaagtgtatggaacgtcaggtccaacctttggaggactagtgaaggaaaattgtctaacggatccatcagttccaacctcatagatgtatttggtatcatactgccgaaaagatataagaaagaaacttttataaaaacttttgaaacaagaaagtgatgttgttacttatataacaagttaaattatacaaattacaaacctcgagtcctttaattgtggcgtgatgaagaaaaccagaagtatagtcataaaatcggtaagacgaggtagaggcatgacctctcttctttttcggtttcacatcaccatcaactgccttccaataagtaaccacgtttgaaccagctaggtttaagggggtcacccacgatatgattataccacgtccattgtaatctccttggacgatatgaacctagccaaagatacaagaaatcaagatggattaattgttttgttaagatacaaaatatacaatcagggacttcaacaaaaaagacaaaaataataatagaaaaaacaacgtgtggcctctgtacgtaaaacataattaatcgttactaattattcccatgtgcagaccttactgatattgatacttttaaattcagaaacttaaaccctaaattaccaaacacaaatttatgatctaagaaccagaaaatcaaaaagtagaactaagaaatcaaaacctgttccggagcattatgaccagccggagatggaaaagtttcgagagacatctcagttgatggttgagctgtgcggacaaagttgcttgttgttccactattgattacagtggcaatgcttagaaacacaaaaacaagtaaaattttgttcatcctcatatttgatctatgatcgtcgctgcttaaaaagttttgagtatgtttctttctgttttctgattaaacgtatgggtgacaacgttttatatagaacttaaattgaagttttttttttttttgcaaaagaagagataaagttggattttaaagaatattcgaatagaaataggattcttatagcctagttatagatattaaacggttattgagattatcatggtcgtattttcgaaacaaactttttgggataatgttgcataattaacctcgtatagcataattttatcgcttcttaaaagtcaaaatttggtttcaagtcataaaggtttcataatttagtttaaggggaataattcagttattttttactttattgtaaaatatatattggaaaaatagctattctgccgacaaaaaaaaaatagctattctagggtatttctctcgatttttttaatattaaagattttctccaatttaacttcggagaaaaagcttttataatttacgaagaaaaaatagtttatgaaacataaatattttgttagataaaaagaaaaagggaaaatagaactaaattagaaagtgaaacgacaataggtttgaaagaaatgggtcaccataggatctcctttctcctaaacctgaaccctctttagttgattacaaagacaaatcaaaaccaaaccttaaactgacttcattcagacccaccaatcccggtctccataaccggttaaaatggtcggtggtgaccggtggcctgaacgtttttaatgagccacggaattgcccgagactcatcacaactctacagactcttctctcttatctatctgaaactactctaacccacaaatgtctctgttcaaactaacacacacacacacatattttaaacacagcttacaatttcttttcttcaactctctctgtattgtttggttatacattttgtagacaaagggctcaatggttgtctttaaggtctccaagtgcttacagatgtctctggggcacaaactgcttcaacagtcaaccgtttcagcacatttggacacgggtctttcccgaaattgctgttggatatcgtcactgcgcatctcgctttccctacacacttctgcatatatcaaaacacaccgtggttagaaaaaaaaagaagaagagtctgattccagttttagctgtgtaaagattatatcttttaccctctctaagatagcgtatgaggtagctgcgtgacactctccttgttggtaactcccgcaggttcctaaaggagttccaaagcttgcaaatttgatggatgcaattgcttgacctggactacatttcaaatgaaccttgggtctatgaaatgtctgtccctttccgtagctttcgatttgccagttcttgatattcgggtggtattcagaaacttcagcacaaactcctgatactgatcttttgaccaaagagacagttgatgggtttccaccaagctcctcgaatatgaccaacagattttggctcggctttaaccaagctctcggcacatggtaccacctttgtgtaggttgaccacagccggtttggcatttgttcggtttatatgttccagtgtagctacaatgactgcagtcaccagtcgcaaatgctgtccagtatcttccgatgctctcaccgttcacccaaatctgaccttttcccattccttccatgtccaaagcaagcggctcatttccttcgggcgcatcaaaataagtctgaaataaaacaaaatatactcgttagttcagattcttaattagaaaaaaagctttgttgagttgtgttggattcaatcaaaccttgtgccatgtcaaaggctgaggcttttgtacagttaaggacgcatccatccatccaatagagggagtgttggttggaaatgcaagattcatagcttcacctttcagtcccacctgatgaaaacagagttaaacaacttaatacagaaaaaagggatcaaaagagagaaatcacgagaaaataggatagataaaacacctggtatgtccatttctgccatgacaaatccattttcccttgactcaacccatgcaatgccaccggacccaagattccagtattccatgactcaaagtgtccacccacattcttcaaaaacgaaaaagaggaaaggggtcaggataagagaaaaacgaaaaacatcgtttacacggaagagagaaaagactactaactggtaatccaacagcaacactcagcaacgcaattctgttagttccagaatgcagattgatctttccctgataagtaaatctcctgttttgccttgttccaaaggcagaacctgcaattcatatattataagtttgcatcagaaattctctaatagaacaaattaacaggccaaactagtggaagtatcatacctgaaagctgtccattgacaaatatatgcacggcatggcctgtagattgaataatgagagttggtagctctcctccatgcaagaatgattcactgtcaccgatatcaacactacataccaattccacatgtttgttagcacgtgtcgagaatcactttgaagctagggaaagtttacattgtataaggtagcagacgggtttttcttttacctcgtcatgtaccaaagataatcgcttgtgtcacgcgtgacatttatctgctccaagagtccgtgagtggtgaatgtggagctgtcatctagagaagaaagatcttccaaataactctcccactggaaattctttgtgtctgtaggcaacatttccatctgggatgtttgaactccaaccttaaattaaacaagagaaatccacaagaatcagaaaaaacacagagaatttgaggaaccataattctgagtttcaaccatatacacttacctttgcagtattgaagactgcatttctacagtctggaagaatactgattgaccaaggaggtaagttataatgaacgttgttaaacaaaactcttgctgccgattctgtatcatagttagctaggaaagccgaacaatctcctgattctgcagagtatacatgagcctgggaaaataaagtagaaaagaggatataatttagtaaaagctacagaaagtttctacaagtaaaccaaaacaaatctctcataataaatccatacttgttgcttgtttcctattgatgtaacaacgggatcagctgacaccagagccttctcacacatcttgatagctctgtggagttcctttaggtgaccatatttaggttgtctgattaaacctgtttaacatttaacaacgactcacttagtacataaagcattgcatcaacttatatttcaatgaatgtgtagaaagttttgttcgctgcttgtccttaccatattcgtcgatcggagcatcataatcatagctggtggtgacaaatggacctccggctgttcttccaaagttagttcctccatgatactgttctcaagaaaagacaatggatcttatattttaaagatgctcgatgataaccaaagcttacagtgtgtaaggagctagatgattaaccaaaatgctaaagtgtacataccatgtagtagttaacaaaagatcctcctttttgtatgaaacgtgcaacaccaaacgccagatcctgaactggtctatggtgcattggcccaccgaactcagtgaacctggtaatgcatttccaatttacagaataaaaaaggttaccgatttgaagagaacaaatccatgtacagatataaagggaaagcaaatgagaatctctaccagccgctccatgcctctgtccatatcaaaggcttgtatggcttgttcggagcaaatgaatcacagtagaaaccgttacatgtgtttatctgtcaaccaaaaccaatgagttagagttcattcttcaaagtcaaagacattcacccactctagactcattaattaagttattacaatgcttatgcaatcaaaagaaactcaccacagggtcaggggcatcgtcttctttgcacatgacccacgggacaccagtctcagttgctatagccattttagctgcccatgtcatgtagttgtgaccttcagcgcccaataactgcccttgtcttccatactcattctcaatctacagtcaaatgaaagatgacacctttctattaactcacatagatccctaaaaccataaatctgcatgatctccaatccgagcactaatcttttccattaaagtttttacctgagaaaggataatgggaccaccctgggactcgaacaagttctcactcttcatcagctcaactattctctctgtgaatcctttcatagctctctgcaaacattatcacaacaacattcatatcacaagttttaagcttctaataaagtaaatgttctaagaggaaaaattagataatggaaactcaaagtggaagaaaagagaccttaaaaggctcattatctgttctgaagctgattccaggaacatacttgagccaaacagggaatcctctggtcattccaaaaacaaaaacaaaaactttagtgagcagaaacagaaactgaattcatacacacataagtagccaaatctagaggcgtctgaagctgaagagacaagaaaggaaatttggtaattacccaaaattccactcggcgcaaacataaggtccaattcgaagatgagcatataaaccagctttgtgaatcgtcttcacgaatctcaccaaatcatttctcccttcaaaatcgtactgagaggaagaaaggaatcatcaatattcaaagaacataatgtataaaattggaacataactgaagaaaacaagtaagaaaaagtatacttttccaggagaaggctcatgaagattccagaacacatacgtctcaatcacatcaatgcctccatctttcgccttctgaatcaaatcttcccacatctaacaacaagaacaacagttaaaattaataaagctaaaacctttttgataaattgtataaaacagaacataaaggaaagaaacatagggtctttttgttaaacccaaaagaagaaaaaagagaaaagtttagggcttttgttaaatcttacatcaggagtgcttcgagggtaatgtatggagccagagaagaggattcgtctctgtccattaatgagaagtgctttccggtcataagtaactccacattgcacaaatccaacacctagaatcaaaaaccctaagcagaaccagagaatcagtctcgaagcagaatctccagtccccatctcccgcattcaccttcacaaagagaagaaccaagctacttcttccgtgtctgtgttggtctttcttaataaggagagagaaggaaggaagaagaagaagaagaagacgaaggagaaagagaggaagaagaagggggttttattgcacttcacaagtgtctcttactcgcatcatcactgcgtggccgtgagctaccgacgctttcccaccaatttttacgcatttttatttattgtttttatatcatataacggaaatataaaaaaacgggaagatgtaaagaaataaaataaagtaagagttgattatgatattagggtgaaaaaagtggcacgttgattgaattaaagcagctaatcacgctatattttatttcagtttcgttttcttttttttgtttggttgattgatttagtgcgtcagtctagtcactaacttaaaacatattatgtgtttatggctgaatattgttatgggtttgagttagtgattagtagatgttgaaatttgatttggtcatttaaactgatataaaaagatagagtacgtgaagtactttggtttattagtgaggagtcttgtggacagtcgtcaaaatggattcacattgtacaagtgtcttccacttccaaaatcacagtgtacctgtcatttagatatgtgtacagactttaccatacttattaaattcacattgttccagaaattgattttgtagttttgtttggcctatagttattatatggtcttcttcggtggaatttggttttagtagcctttgaactttgtagatttggtggatatgtcatatactactattttacaatttatttggtaagtttctttgaagatcggttggatataattttgggttcttggatctgatgaaagttcaaatttatcagcccacttgagattaattaagagatgcttccttaatcaaaggattagctgtaagtttgtaactgtcaaaagaaagaagatataaatcacacaaaagacataaacatgtgaatgaatgctcttttgttgcatatagtgaaattccagttttaccctaaatcattttacgctagtttcacccaccgacaccgacagtagtctgcatttatgggtttgactcgtgaattcacattttgactaggggtatttatggaatataactgtgtaacagttgggataattgaaggaaaaagaataaatgagaagtgtctattagaactatcccggtacgtacggtccgacattcaacttccacttaagctatcatctcttttattattcctaaaatatgttttcaatattttcgagttctggtcagatttgcaatcagatgcgatatcaatcagcttttctaattgtcggaaacttccaaattttaatttatgagtcttgtttttatctatttgtttaatcaaatcaaaatgttgtttctattcgtttcatttactcattattaaatcaaaatcgatgcatattgagaaattcttatactatttactaaaatttcataaaggttataatgaaagtactatgctactaatattcttatttgattttagtttttttgtttgtttgttaaagttatttgatttcaacaaataatgatcattatcgtgtagtttattcaagtttgatcatgtactatatatgtaactatttccctggtagaaaacaccatccttgattttcatacgatgggacaataaccaatataagataatttaatttgtctattagtggacctaagtggtcaaaataagtctcattatataactagttaactagttaatttatttaaatttgatacttcagtcatcaaataaagctgattgtcaagatttttagtcctggtgtccacatgggatgttttaataataaggaaacgagagattatggatttgtattaaaccctaataaggcttcgacggcgtgaaatgcggagagaaaacgggaaaggattgcatccactcttactaagctttacctaaacagctaaactatataactattggttctaatgttaatttctatttatttgtatatgttaagtattattttatatagtaaaatacagatagatgttgcaaagtaaactacttcgccaaaataaccatgttttatgctaatggtggttgaattttagttggagaatcaacaactagtttccactaaaatatcgctaactctgaaactttcttttgttccaaactaaaggatcaaaaaggttatagtagatttaaatcattaaccttttcgaaaatttgtttataacaacttccttcccttcatttcaaaataaagaaagaaaaaaaacattacccttccattcacatggtgaaatcttcttctaatattttgttggtggctaagttttctctcttttttctttagacatcaccatatttctttttatattggtgcagaaactaaatatgttaccaccactctttttataaagtatactttttgataattctaaacaatatacttatatactaaacacaacaattcatcaaatccatgtaaacgcatatactatttcatctatgtgttgtaggctggtgctttagggtcctaccttcgttaccacccatcttggttctgtgtgaacgaagacgaaactctttggcacgtgggaaaaagcttcggtgcacgtgtctcgtatgagtttgttcttttcttaaccacacacacacaacaccgttcgtttccttcgattatcattggcttagaactctcgagaaaccagatgatttctcactccgttaatcggactccgttacgctgagttgttatttttcttattctatttatatcttttgtttgattacattatgggagtgcattttatattcaaggaaaaaggcaattctcacacgcctctcagcgaattaagattacgtctgtcggagtttcgatctttcgcttgttcccaagacaaataaagttagttttcattcttgtgctagctatatcgacctatgtgtaacgctagatctaaattcagcatatcttgagaagcatcagattttcttatgaatatggcaaatttttccaaaatccatcaacttattacttatctatcacaagaccacatatttgtataaaatgaatagtattgattatttattttgataccaaaaaaattagattagtgattattaccatttggaaagaaaaaaaagagagagaatttgatcatatttagaagaaaaaaaaaactctttaaattgcaagctgaacgtcacgcactcacgggtctggacgtaatcagaatacaagattcactgacgccaaagtaactgtaactgtaactttttcttaccacttggtaaaactaaaaaggaatctcggtcggatcctgaggcttgatttagcgccacgttagtcgtcagttaactttcgcgcctttgactcttcgtagcgatccttttcatgtcgctttttttcctttgtaactttttttgtttttgctttaaacatttttgtttcttttttacaactttttccattaaagaaaaaaacctttaaccaaaccctttacaacaatacaacattatggaagtacaggagtttataatcatgttttataaacataattattgcttaccaaatgaaatgagacatgtcgatcaaattacaatttctaattgccgttatcaaaggatccacctttttttgttataagcttaccgttgagctcatcatctcatcaaatgattaatttctgttgactgttgataaacttttacaacgaaactgtcgactgaataccttttcgatgtcgcattaactgtatatatcttcgttattaatactattttaacaatttttacggaccactagctagtacatgcaaataaggaaactgatctgtataattgatggagatctttttgtattaaaattacaatgttaccacaccttacttcgtaaataagaattcatcatctagtacttcacatgttcgatggttgagtcaatcataaataatatagatccccacaccaaaggagtcatttgcgtttcaaggaaaacattacattaaatgttgatagtgccatgactgtattacctcaaatatggggatgcaaaaatatctactatacagaaatgtttctgtaacctaatcgaaactaaactatatttataatatgattatatgatcgtaccgatttgaactaattgaactatatatgaatacataatatcataacaaaaaaaggtatttgtagaaagtataaagaaaaaattaagcttaaataaaacttaaattgtatttaattagtatcaaactaaatcaaatagcgacgcctgcaacttaatttatcaatccctcgcacaaaacattctttcgggataatagaacataattaatgatatgctataataacatctataatttggttcaatttttgttagacaaaggcttcgcatgaaatgaatataataacggtcattaacgagacttatgttaatgaccttcatggagtcattattaaagcgtacataattttaaagaattattgcaaaccattatattgttttctttctcccatgatccgtgaacaaacataacataaatatttaatattatctctagaatttgttgttggtcatgaaagaaaaaaacatgatacggacggaccatgccgttgaacatagtcatcgagatcgatggttgaattgaccatacaaagagacatatataagcacgtagcaataatagcttttttaatatatacatatacttacaaagatatagttattatttacagtggacatatacattaatgttcaccataattacttgcttgcttaacatatatttaatcattcagaaccttaaacattcttattgttaatcattcgttgcccatttggtcgagacccgcgatcagatatttttatctttttttttgtgtgccaataaaatatttatatattaaacgaacttaggaacttttccgattttagacttaaatcaatgttcgaaattcaattctctatatcactcaaattacaaggttatagacttatagtcaggcccggcccgccgtaaagtgtcgactgactatagtatactgtgaactattgattgtattacaagttttcaaccatgcatatggttagtacttcgttgtaactgtaatttttttttatcattttttgtttgtttgggccttagtagtacttctagaataatggatgcatgattcatgtgccatttcaaacaaaaatcatacattgctgaacgacagtacaaaaaataaataaaagtaggcaggggatgttggctttcgcagaactattattgattttgttaaagcatgagcttcacaatataagacgttgttgaaacagaaacagaggagctggaacagatactcaagccaaagctaaattcagaattttttattaaaaaaaaacataatgccaatgtaagatgcagtttttactgaatcatataagctttcgagacttggagtcagtttgggaactaagaattatcacctagttttctatatgtgaaccaacatatataataatttctttttatttacggagtgaaataataaataaatttttatcttgatccatcagaattagctcgagggtgaacaattggttagaaataaacgtgggcaaccatgggccaaaataagctaagtaagggcttaatatcaaatatatcggcccaaaatgttgtacttattaatgaattctaacatcacaataaaacagtttagtttgatttatctcttctttaaaaccttcaatgtcaacacatgtgaatgtgatacaactaaaacattttattttttggataatatggacaaaacaagttcttagtataactccacactatctaaaacaattacagtcatgcatgtggaaatataaatttttttgcattgatactccaatttatgatttgcaattatatacataaaaactgaagtcctggcatatacctcttcagaaatacagttatttaatcattaatttgcttgtacattgaattaagaacaataatatatatttattaagaacaataataaagtagacgaataaaacccatcgttaagttaaaaaaaacaaaaaaaaataatgctgaatatcggcggtgtcgatgatgacatagaaaggctccacaaatttgataataatggaaataattataaggtgggtcgacgtaaacaacatgcacgtgtattccccatggacctgtttcgtctttcgtgcatggcattgtccttactatggccgccataaatttccaatctattctcatcattacccaccaaattatactcttttaatataacatgttatcatatagttgaacgtatatattatgatatcacgtcatcgcccgtcggtcgaagtaaatgaagtgatcatcatattatcgatcgagactagtcgtcgatttttcgatatattttcgtctaaattttctcgagcataaaacaaaagctagatagagacgagataggcataatgttaatagctgccaaaaaaagaagaaggtatatattaatatacatatctatcatccatatatatggaatcatatctcaacttgcgtttggtacgataaataaaagagaaagggacaacctaaccaacgcttataatttgacatgacaaacaaaaaaaattataattagaatctctcatctttgagccatcactagctgtacgtatggctctttctgtcttacccaccaatcttgtttgcttctcttctctactatttgttaataagatcatttgtttacttctctgcttcctctttgcacaaacagttttgttctttgaaatgatctattaatgatcttcaagtgagatcggagaagcactatcatctacagtagccactcggatcgggagcctccgcttcatcttcacagtcggaaatgacactatctcgtcttcctcagccgtccaactacatgtacattagtacataacaattagtatcatatatatataatcacaaagtataacaaaatgcagttgaaagtcgcaacatagagatggttaggctcaaattcggtagtatatgtttgcgaactgtagaccaaaaaagaccttaaacttttgtagaccatttcatatggatcagtctatttaagaccagcctgttaaaatcagacctggacttatctagtccattacagtatcccttgatacgttattggaatgaattatgtatggcccttggccaactcaagatatcaatatggactaacacaagttatacttagttgatgaaaaaacattttcaatattaaatcatgggtttctacctgtaccgggttacaaggtggtgaagaaagatggatatttcgagcttcgacagctctaaaccaggacatagcctttgcccaccaccaaagggtgtgaagcaaatactgctgtttgccgatccattaattctctgttacataataaattaagacaagtattagtagatgaaatttgataagaagaagctaaactaatgatcatgaagttaactctgaagcaaaataattatactaaaaggaaatggtgacgtacgtcccatctccacggatcgaattgatagggattatcataaatgtcttcatccatgtgaaccgatatgaatgatgccaatacacaccatcctttcggtattaagtaacctgctcattcacccaccaaaaaattatatagtttcatcacaaggaaaatcaatttatagttaagaaatttacctttaatttctacatccttgagagctttcctccacaccccgttaataatgttagccattctaagcgtttcgtttatcacctgttgtgtgattacaaaaacaaaaataaattagctagtatattgtaactaatccctttcaataactagctagtatatatatatatatatatatatatatataaagcaattggtaggtttaaattacataactacgacttacattttgagtaaaagagagagacatataatcggtccacttgtattcttctcccaattccaatttacgcctcttcatctccatattctcctcctgtagataaataaatataaaaattattatttgaaaaaaaaaaaaaaaaatctctactataatgcgttttgattgaaacaataacgcgttgaaaacaaagcgtttctgtgacgcgaaacgctatttttgagttttgacaggcggtgtggtcgctcgtacagacaaaggcgttaatacaaatcgtcctgctctgacagccgtccactctgttttcttaatcctacggctaatatactctcacgtgtctcttcccttcccacacgtgcgtgtactcgtgtgtcccgtcgaaagactttcgacagcgacttgactcgacacggatgcaaaagtcaaactaggtccaccacttcgaaaaataactaaatcttaaccgttaaaatctcctcacaagacaaacatctaatctaacggtccacagacgtcggcaatatgcattaaaacgcacacgtgtgctgttgtgtaagtaagtcgtgcacatcaatacgtaccacgagtttggctagagcgacggggttgtcacttaagaatttgacagccaaggtcatcgccgttggcattgtttcctctccgggtatcatcatctctacgatctttccgctgacgaaatctgacggttgagattgcttctctgaatcaccaccgtctcttagaagtacgtccaccacgtcatttgccggagacgtcgttgtcatcgccacttgtctctcctccacaaccttttttaccatctttattaacctctctttcgcctgcatgattgaagtattaaaccctagtatttacacactaacaaaatgaaatcagatattgatatgctcatgtattataaggaaatattttacctttaaggatttgtagagtctagtgccagggaatttgattgggatacaaatcaaacctttgatgaattc

SEQ ID NO: 677 - DNA, 198354 bp, Arabidopsis thaliana
atcaatacttcaatctttttcttcatgatatatgttaatatcgttccagagctctctctctcggatcctgtaatgattcagacaaagaatttaaaacatatgtaagtcagaaactaggtcttacgctgtttttttgtccatctatctacatcacctatataactgatgatgaacaaagacatagagatatatatatgtaggtatctatatatatgtatgtatgcaaagagagagcataagaagataatacctttggagtttgttgcagagaagataattgagcttaggtatcgttttctctctctctttctcgctttctttttctggactctccttttctttcttactaagagtttattcagaattcacaaatattataaaagatatatatatcggaaagaaaaatatgcgagagagaggtcactcttctttcttcttcgtcaccctttttagcccaccaatcttctttattagttggtttcctatatatatataaagctgctcgtgcaaaaaaaaaatcggtgattttttaaactatggtttcttatgaaagatttagttgaaaaggttaatagtaggattgaaggatagaaatttctaagatgcgtctttttttcacgtaaatgtcttctgccattaacaatttgaagatgtttattttcgtaattttttttttttttttttaagtgagtacaaggtcatatctcaatgatacgaaccaccaccataaattttagtaatactatcgtgacaaaaaaaaaaaacatatataatatttaaaatactgccatatttatatttcccataataccctcatctgtcattcttctgatttcactggactgactcgcagatagggtcaattaagtccatatttacgtaactggtcattgttggtgcatagctccccagtcctcatcagcataatttaaagtctacacatttattttaaatgtagcatatctctattatcttaacctggaataccctaaaagatcttcgtaaataaaaaacttcataaaaaaaaaaaaaatcttcttaacgtttgttaattttttttttctactacatcaaaattgaatttacttactttatgcgagaatatgactctctaaaactccgtacgactggtcgtaatcacaacaccacaacaaattaatctcatataatcaattgattttaagttctaaccacaagttaattatcccttccaatcgacttttcagggaaatgacaaattagttacatattaattagcattttctaatgataacataatatatcccacatacatatataccaatacagtgttaaataaaatgtaagctgtattttctaacaattagcatggccgaagtaataatactcatgcaaaataatgcaaaggctagaaaaagtatatattcaaactattttttccggccatcgatcttgtgatcataaattaaattttactacttgagggtcgagtacgatgtaactatgaatggcttgaaggataatgtaatgaaattcggtgtgcattttttttgtttggtgtatcaaataaacaataaaagatgagagttcgcacgagcgggagttgtggtttggaacgtgtgaaaggtaggaggacggttcagaagtcaagtgctcaaaatgttaattaggtttatgtgggggataatctagaaaaccgatgaaatcgacacataaccgtttttttggttcaacagctttgagttcgagtacttgagtttctttttttggtatggctagactatatttttaattccatggttaatatatagatatcggaatttctttcttaaagcggtgacatatttcgtatcacgtctgtcttgctaaaaaaatagcattcccaaattcgagttttggtgcatatcccacaaatggttagagaaagtattagatatcgcaccgtaggcataagtccatattgggataaataattaatggaaatgtcgaaagcacaagtgtaactccacttatataataacattgaattttgtttattgtgtgacaccatgtgggaatctttcatgtcaaaatcatatcagcacgcaaattctgttattttttattttttatttttacacagttaattcatgtcggagtagtaattaaaataaaataaaataaaaacactctgtttttccattttaatattccctagaaacgtaaaatttcataaaaatacgttgcaggttttattttaaaattatagctacaaaagttttatgttccaactacaaaacctggaatgacaattgacagcttaacctttctaccttcctaccgatattttttctcgttttctattttttcctttctgaaatagaaatggttcaatctctctcacgtgaatcccaccctcctttcacacgtatgcacaactatctgttacgtgccgaaccttcctttttcgtacgtgtggagaggatcttcttcttaggcatttatactctttacccaccaaagccaacttgtaatggatcctttttcctctgctttatcatatcttcaatggtgtcaattgtctaaccttcaacatatttattagtctcttcatttttatttcgacacgtttccgcttttcgacctcacatgaacattcaatttcatagtatcgaatattttgattgattttttaatttctgcgtcttataaccaaagctatgtaatgtgtttaactgttcattatcattgaaatgtgttcgtagtttaatgtaaccggtgtattttggatagctcttggatcagaaagtgtgatcatgttgtgaggttgagtcatttcgacaacacaaaggagactaatttacttgctatgatcagtaagaatgtaaatctttagttgatttttttaaggttttagatgaatgtataacctataaatttggtcctacgaaaaacaaaaaacatgaaagcaaagacaatgagtccataaaacaaaatgtttgctaccaaaaatcacaaacttataaagaaatatttacacaattagtttttcacgaaaaccaaatgattatatatatacaaactcgtggtgataaattatgattaaatatgaaatgttattatatattgcaatgatctgttatatctgtcgtgataggtttcatattacctgactataacaacgttgatttccagatcctgttttcagacaaaaggatcatgaactaagttattgttgaaaaggctttcatcgggtttggtcttttaagtacgttgaaggaaaaattatgagttatcatccagattcgataaaattagagttaggtttgatttgattaaatgtggtgcaattgcaatttgttagaagattaaagtcaccactttctctaaaggagataaaaaaaggtttgattagccaaaagctattacaaggactcataatatagtctcatagccacgtaggtttgatttattgtctagtcaatataccatatggtttcatatccatcaatcgtcgtcatatgaaattctgcaaaccattattatgcctcatgagtttgaaagttgccggaattacattcttttttactgattttttttttggtaatttctaattagtggtaatctcctttgtgagcttaagattcatatgaaagttttgttcattcttaactctgtaagaagttttattatacataaagttgtaaacaataaagtcgatgagaaagaaacaaataaatttgattatttgtcatgagtaatgggagagtgagaccacaaagggagttgtgaaaatggcagtgatggtcccttcttattccatttcttgtccttttggtgttactcaaattgttcctttcgtatttacttttttttttctttctcatcttctattttagattcttatttcattggtttgatgagtaatagtagttttcaactcttttactctgtttctatttttgctttttaaccattaattgttattttacaatctaacagtgttttactgtttttgcttaatcgtttgacttaacaagctcactactctttttaaggtttgcttttgagaactgttttaatgtttttaatacaaacatatacacatatgtaacgtatgcgtgtgcatgaaaactgtcaaaatctaggaacgacatgtttctttaaatttgtccccgactactatgtcagtgtatttgtcttatcaaggttcgaataatgttacttcccatgaggtacttgcgaaaacttctgtgtttatgtcaccatgaagatcacaacgaatctgaattaggtcacttgtaatttttttttttggtcacttgatgatagtgtaaatgtaatcaaataactaaatccttatacaatgatcaaacgttgagtcttaaaagagactaaacttatgcactaattaattcaatttaagtttgggaaatcctcacctaatgatgttaacttctaacctatcatattttctccgcgaacaaccacaaatactttgtatatccaaatcctcacgcgttagaaattaatgaaaaaaatagggcaaggattgattgaagatgtttttttttgtctttatattctgattattatatataaaagaaatcacatctcagctagtgaattgatgtgccactcatgactatgactcagtagtacatgcaactgtaactatgtgagactgtatagaaaatgaccattgaattggccaaacaggataaactattatatcaaatgaaataagttaaaattgatgattcgtatgagatctgaaatcatatatatattcaagaatatgcaacgccttatcttgaaaggtttgttaagttcatgattcatgaataatgtatatcaaaactcactaatcgctcatctaaattaaaactgtatatggaccatcgagtcaacggacctttcttccaatttcatcaatatagaagtaaaaagtatcaactattgataatatatgtgtgaacctatattagaagttaccattgggcaatagttggttaaataaagcaaaaattgtcatcaaatgaagaaaaacaaaagaagcaaaatgtttttatgtgcgaaggtccaagggaccaacattctcatggtcttctgtcaccacattttttcaatattatctttccaattattattgtttatttctttatttattttgcatctaaagagtataatttaaaccttaatacaattacaacaacctctacgaattcatatcatttatttccttgtctagattcatataccaccaataattagctaggaccatttgttatagtagctttttggatatcttgaccattttgttataatgtttttgtatatatatatataaatacataagaaaatattatacaaaacacttaattcagttcttttatgtataaggaccgtagtgttatatctctaatatttatataaatcgtagatgaacacggagtaacattttttgataaacatgtttaggagatatctgtactttgcaattaaattatgatgaatgatttattggtagtgactaaattatagaggtccccaatggaaaaaagaagcagcgaaccagtcacaccgtcgttgtaatctacaactaaaaaaatgcttgatttatttttccttatcaatatgttttcaaaatgaaaacgtgtacatataaaaaaaatggtcctaagagacatattaattttgattggtccacctggaaaaccggcaagggatggccatggccacgtgggatttgtggtccatgctgggatcaacgttcctcaatgtgccacgtgttttgatcatccagcgtgacagcctgtgttttcaacttttcatcaccaagcttcaaaatcttttttactctttttatttttatgcttaaaaataatttagaaattgatatggtcgaagagtaataataacttctcttgtcaaaagggagtaattatataatatgaaaatggatttttgtcaatacataaatttttattttctaaattaactgttttgtttttttcaacatgatttctctgttttctatttgattcaacggcgcatttttttaaaatgaaaattgtttgtagctcaatattaaagatattatcgtcaaaaattgttagacaaaaaaaaaaaaaacccagcccacaatcattatatgatatatggccactgataatacaactatctgtaactgatttaaacttaaaaattattctacaataagggttttgattcgtcggcccaaatttaccatatgggccttaagaagcctggttaaaatatatggccactggataatacaactatctttctttctttttttctttagtaatatatggcatcagtattagtgtcaatgatttatagatgtgaataaagtgaaatttttggaaagctaattgataactttgatgaccaatatataacaaataagtttgtctattgcagtactttaattcattgcttgcgtaagaagtgagtgggatcacaatttaaagaacgtcacttgattcaactactactaaaataaaacaatcagaaaaaaaaaatattaacagaggaaaataaaatatcctggagtagttgaatcatcttgctaagcacctaattttgataaaacttgcggtggcacagtaagtttgggcacctaaacaactaattgattggctaatcacaatatacacgttttttttttcacatgtggttttatattgaacccaccgaattctcttgatccttctaacaaaatttaatctcaaccacaaaaataaaataataatatatataagaaactgtaatgtacaattgtgattagcaatgggtcatctcatctaattatccagataatattgtctatatttttccaattaatttggtcgtatgtaactaaataatgcattaggttgagctaaataaagtattagataaccttacctactaacaattttcaatgatttttttcagtttctatatttctgctttgtatttttgtgtaaaattgggtttacagaccaggggatttcgaacagggtgatgtgttggacacaaaatttattccattcatgtgcgagttattattcattgaagtatattaaacttttgttttattttacttttttctattaattttaattaaaaatttgatgtgaaagaaaaaaacggtattttattgtgaatagtaaaagtcatgagcaaaatcatcaacttaggagtgttgaaaaaaggctaaagaagagtaaattagaggagagtcaaagattgtgtgtcactagtgttaatgctagtaaacatcagctcttttttttcttctctcttaatttttcaaacatttgatttctataaaccttcttaataatttcttccgtaaaataatatgattagtttttttttttgtaaacaagtgcccacttgcttgaccttcccaaccaaaaaaaacgtaacaatttccatcatcttctccataaagttcttacctttaagtgtgtttaatggagatttatcctctactcatctctctctctctattctgttccatttattaagctttcttcacgctttttaagataattaacagtcacgggttctaaaagctaaagggttttgcttcgaattcaagtgtctcccttcactttctctctctctattgctgctctgtttctgctgtcaattccctaagaaagtcctgatttttagggtgatcgagagaagttgaagaatcatgtttattgagtttccttttttgatccatagggtcatctaattttgctaattttattgtcatctccttcaggtaatttgcgatttctctttactctgtttttgacttgtacttagattccttttctttaacagtaataaacttcataaagatttcatttttcttcttatgggtatttggaatgatgaatgtagattaggttgattgttttgaggatgatgtggataatctttttctggatattattacaatttagggtcttgagattgtttgtaataagctccgtactttggtcccttattttcaattcagtctttaagatttcggtaacccttttatatttgatgcaatctccctataataataccttcttcaattgctgttttgccatttgcatattatttaactttctttgttggatcagtctgattctttcttaccaattattgtcttaatccttgattaagaaaaaacaaaaaaacaaaagacatggagtttcttctctttcttggatgtataacagtgtttctctatgcaggtaagggattgttgttgccaatggggtggctaactaaaatccttaaaggttctagccataagttttctgatggacaatgtaatggaagatatagagaagatagaaacttggaaggtcctcgttattctgcggtaagtgaactttactgttttttggttcattttgaattgaagataaaagggtttcttgaatttctgattcaggaaggatctgattttgacaaagaggagattgaatgtgctattgcactttctctttctgaacaagaacatgtaattccacaagatgacaaaggaaagaaaataatcggtaatgttgtttaattctccgttggtaatgcatagagaaaaacaaagagaagaaagaaagttatgtgtggaaatgtaacttgcttaaattgtttcttaaaccttatattctgtagagtacaaatctgaaaccgaagaagatgacgatgacgatgaggatgaggatgaagaatacatgagagctcagctagaagcagcagaggaagaggaaagacgggtagctcaagctcaaatcgaggaagaagagaaaaggagagctgaagctcaactagaagaaacagagaaactgcttgcaaaagctcgattagaagaggaagaaatgaggcgttctaaagcccaactggaggaagatgagctactcgccaaggcccttcaagaaagtatgaatgtgggatctcctcctcgatatgatccaggaaatatacttcaaccatatcccttcctcattccttctagtcacaggtaaatggttcaaaaatacattaatgtccatttcttagattttcagacactatcatctctagatagtgatatgatgcatgatcacattagctccaatgagtcaattttgtttctttgtttattttcttggaggatatgtgtcggttgccaagctgagataggacatggaaggtttctgagtgcatgggtggcgtttggcatcctgaatgtttctgttgcaatgcatgtgataagcccatcatagattatgaggtccctatacattttattaagtattattattgtatcctcctgattcttttgaagcttaacctgttcaagctttgttttacagttctcaatgtcaggaaatcggccttatcacaaattatgttacaaggagcagcatcatcctaaatgtgatgtttgccataactttgtgagtgatagccaacttctgttgatctctatattttacccaaaatttgttcccaggttgtactaagcttaatgtgtatgtataaatgtaactcctctagattccgacaaatccagctggtcttattgagtatagggcacatcccttttggatgcaaaagtattgtccttcacatgagcgtgatggaactcctcgttgttgcagttgtgagcgaatggaggtcagttgttcgatatagcatttctgttaataggaaaataaatttaagaatctgattcgaaaaccagatgttgttctgtttttggctcatggtttcagccaaaagatacaaaatatctcattcttgatgatggtcgaaaactgtgtcttgaatgtctcgactcagccattatggacactcatgaatgccaaccattgtaccttgagatacgtgaattttacgaaggcttacatatgaaagtggaacagtcaaattcctatgcttttggtggagagatcagctctaaacgagctatggaaggagagaaacacgtaaaacctctatatcttattgatactatgtttatactctctctttctctctcgctcatttgtttcaacctacttctatctaattttgctgcagggacatcatcatttacctgaaactagaggactttgtttgtctgaagaacaaactgtcaccacggtattcattcttccaagtttgtaatgaattgctatccaccacaaattgcttctgaatcagaaagatgttgatataggtgttaaggagaccaagaattggggcaggctacaagttaatagacatgatcacagagccttgcaggctgatacgtcgttgtgaagtcactgcgattctcattttatatggacttcctcggtaaaagaaaaacacttctcaacacactcctaaaccaaatttttgtctttataagatatctaaaattttcgtattacacttgtacagtttgttaaccgggtcaatccttgctcatgagatgatgcatgcatggcttcgactaaatggtaatctgaagaacactcccttctcattatgttgagcaattgaacgtagggaaatatcaaaaaatgttttgttgctctgtgtatatctgtagggtatccaaatcttagaccagaagtggaagaaggaatatgtcaagttttagcacacatgtggttggaatctgagacttatgctggctctacattagtagacatcgcatcttcttcatcatctgctgtggtgtcagcatcgtccaagaaaggtgagaggtctgattttgagaagaaacttggtgagtttttcaagcatcaaatcgagtcggattcttcatcggcatatggggatgggttcaggcaaggtaaccaagcagttcttaagcatggtctgaggcgaaccctcgaccatattcgcttgaccggtacatttcctaaatggatttaaactataaaaagagagaaaacaagctttgttatagttttttagagtatagacttgagaagaaaagaaaaagaaaaatgtataggttacaacaatacacacatttaagtgtcataaagtttccactttttaagtaaaaaatcaagagtcaagaaacaagaccaaaaattcttggcttggtttttatctttttttgccaaacgttttgcttgttatttcttagatagcaaattattctgttttcaaaatctaaattactacaatcactagtttgacttcatcatatctggaccagtggataaaagtatgaaagataaggaaaatccgaaaatggatagacttgtatatccacaattccacattatatcataatatgtactgtatattatggctcttctattcgctgagaggacgaaggtcaaatatgtagaatgtagaagtatcctcatattgacctgtctaactagattaatattatagtatgcatgcttgccatctgttaattaaaatacagacattgtgaaaaaatacactccatgctctctatctttctatcgtttgtaaaatgatattttgttgatcaaaactactatggtctacaagatcgtgtaaaacaacattcaagtaacttagtattatgggaagatgagttctctcgatcgagatgttcagtcaattctctagagtataaaaaacgaaaacgtctcaagtcaattgtcaatcattaatttccaaatataaatattagacattatcaacaaatgatgataaagagatacaaaaaacattgtgaagatgtgggatatgaggataaacatagagagataggatgatatattcacacgtgtttcccacttcctcatccaacttgtcgcggcgcctcgtcgccggttctttcttctctctttggtttttttttctaaaacattttctctatcaagcgtttatgtttcaacaaattttatttaagctaatgttttttcttataaccaaatcaaaattttattcatcgatatagaaattaatggttttttgctaatattgaaatctaattttaaagtatatattaaaaagtttttgttaaaaaaaaatgaggatactcatgttggagagggagagcaaacggattcttgatgtttttacgatcgattaaagtgaagacgttttagtggacatgatatatttctttggtatgacatattttaaaagtcacctctaagaattcaattttttctagatattatcgtcattcgtcaacattatatcgtatgatgttaacaaaattaatggttggtagagtactcgtcatttagaattagggctaatgaattgatcgttcataatgtcttgtcgagggcaaaaacgacgtaacgtgacaaaacgtattaacctttgtttctttttcttttttttttgttatttcagaattcatgaaccagagaatttcattaatccactagctaatcttgaaattattctattgccttttgaaaaagttgtaaagtataatttgaaggttgcaaaattttaattttggtttttagtgtttgagaaacaaatcaaaactgcaacattatatacagaactatcttcccttttttttttaactaacttgaaatttatgcaaaacagttcaccaaggtgtcattaaaagatgtcattaaattcgaaagtcggttcatgaaagatgtcgtcatcatcgtaacatgatgccaccacgcagtcagcactaagcaggctatttggctttggcaccttcattcaaaaataaaataaattttaaattcctggttcagtaaaaatgtggaccgttgttttgggggcagccaatcgcacgaatatggtggctacgccacaaagttacaaatgtacaactttgtcgggcttttccagattcattaacatcaataggcaagtaaactacaaaatgcaagttgcttaatcaataatgttgtaaagcttttacagcatcttttataccataaaatgtcaacatcatggagtttactccaattaagttctcgtacactttgatttgaataatcagtacaaaacataaccaaaccggattagatgtggttttaactattgcatacatttccggccaatggattaggattactgaaagaacattaaaaacatatatgtatgacgacgaaaacaatttcttagggcttaggttatatatatttcgcagaaatgtataccaaaatgttggagaatcgtgaaaaagaatatacctaataaaccgtactaaaaaggctgaacatctgagattcagcagagcatcaaaagataaaagagaatatgctcattaatcataggtcgactgttttctccaccctccaactttaatttttgaaatctcttgtttttatgtgcccttgataattattaatcaccttaacattaacaacttgttaatgcctgttaatccaaaagtaaagcaatcaaagaactatattataagattaataatgtaatgattcgaaacattacaataaagtataacgtaacaagcttagatatggtgggtaaaatatacgaagtaaaataaatggtcccaagtatatgaatgaatacatgtatttacagatatctctctcccctatctccttatgatttgtcattttcctcacccataatcctataaaataatcaagaacctccgagggagagagacatacacacagacagagtaagacatatataacatatatagagagagaagacctaaacaaagagacatatggtgtctttaggttactgcttgaaggagaagaagacatgcgtgagatgggtagagatatacttcgatgactgtctctgtaacttaaacgacgacgtttcattcgcacttggaatcgctagcctcctctgttggggagtcgcagagattcctcaggtcatcactaacttccgtacaaagtcaagtaacggtgtctctctctccttcctcctcgcttgggtcgccgggtccgtacaccatctcaagttcttctttgttatcataatctctctctttccctaacgttattttatatgaattttatcaatcggtgcagtgatatcttcaatctcgtcggttgtcttcttgaaccagctactgtaagatacacaaaacatctatagtacataattattttcatgtcttattattgttttctcattgtttatcttattttgaattgtgtagttgccgactcagttctacacagccttggtaacatcaccgtcttctcgccgcataaataaacatatgtcgctacaaagcttacgtgtcgcttctattaaaattagcgtcaattgttcggatttatttattttattcgaccgctttattttattctatttacaaatcagccccgtaactatttttttttcctctctctatagctttacacagtgagcactgtagtattggtgatccagactatttactacgattacatctacaaactttgtagacatagacgtaccaagatttgtcaaaaggtaataattataagagttgattacatttttaggtgttgattatcataatgagggttttttttttttgttaaggatgaggaagatgaagagaagagaccattgaaaccaccaaagacgatgggatctgctatttccatcccaggaggatcttacaaagattcttctcggagagagttctattacacgtacggattattaaacataaatcatattttatttactctaatttgtctacaaataagttaaagtttgtgacaaaagcttcgtatattttattattatatgctttcccctgcatactctgttttttcttgtcgttttctcaagcttttgaagaaacagagggaaagggtaacgatttttttcataaaataattacataattgctgataaaatctcgaacctatcctttagctttctcaattttcttatatcatagaatatatatgtccgctctctatattcaattgtgacaactgacaagtggttttgcggggggctatttgttcaggtcggcgagatcgttggccggaagtggcacacctcccttaagaacatcgtattttcgagtggctaagagtggccttcggctctggcaatcgacaatgatggttcgtcatcggacgaagatgagacaatgtcgacgtgtcctgtcataacggctaaaaccattacaaaaccaaggccaatacctagacaggtttgtaatttctttttaacttagccaacttaaaatcactttaagctaagagaacaaatattgacccattttggacttctttttctcaggcaggttttggaacgtttttggctgcatcggctagtcttccgcttcaggcaaagagcttagcggaaaaatatgcacatgcttcaagcagacggcttctaaacgtgtgtgacacatatagcattttgttgttttaaaggtatgagtgaaatgcgagaaaatgatatcaaaacattgttgtctttgtgcaggaaagaatagtagagcatagcgcgttgggacaatggttgggatggctaatggccgccatttacatgggcggtcgcattcctcagatttggctcaacgtaagccatctttagcaaatcttgatttacttcttcttggcttcttgtttatgatattggatactaatcttttttttttttttctctacaactagatcaaaagaggaagcgtcgaggtaaaaaaaaactaaaactacaagtcaaccaacagatattcccttatgtatactttaaatgttattgtggtatgcgatctaacaaacagtatgttttgatatttggcagggtttgaatccactgatgttcatcttcgcgctagtagccaatgcaacatatgttggtagtattcttgtccgaacaactgaatgggacaacatcaaaccaaaccttccttggttgcttgatgctattgtctgcgtcgtactagatctatttgtatccttttctaaccatttgcacagtctcaacgtggaaaacaagttatcttattgccattaggttgagctttgctaccttaattcgaaaaatcaaaacagataatactgcagtatatctactacaagtattgcaggataaagagcttggaaagcagagaagaagacgcctatggagactatgtggaagcaagcaaaacttttgtttcgtgaatcactatttatgttacaaggataatttgattttcttttgatcttaagtattattgatttcatagtgtatgcatataaaacctaattattatatgttcactaaaactgctttctgtttcctcaaaatctatacgcaacaaaagcagcattttccttccacacaaaaacctggtcaccaagattctccttgggtgtgatccttataggaggagtccaagattagttttctgcagctcctacacactcatgagcagctgaagcatcatgcatgctgctatagcagttgaggatgcacaagcatagagaggcttagcttctagaagggtcaagatacgttggttttacctgttatgttggtaacgagtcattaatgagaattcagcatcaaattccaccacatacctctaaaaagagagaggctctaactgttatgttgttactgttaaatgattaattgcctactatatgcttatatcccacaatctgattcgttgagtaatatgcaatacaaataaatattggaatgaatatatcacaaatggacagaagcagaaaataagacatcaacgctatatgagtttgagagaggatcaagtttgaagacaacattggaccactcaatcttcccccaaatctcacctccctcgcgcctctccatggaaatctcggcagaccaaagctccacacactcagggtctccaatatgtgcgttcccgaagatgacaatgttcccagcagagttactagagatttttctaatatcatatttgacgttggtctttgacggtcgtttatcagaggtacgtctgaagatgtatcttgtaccagagagatacaattgtagctgttccaaaccttttacctctttccagtccaactcatctggttggcaccatagtattctaccgcgagtagcacgacagtatagtaatttcccaatgacacaccaatcgtgtctacctcctaccttagaatctttttttccgcttttccagattctaccttcacttggcaagaagctaaagctttggtcctcctcatccacggcgtaaaccttcttctcctctatcaccacactttggttgatactatgggccatcttcggcgtattaaatataccccaagtttggtaaactggatcgaatacctccgcccagtttgaggaatcagcgtcctctgggcaccctccaaaaacgtagatcttcccgtctatgaggcttgccgatgcggaagcacgagccatcttcatagacgggacgcggtgccatgtctgagaaaaacagttgaggaacaagacatcggaagtgggattgccgtttatgattccaccgattacataacatagatcccccaattcactaccacaaaagaagatgattccggagcctgataggggtgcgatgggaccggcctcagtcgacgactacccgtaaggacgaaccagcgaggggttggatcaggtaagatgcgcaagcagacgaagaaagatggctcagtgcaaccaatcagcgatcgcgtgctgcagagctcaggggatgttacgagagagcggtatttcttggagcgagagataaggctgtttggtccaatctcgagacgcgagccatgcaactcacagccacagaatccggtaatccagaccacgacggagacgcctcattcatcgtcttcttccttttactttgcggtggcacttcgggggcgtaattgtacatcgtcgaatgctctcgcattctcaattcacaacaacacaaatttagagatctctagatccataatcatctgattgattgatcgacctttcttgccataaattcttgattggaatcgagattttgtgaagataggccgattcggacagaaactatatatattttatggtttttactttctcaaattaacaaatattaaaggaaaaggaaagaaacaagtacttgcgcttcactttgtcggttacttgttgtacttgtgtttcactttgatctggagagatttgaaattctctctcctcgtcgcctttcaacaagttccgcggttggttgcaagagcctggactctttgtttctggtttgtgagattgcagaaccatcgatcgagagcttaagaggattttatttttacagtggagaatcagatttcagatgtgggccttattatgtaagcttttttactatgggatatgtcatatgtgtgcctagttaagtagaaaaccgtggccttaggcccatcttgttctacagttataaatgccttaactttgattaagtgtagtaatattatactaggcccaaatattaaatatagtcgacatagttcatttccttatacaatggtctaaggcgaacactcgaccatattcgtttgacctgtacatttccttatacggcattcaaacggtaaatagaaaatcaaaagtgtgtccccaagtagagagatacaattgcagctcttacaatctaacacatcagtctcaaaccatattatgttttctcgcttttaataatttttcctcttatccaaaatgcattttcacttggtaaagagtataagcttttgatcatcctcgtccatgatccaccatgtaaacctttgtttcctctatcaccacattttggtgggtattgtggtatatctacgtcataaagttaccccaagtttgagtctttggatcaaaaacctcttatgaaataaataaatatttttaaagatatatttataaataatcgacataatttctttccacttaaaaaacacaaaactagatttaaaagaatgaaaaacaagaactagattgcgttaactaagagccaatagttcaaatgtaaaatatctcatgcaaagtcagagatcgatggtttataaaaaaaaaattgtcccggtttgagaagatgtacagacctagacgcagaacattttagttattagaaaacaaattagattatacttcagttttaaaagtgaaagacaaaaaagaagattagatttgttttattgagtaaaaagtaaaaactagtaaaaaggatcaattaattcttaagcgttacgttggctattcattttattaatatggcgtcgcattggcgaatgcattctcacataaaagttaagaaaaagcaacaaaatcgcaccgttgagaaccgagtttaaaccccacgcgccaatcccattgcatccacctttaaagaggtgcatcgtaagaaccccagcgtgagacacgagattacagcccacgagaaccaactgacaattcaccacaaacgaagggaaagccgaaccgggtaaaccaaacccggtccagaatctataaccgtaaaccaccgagtaaaccagagtcgtcgatagaatcgctagaatctggtacgactgcgagaattctagccagaggaaagacgtgaaggccatgacggagttacaaaagagctgagacacggcgagcctccggctacgtaaaacggcgaaaatcgtacggaacatgtggagaaagcgcgtgaggtaaaacacgtatgaccaaaagaagacacgaccagagggacgagtcccgagagggaaacagagaagccattggagaggagtggcggttttgctccgccgccataaccaccgtgtgtcacggatctctgcggcagcggagaggaggattccggcgaaaatggtggcggagaggatcgacatgagaaggctgtggatttcggggatgtgacctaaaggaacggaacggttacttcggcgtacggcggagaggaggatgtggagggaggatgagacggcgatatagagggagattgatgtgaagaggaaagaccacgtggagccccatgattggctgttactccaacggaatccgacgatgtatggatgttcggagaggaagtaggtaatagagttaatcagagccgttgacatagtttgaatttgatcgtacggtggtggtgatcacagtgactcttcttcttcctctgttcctctagtcctgtcttttatatgtgtgcgtgcgactttttcgcaaagtgaatctctgtttctgctcttattttttttgttgggatatttaatttccattttccaataattgttgtagaacatacagtaggtcactaaatggccggtcttgtcatgaaagcaaaatgatgtggaccaatattaattgtcacatttacgtgacaaatttaatttggctacataaatgaatattgtaaaacggttatgaaaatttttaagatttatggtcttaatggggttttactgttattgtcgaaaatcgaaatagcaaaccatatttgaaatatcttcaaaaagatcagaaaacttggtacgcgtcaagttgaccattaccataatcgaaaagcaggtgggaaaaccaaagaacctctagacacgaaagagagtttggtgttgagaaattcagacaagcgtcaatttacagatgccttcatggttaagttttaagttttactcaaggagctacagatgagaaagagtgcattacgtaaaacaaaatgcaaatattggaatatggatcgggcgatcgttacgaagatgaatctacatcagtaatcagtaacgagttagtattaaattactatttcacacaatttgatgaccagctaagacagaagatatttgatacgtatcaaataaaattagtagaaatcaaattgtcctaatcgttatattggcaataagcgttatagtaccacgtgagtaaacaaaaatattagatacgtaccaaacaaatgcggcaggaacagtgtaatatatctctttttcactatgaggaatttggttttgtccacttgatagtattttccacaagtgactcttttctttagtctcattttccagaagtgattcttgacctaccaaactaagtattttatttacacggtcgtagttgatttctcgtgaattaattaaaaggagacttggacggtgaacttacaacgactactcccacgcataacatgttctatcaatcatttatgtaagcccgccgaaacaatcattaagcatatgttatacttgtttaatttataaactaaaaatcatttaagttaaaactaaaactaatttcggaattggcttcaactaagatttaggcctcaaatgacaaggttttgttgagtttttggtatagataacatgtttaaagtaatgatatctcatatgcatatgcatggaagtattgtaacatttaacattcagaaagtcagacttgaaatttataaatctacatcacaatcgattcttttatctactcttccaaattacataagccgcactaatagaactttttttttttttttttgtctttttcctattttcctagaaagattatgaaatattcaaaaattatagtttgacacaattttgggggtcaatatatctttctcaggttagtaggacaacgagacaccaatgatcaattctgtagagatccaagaatcttgggaacagcacctgaaggcttgggattaaacagctttttcagctcatcatacctcccaacatcaaaatcctcagattgcatcagtttcctttgtttagcctcaaacctgctttggtaaaaaccttgaaaggaaggctctctcgatgtcttgaggaaaaatgtgtaacccgccatgaaatataccgatgagacatagaaacagatcggttccataacatcccatgtcaggtcccaaaacgttagcctcataaaccctgcggtttggatgatcaagtaacccaaaccagcccaaagctctcttctcaccaaagaatgtgctttttggtcaatgaccgtctttatagcttcaagctcatttagctcctttcttcttgggtcattcgggttatggatttgtgataaaggaagaagcccctctatggatttggttaactgatcaacacacaagaccttatcagagaattgcatagacaaaaaagaattcaaatggtaaaaaaaagcaaagaggaggaagaagttacctgatgaggtcttaaacaaacagagtttcccataacgataacgtttcctgaatcatcaagcatcttagcgatcaaagctccttgagaaggatccaaagaagaatcactacaaacacctaagaaatctgagtaacgaatccagatttttcctgtctccatcagcttcgttttaataacttcgatctctgctgctcttagcaacttcttcacgtcttgcacagtaagccctaacgtctcctccttcggatgagaaagtccgtctaatcgaatccgatccttgttcatatccatttctttaagcttctccatcagactctccccaatagacatcttcgaagtcgtatcaatcccattcatggagaatttattcaaaaacctctgagaaatcgtcaaatctccaggctctggatcaatcgtggcttctcctatatctttaggaaccctagttcgcatggctaacgaagaagaagacgaagtacgacagttcatgagactttgcgacgccgtttttgacatattgaacaaacggttcgacaaaagcttcttcatcatcaccatgacgaacagaacaaaaaaaaaatacgaaaaatcgaaatcccagaaaggaagagaagaaaatgaattcgatttcagttactacttgaaaaaatgaaacagcaagagcgagctttatataggtaaccaaagttctctgttacagttttaattttacgtttaacataaatcttgtggggccttatacacgtcagcagatatatcacgagaaattcaataaacgctgccttttcgtgaatattgataggtgactaccgtccacgtggatagatttatgttggtgatagctttcgatgcctcaataaccgtccgattaaattttaaaaagatataatatcttgataacttatttgactatgagtaaattacacaacagaattaaaaagaaaggcaaaaacgtgtcgccacattttctgttttatcttgttattatctcttgcatctagtagtaaatggtaatgttgaagagatgattttttgagatgtaataatgtctatataaggaaaacttagtaaatatttgaaacaatgacgtgttgccacatttttcgtttttatcctttgcacacctaataaagagataacaaatgtgatgtaatgtggatgtaactactgtgtctggttaggtaattcagtaaatttaaacacacggacgtgtcgccacattttctgttttatctacaaatttgtttttcaaaatagcatcaccggataaacatgttgaaaaaataaataataaaattaatgataaacacgtagaattaaaatataattttctctataatttataaacacgtagaattaaaatgataaacctgatatttacgtttaaatccaaatacatgttatcttggttgtactgctgattcaaatttgatggtgatggagataataaaaatttagtgtgtgtttaaatcaagatcatgtaaaccctgtttaaatatgccttgctatgtcaacaaacttattttatactacatagttccgactcaacgattatctcggtctaattaagacatgagacatcacataaaccattttggtacatctaattttcacgtacgttagaatattttttataatgtgatattcttattagacgaatctatgcacatcagcacatggcatatatgaataggaaatgaactgaaaacatagattcacaaaaaaaaaaaaatgaaagatattattaagaaagtgagaataaaaatcctaaatttttcacgctacctgtaccaacaccacaagacacggatattccgaaaagaacggaagccattacacattgattatacaccataaaattttattacttatatgagtaaaaaattgattttaaataaataaataaaacggcaagttgtgtacggagcaaatgtagcaaatcctatgcagaagtcgatcgtacaacaagattgagatcgaatatcgcattgattccaataagagagttggtgaatcgatgtatatggttttaggttggtggcatattttattcaactgaagttgccattttttgatgattctcgaagattatagacttaagacttaattagaagttataatcatagtcagttccaaaaaaaaaaaaatatatatatatatatatatatatatcagatttcgaactaacagtagtttgctattcaataagtgattttcacgatgaaaaagccataaaataaaaataaaaattgttggtgccagctagaataagacttcgaataagcagaataaaatggtactaagcagaattaaatgggctttttggaactctgtttttggattgggctttttaatttgggaaccaacaaatgagattggcccattcaagaaacatatagtaataattattaatgtattgtattcgcctcggtccatcttaaactctgtatgctccgttgacttgattggttttacgccccaaaacaacgccgtacctttggataactaatctgaacaccaataaggcaagaactagcgaatctatcagatccaaccagagttcctgtcctaaaacacattgttcatcattacaaatacgagccaaaagaacagagagtttaatactcaaaaagactgaaaccaaccagggactctattacagacacatgaacctcttcatatttcatccattactatccaaattttttagtacatgaaaacatagagatgattacaccaacaaactctagagaacctgtccgagatttctacaattccaatctaataatgattcccgacaaaaggaatcgaacacaaatcagttctgtctataggcaatgtaattagccaaagccaacaaaggagcaaccttatcagaatcaaaccctaaaagctgatcacgagcctctctattcaatttctcagcaaactctctcgatttctccaaacccataatcttaggatacgtcaacttatcagcaatcaaatctttcccagcagttttccctaactctttcgacgatttcgtcacatccaagatatcatcaaccacctgaaacaacaaaccaatacatctcgcaaactttcttaacctctcaatctcatcatcacttcctccaccaacaatagctcccaaaacagcagaagcttcaagcaacgccgccgttttatgcaaatggataaactccaaatgctctaaaccgacgtcgtttaaatctaacccttcactactaatatccacgacttgacccgccactaacccttctgttcctatcgctttagccaattctccaacggctcgaaccactctcaccggagaaacaacatcagaactcgtcgccgaagctaaatgctcgaaagcgaaagagagaagcgcgtctccggctaaaacagcgacgtcttcaccaaacactttgtggttggtcggttttccacggcggagatcgtcgttatccatacaagggagatcgtcgtggatcaacgacatggtgtgaatcatctcgacggcgcaagctgctggcatagcggttgattcttcacctccgacgagttcacaagcagcgatgcagagaactggtctaactcttttgccaccggcgagaagagagtaacgcatcgcttcgtggatcttgagtggctcacggagaggaacagctgaatctaaagctttgttgactaattcggctttggtgatgatgtacgacatgaaatcgaaagaggatggttcagattggcgtagattgtcttcttttgtaacaacggaagaagaaacgattgaagaagatgatgaaacggtgcgttttgatcgaaaggagatgggtttagtaagagttataggacaagatctggatctggatttggtaaggattgaagatggatgatgatgattgtggtggtgaacaacaatccatgaacctagagtcactgaagccatggcgatttctgaaatctgaaattttagatttgagaattttttatattagtatttatttttttttgttttttttggaaagtggagtcaaaattatgaatggagaattggattggccattagtgagaagctaggaagtaacagatagggttgtgttacggaatgggccttgttagtggtggagatgacgatcttcacttttattgaaaagcatcttttttcttttttcactgtttttgttttattgtttttaagtccatggaaaatgtttttatagcataaagatgatatttttctggcttagattacagataaattacttgtcagttttttagatttttttctttttattttcaattctataccacaaatatatactattgttgttttggtaaaatatcaaaatcttaaacacataaatctcatctgttatttttttctataccacacattgaatttagatgattacgtagtgattaatgattatcttgttttgtagatttgttacacgaaattagtaaaaatggcataaaaaatgcatacgggtcacaagtcccacttgtggacattttacacgagctcgttgatctctgacaactgcttggttttaacttattaaaagcgcgcaaactaccaaatttattgttggaagatagatataactgaaatgggcctaacgggctttaatgggccaagctggaactcaacaaacaggtacgagatttttgaattattctgattcagcgtcgagaaaaaagctacgattgtgtgtttattattattgcaaccatttctctgctgtttcttcgtcgtttagcttcagaggacgacaatccggtaggcgagagagagagattaatcaatcggcgacctttttaattcgctcgtaattcgttttgattttcgtgtttttgcaacgaatttaacaacttgtaagcttcttcttcttcttccttcattctctttgtttgattgtcttggtgtttaactttcgatgtttcgacctagtcgttgttttgagatttctgattctacttatgtggaaggaaagtcttcgatctttgaacctgttaaagtagattagcttgtcttgtaataacgcgttttcatttctgagattttggttatagctttgttttagggatcttatgatttgggattcaattattgtgtgaaagtctaataagctatgttaccaagattaatataaaagtgggcatatgagtttagttgcagttgtgatttgatatatcgaaaggatcgattttttaaggtcttctttgatctgtcatagaattaatcattcattctttgatttgtcacagctgtgtgtgtgggtgtgagtttcttaagagaagtcagaaacaatgattgggttgtttaaagtaaaggaaaagcaaagagaacaagctcaaaatgctactagaggaggagcttctgttaagaagcaatctgctggcgaacttcgtcttcacaaaggtatataaatgccttgttgatcttttttttgttcttgcatctccaagtttcaatttttggtgttttttccgattttgaactgtgcagatatatcagagttgaaccttcctagctcttgttcaatatcttttccaaatggcaaagatgatttgatgaactttgaagtatccattaaacctgatgatggatattaccagttaagtagtgctttttttcccactgaaacctgcgtttttgtctcttaaaaactttttggaaacttatttgtttctttcttaccaaataaacagcaatggtacgtttgtttcacattccaagtctctcctgtgtatccacatgaagctccaaaagttaaatgcaaaaccaaggtaggcctctcctccttttacatgccttatatagtttacagcttctacttcaaaatcgtttgtgttgtagaaactctttgttggttttcttgtttaggtttatcatcccaatatcgatttggaaggaaacgtttgcctgaacatcttgcgtgaagattggaaacctgttcttaacattaacacagttatctacggactcttccatctgttcacggtaattaaccggacagttcgatcaaacaaaggtttttgtgttatttggtttctgaactgagtgattgtttttcacacaggaacccaattctgaagatcccttgaaccatgatgctgcagcagttttgagggataacccaaagctctttgagaccaatgttcgcagggccatgaccggtggatatgtcggtcagacctttttcccgcgttgtatctaacaaagctctggtttgtcttcttcaaggaaaaagataagaaccaaaccctttgtccgccattgtatttcttctctttctcaaggaccctcgtttgtttgtttgatcttgtaaaattacattccgcgttaaagtaaccctttccttatatcgaaatcttgtcaactttaagttcgtgagaattcgataaaggagactaaaaggaattgtataacatgtttgatctttgtcatttcttgggttccttataaatcatttgtttaaatttcattcgaaatactgtttgaaatatagccttcataactggatttttttttgtttggttcgggtttgctaaaacaatattcttgtttcaggtttagattaaaatataaatcacatctatcctattcgatttccattttgatatctagaaaataatcgatttcattcaacgtttgattcatatttttgtacacacgttttgatttattcggttttaaaaaaagcttcaattctgttttaaaaagtcttgctatggcctaaggaataatatgaaaaaacaaatgtttacaatccctaacgactaatgctagatccaaattcctgtctttaatcattatatcaatttagtattttgattaaagaaaaataattttaaaagtccgaaaagacacaaactcaaaattttaaaactatttttgaaaaaacaaatgaaaacctagaatgattaataatagaaaaaacaagttgaaatatttacaatcgctaactactaaggttggatccaaaatccggttagttttcacataattatgtaaattttgtaaaatattatgtaaatttagtatccgaagaaatatatttattttttttctgaaaaaacaaaacaataaaaaagctttcacaaattagaaagaaaaaaattaataatttaaaagatatttttaaaaaatccgtaaaaactgaatattaattctacataataatgggaaaaataagttaaatggttggaatctctaacgactgaaactatatccaaaatttggttagatttcttatcattatatattttatttttaaaaacaaatacaagtttgaaaaaatttataaaattccaaagaaacaaaaataagttaaatggttggaatctctaacgactgaaactatatccaaaatttggttagatttcttatcattatatattttatttttaaaaacaaatacaagtttgaaaatttttataaaattccaaagaaacaaaaacacaattttacaaaacctgaattaaaaacttgaattctaaatttagataacaataagaaaaacaagttaaatgtttggaatctctaacgactgaagttgtatccaaaattccgttagatttcttatcattataaaaattttgaatccaatatttttaaacaaatacaagtgaaaaaacttataaaattccgaatagaaacaaaaatacaatttaaaaaatctgaattaaaaacttgaattctaaatttagataataataggaaaaacaagttgaatgtttggaatcactaacgactaaagctggatccaaaatccggttagatttcatatcattatataaatttagaatccaaataaatatttttattttaaaaaacaaagcttctaaaaatccgaatatagactaaataaatttttaacaactatgtttaaaaatccgattaaaattttgaatgataaatctaaataataataagaaaaacaagttgaatatttggaatcactaacgaccaaagctggatccaaaatccggttagatttcttatcattatgtaaattttgaatccaaacaaatacttttaaaaaaaatcaaacacaagaggaaaaagctttttatatcataatagcaaaataaaagttttaaaaattattttttaaaaatccgaattaaaaatttgaatgataaatctacataatagctggatccaaaatccggttacatttcctatcattatgtaaactttgaatccaaatttatatttgtatatattattttaaaaacaaatacaagtgtaaaaagcttataaaatccgaataaaaacaatatcacaattttaaagctattaaaaattaataaagggatagaaattgacctgtttcttaatgggtatctgaatgggctttctgttgggctgtttatgagaatccaatccaagacggcaagacccaacgctgttattgatccttatctcccgaaccagagcattgaagatccgacgacgtcctttgatgtcaaagaaaacctccgaagacgaaggagtatgagagaagatatcgagagacgaagggagaataagaatcagaaacatcatcttcttccaccacgctacgaaattcgaagatgaaagagaagcaggaatcgacaaagagaatcactttgtaattttcccgaaagtgatcgtgacctctctcgacatggcgttgttacagttcggcgatgtatatggatcatcaaatttcacggtcacgagcgatcaacgattctatttgtaaaaccgtcacagagaaagagaagaactttttagggtttagaagaagaaaagatgaatgtttataaagagaggttcacgcaaaaaaaagaaacattagattattattttccatttttcatgattggacttgtaagaaaaaaggaaattgatcacgattacgctccgtttacaacggtcttatttttctaaccgcaattacggtcacgtgttccaagtttattcaagtttcaggtttagattcaaaatttcaaatcatatatacatacgttttgatttattcggtttgatcagaacaaaaagcgttttcagctttcaaattcagttggtctcggttaaaagtccacctttgcttcacatagtggttttaaaatcgtttgtggtataaaaagaatcacaacatgactacatgagcaagtctctcagatcatttcagtttctttagagctcgcgattttcgcgttttctcgatctttctggaaaacaaaatgcaacggagtgtaacagagacaacagagcccaaacggaacagccatcattgacagaagcccctttgaaagggcatcagcctcacgaacagaggaacctttcaaaggatcaatacctcttgagtcatacccaaacagtttctctgacaaaattccaaccaaaggcgcagcaaaagatgagaatgacccttcgaaagcacggtcaaacgcgtagatcattgtacggtgccttggaggaacgacttctgcaaacattggtgcattgaccgctgatccgcaccaagttatggtaagacccatcaggaagagagttatcgagaagattgagtagctgcttgtgctttgtgggattactttcagaagaataatagagaatgggattcccatgaatgcactgaactgcgcacacatcactctacccgaattcggatatatccgcgacattttatccgctattatccctcccattaatgttcctatcgctcctcctgtagcaaataccccaagcaaagctgcagtctggttatgatcgaagcctaaaacaaacaaaaaaaaagactgtttacactcaagatctcagttcttgacaaacaatggatgttcaaagtgttttttgtaggaaatgccgtttaccaataagctcaaaccacattgtaaagaaaaccatcgcggtccacggaaacgaaccaatgattccttgcgcgacgattatctgaaaggtacttactttgacgacagattttgcagctgctaatgaatcattccaaaccgagttcgaattcatcttatgagccattagttcctctctacaattacaatcagaaaacctcatcaaactttggtcttactcttaaaattcagggtacaattcttgagtgttttgtttaccgttcaatgttctttctcgggtcaacaacgaagagaaagacaagtaatccgatcactgcgctgagcgctgccatcattataaaagcacaacgccatcccggtatgccccaaaactctgaaccagccataacagttgctacaacacctcctcctataccaccgattgtaccaatgaggttcaacattccgaaaccagctcctctcgcaccatccttataactatctgcaataaacgattgaagcgcgggtataacaattgccaatccaaaaccattcactgctctccataaagcaacctatatcacaagaccattcaaaaacttataacttcaaaatcaaagtccttaaagaaacagatcaaaaagtacctgaatgaagtagctgctggctccaactgcagcagttgataaagcccaacagaaagtacctattgcaagaacaatgggacgatcataggtaatgacaagaactcctgctaatggtgatgcaagtccttgaacaaagtttctaacgaatgttaagtagcctaaatctgatggtcctgcgttaaatgcttcactcacttctttataaaccgaaggcaatagattctcgtctgcacgttccatgatcgcagctaagtttataagaatcaatgatatcgaaacccccaaaaacgttcctgttctgttcaaaaacagaataaacaaaagaaagttttgagttttgtaagattcagaaccagagacaatgaaacggttaaccatttttttatgattactactaaattcaaagataaagtaatcgattaaacagatccacgagccaatcttagaaccctaaaaagtttgaacagattctgattcgaatcaaataaaacccaaaaggagaaaagtcaaaaaggagctaactttatcttcatgctgttagtacggtgatggcgagggaacagagacctgaagaatttaaaagcgacggagatgataccggtacgagttcgagcatgacccatcaaaatccaaaacttgaactcccgagtaaccggagccggagtttggttgctttctataaatatcggatctaaagttccgacacgaatagttttctcgtacgatttaacaaccgccgaatttaatattaattacagtaacatgttggatattctttttgttactgacgtcatatttctttggatgattctttctggataagtcatgaagtggccattaagccatttaattatgtagattaacgtatttattggatttaaaaagatcattaagcacgtaacgtagcttgtttggtggatcgttacatggtaagtgtcgggaacgtgattacatttatctttattcatttttgggatgtgaatggattggtaacgtataatttaagttatatgttaatcttggtaattttcaatttagagctgaaaattattgttagaaataacattattagaaaagtcttcttctttagctcctccatgttaccaggaggaaaatatcagaaatattgctgagtctgaaattaagggcccatgggcctcggacacatatactagacaaatcatgtttcattcaatttaataacgaagtgcccaaattcgttaatattaatgccgagatcttcggctgtctgacaattttcataatgtctacatgcagaatgagctagtgatacaataatattgtgattataagaaatatgtaatgtaatgtagcaaacaaatcgaaacgtttacaaaagcacatataatttttctttttaaaacgcaatactaaccaatattgaccgatgcattgaacaatagtgagaatagttggattatgacttaaatggacgccgcacgattaattagaataatcaacaaattaaattaaaagtaagtactaagtaagattaaatgtacgtgaccacgccgtacaaattgaaaatttatgttaaagattcccccacgtgaatgatctgatccaaagtcactctgacagattggattttttttggcgtcaccgattttatttttcattttaaactttagtagtttttggatttgtgactataaatgagaagacgtggtttaataaaataaaataataaacacaattattaggaacttttttttgtttcatttgattgtctgcaataataacaaatgacattttatgaaattacttttattaatttaaggttgtgaaaatttaacaaatatgtaaataggatttgttaaagtactatattaattagttggctaaaaaaataataatggcatgagtccagctgggtgattctgcttcctggctttgctcacgcctaactggaaccgcacgtgctccgaccacaatagccaaattgctgtttgttatcttatttccatcctttttaatattactaaaaaatgttttagctagcttccctaattatgtggatacatttttttaattcacatcaatgaatttgggaaaatcaaataaacatgtaatttttggaataatttgttcgtcattttctaaaatccaatatgaccgttttaaaactctttagatgctatactaggttaaaaattatgttaggaaaatgagatcagtttcgaattacgttttgacaactccaagaaataacatcaaatttggtgtaaagcttttgtgagttgtattaatgcgttacaatatgaaaatgtgcaatatgtcgtcataaaaaacaatgcaaaatcgttagtatatccagtttttatactgattcttaattcttacaacgctttttgtttttgtttttaagatacaaatttaaattaaagaaaatacgaaaaaaaagaagaaggaaagatccgaattcattgaacagtggacgggagggaaacaacggggaagggaccacagctcgtgcgttacataaataggacacgtggaagctgacttccagaaataaatcgatcacacgtgtagaaacagaccacacgtgtggagacaaatgaatatttgaatttatttatacttaatgaatgaaagttacagccaatccgcttcagactcacacacacacccaaaacaaaaaaaaaaacaaaaaaactaaaaagaaagcttcgtctctctctctctatccctcgtgcgccagtctgacaaagacttagagatagattcagagattcagagctcttcaatggccgccggaggaggaggaggaggaggaggatcatcgtcgggacgtactccgacgtggaaagagagagagaacaataagaagagagaaagaagaagaagagccatcactgctaagatttactctggtcttagagctcaaggtaactataagcttcctaagcactgcgataacaacgaggttcttaaagctctctgtctcgaagctggttggatcgtcgaagacgatggcaccacttatcgcaaggtaaaactgaaaattccggatttcaatttttagatcggaatctgagcttctctcaattactcataattcaatcgatgaatctgtgcgattgttgtgttttaattcaatcgaattgttagagactcttgagatcttgcgatttggatttcacttttcactgttcgattgggttgaattttcaatttccccctatttggattgaaatctggtcttcgtagtgattagaactgattatgaattcgatggtttctgctttggatcatctaattctatagatcatgtaagtttgattattgagaaattttggggaaatctcttttgcttcttgagtcttgactaaaacattgactttgacggttgcatcatcatgtggttttgatttagtctagtcttggtcactaaaatggttgattcttgtggaaacaggggtttagccaccagcatcagatatttcaggaactcctacaaacttcagcacaaattcatcaatccaaccaagtccacaatcatcagcttttccaagtcctgcaccttcgtaccacggaagtccagtctcatcatccttcccgagtccatctcgctatgacggaaacccttcttcataccttcttcttccgttcctacacaacatcgcttcttcgattcctgctaaccttccacctcttagaatatccaacagtgcgcctgtgactcctccgttgtcatctcctacttctcgtggttcgaagcggaaacttacttcagagcaattaccaaatggcgggtctttacacgttttgagacatccgcttttcgctatctctgctccatctagactcgtcgtgctggtcaccaaacgccacctacaataccggaatgtgatgagtccgaggaggattcgatcgaggattcaggaaggtggatcaatttccaatctactgctcctacttcaccaacatttaaccttgttcagcaaacttctatggccattgatatgaaaaggtcagactggggaatgtccggaatgaatgggagaggggcagagtttgagtttgagaatggaacagttaagccgtgggaaggcgaaatgattcatgaagttggcgtagaagatctcgaactcactctcggtggcactaaagccagatgctgaaaaaccggtaaatcgaaacatgaaatcagtttgaaaatggtggtaaaagatcagatcagtctccttgtggaccataacagagaaaatcttcagcattgtacagtacattggagccggagctcgcatggtcgaggaaggtcgaaaagggtcgaaccttaaacataccgttacattctccgtttatacttaatttatcactgtgatgatgataatgttcttagagatatataatatcttaattgatcacaggaaaaaatcggtttgtaaagagttaatatctttgcggatgtagtaatatgatatccacttagctttccatagaccagagtttaattttagtttggtttcttaattattgtgattagtttaagagtttgttgtgttgagttaggtgatataaaaaggaaacctccacgagcggggaggataatggacccccaccatgtggcctgtcttttttgttcacttttgttgggacctaaacaacaacaacttcttccaaccatttgcaaattgttttctaattttctttctttttatactattgttgatactattattgttatctccgcatgtcgtagttaaattctcatttgtcgtaattcacggcacaagacaatattttcattgcccatttgatgagggaactatgagatgacccacgttgggtccacgtgataggtgagagtggtgagttgcttcttttcatatagctatttagtttggattcgttttcattttaaaatacatatatataactagtaagtttcaacaagtcacatgatcgcattttgtagctttgtccaaaacaaggtaaaacaaacaaacacatcttaattcatgtttctatcattctatgcgtggctcatctcatccaaacatcattgtaacacgcaaaacaaacgacggctcaaacacaactactatatgttaggtctttgtacaacgttacattagtgaacaaaaaaacatcttaccacttattactagtatttaatcatattacagttcaattaatgtatttgaatgtttagtttggggtttaactaatggtaaatatgttactatatccactccgttataatgatttattgctgtgagatgttcgtccatttcgataactgcaatcttaataatctcgtaattcttctctatatattcaaccccaactgcgtccaatcaccaaacacattctcattccaccaattaaagaaagcatatcactaaaaaaactctgaggaccatggaacttcacggagctctagtggctagtccgggcatgggacatgccgtacccatcttagaactcggtaaacatctcctgaaccaccacgggttcgaccgtgtcactgtcttcctagtcacagacgatgtctcacgttcgaaatccctaattggaaaaacgttgatggaagaagatccaaaatttgtgatcaggtttattccactcgatgtttcgggtcaagatctgagtggttcactattgactaaactagcagagatgatgaggaaggcattaccagagatcaagtcttcagtcatggagttagaaccgcggcctagggttttcgtagttgacttgttgggcacggaagctttagaggtggctaaggagcttgggatcatgagaaaacatgttctggttactaccagtgcttggtttctagcttttacggtttatatggcgagtcttgacaaacaggagttgtataagcagttgagtagcataggagcattgcttatacccggatgcagcccggttaagtttgagcgggctcaagatccgagaaaatatattcgggaactcgctgagtctcagcgtattggggatgaggtgataaccgcagatggggtgtttgtgaatacgtggcacagtctggagcaagtgaccatcgggtctttcttggatccagagaatctcggtcgggttatgagaggagtgccggtttatcctgttggaccgctggttagaccagcagaaccaggtttgaaacatggcgtgctggactggcttgacttacaacccaaagagtcagtggtttatgttcttttgggagtggtgggggcactaaccttcgagcagacaaacgagctggcttacggtttggagctgactggccacagatttgtttgggtagtcagaccaccggctgaagacgacccatcggcatcaatgttcgacaagaccaagaatgagacagaacctctcgatttcttacccaacgggtttctagaccgaaccaaagacatcggtttggtggtccgtacatgggcaccacaagaagagattctggcacacaagtcaacaggagggtttgtgactcactgcggatggaactcagttttggagagtattgtgaatggtgtgccaatggtagcttggccgttgtactcagagcagaagatgaacgcgaggatggtttctggggagctaaagattgcgttgcagattaatgttgcagatgggattgtaaagaaggaggtgatagctgaaatggtgaagagagtgatggatgaagaagaaggaaaagagatgagaaagaatgttaaggaactgaagaagacagcagaagaagctctcaacatgactcacattccatctgcttacttcacctaaaactaattagcaaaaagttgacaatttaataatatcaaaacgataaacataatgttctctttatggttcaacaactgagaatctgctatgaataaagacatgtggtccagaaacatgaactttgaatgcaaaactaaagaaaataatctgtgtatgacttgaatgtttttggtttactagtgagagaagtgaaggagccattgataaacatctatttaagagaaatctgggaggggatcaagcggatacacttacaggttcggtagctttcttgagccattccatttcagtctggttcataaatggggctaagatgtctttgcacttcgaatgatatgtgtttaaccagtcaatctcttcccgtgtcaactcgtctagatcgataagtttcacttgatatggtgcctggagagagagagagatcgagagttactcagatgtgcatgttgatatgagaactacggtattagttaacagacaacgagtaagtacccaagtgatatgctcgaattgcaagtagcccttgtcgccaaaattgaattcagtctcagcgtcattgacaacaagaacattctccaacctaataccaaagttcccgtcttcatagtaaccaggttctgcaaataaatgaatatagacagcttttagaatatgatcaaggttaacccgaacaggagaactaccgagtttttgttgcagacggaccatctgttacagtcatggtagcttgaagaggtacattcctggcactcggtctgaaactaacttggtgaggtcctacatattaaaccatacataatcatcgcagaaagttagttgatgacatctagaatttcaaaaacattattatcaatgactcgatatttataagaaagagagaataaaaagaggtatctcataacttgccttcatgaacacaaaggtaagaaccaactccatgaccagtaccatgtcgataatccaacccatacttccacaaaggagctcgagcaagaatatcaagtgtatagcctgtaaattcagatatagccaatgcaacatataaaagatcaatagccaaatctcaagttggtacagaaacaaaattcaaggagatcataacttaccgtttgttccctttggaaaccgagcatttcctagtgcaacatgacccttgaagacctaaggatgcggcacattgaacatatatcagcaaatatgcttattccaaataaataagaatgtaatattcaaaaggttatcatcaataagtacataccgcagtatagcattccttttcatgagctgaaggttttccaaagtgaaccgttcgggttatatcagttgttccatcgagatactttgcagaaagacaacaacaacgaaattgtattatagagcaaagactttgataaatacaaggtaagcttatagtatacactcaatcatgtgatatttacctgtgctcctgaatcacataagtaaattttgtcggggtccatctcggcacaagcttctggctctggtgaataatgaataacagcagcgtttgaaccaaccgatgatatagtaggaaagcttaaacctctaaaatgctgcaaccacacgagaaatgtgattcatctctttcatggaaagacaaaagtttaatatgttatatgtaaacattacctcttttgaagctcgaagactttccagcttatcgctcacagtcacttcagtaagcttagaggtttctctgtattgttttgttttttgcagaagaaaaactcattgcgtcatgaatcatggaaaaatggtttgcaaaatcgggaaaaacaaaacaaagaagaaagaagaagcttacgatggtttctttttgcttgcctctgcttccaagaagtatccagatgctccatagagctcctgcatctatggtttcacaatgttgagtgacataatcaatcatcaatatagtagtagtgttcaagaaacaaaattttcatttattcagtacctgattgtcgagccaaacaaggtactggacaacagcagcaccatcacgaacatgtgcattcttgatcccttcgagctcaaccgggttctaacataagtgagaataagcatgtatgaataaactaaaacacgtcgaaagagatcactcgtttcaaaaatcattctttattaccttcaaggcttttgagagggatataggggatggttgcagaaggaccttctcagcatccaatttggagtaaagtgcatagcagcacgaagcaggatccacccataaccgatcaggctggtcagaatcaatctccatatcctttgcagcctcatgttggacagttttagaggcaaatgaagaaataagtcgatccgaagcaagcaaggccacatctgagatcacatctgtgtattcccggacttccacaccgagcccattgaaataagagtttgcctcatcagacactttctttttgtcaacatagagaaacgcagagtcggtggtaaggattgcaaacgcatgaacaacgggacaataagcaacatcagttccacggatattatatagccaagcaacctgcatcaaacccccaatcaaaatacattccaaagctgaactgagaaaaagagagatctttttactacgaaaacacacctcatcaagagcagcgatgaccaaaccacgagcaccctcttgcttaagctttgccctcaaatcttcgaatttatgggaaacagaacggccagcaaactccaaaggatgaacaacaaccggactcatctcagaaggtggacgactcttccaaacttcatccacaagatcagtagttgtggtgattagtttctgattcttcttggcaaacgatttcccccatctattcgcagtgtctaccgagacacaccatgaatcaacacctatatttgcctcttcaggtagattctacattgttaaaccataagctaaatcaaagaacacatctcaaagttacaaaatttatggattgatcaaaagattagttgaggactaacatcagacatccaaacttcaacaagaggatcttctcccatccgcattagtgtccactcatcgctaagctgttgcaatgcttgcaagaagtatcgaccatctgtccaaagtcttgcttccttcttcgtgataagtgccaaacctatatatttataatcgccgatcaaattcaattcactctcgatcaacgattcaattctaacaatatttgaatccagaacaatagaaaatagaaacagacctgcacttccactgaatccagacacgaactcacggcgtttgtctcgtgcagaaacatactcgctctacatacaatttaaaaatcgaaactttcactcaaatcaatgaacaatacatgattaagtaatagtagacgtataatcaagtaatctgagatcggatcatgaatcaaaaaagggtaattcaattgaaaataaatcaaacctggtgatagtcttcggaaggaacaaccaaagcatcaagaggaggagagtgagaggccattagtgacctcaacgaagagagaatctcgggacatggcgatgtttggagttcagagaagaatttgactgcttcaaggacgaacagaacacagatgcagcagcagatagatataaaaaagtacagatatcacagttttatgttagtaaactttacgtgttccaaggaatcctaatggctgacgcaactaattatttttttttcctacactttaacgatttgtgaaattataagtttttgataaaatatccaatcaacaactccaatgaaagaacacgtaatgaaattttgtttttattttacaacaaggaataaataagagacaaataatataaagaaacatgtacacactaaccattaatggcgaaactgaaaacactcataaagaaaagaaagaaatttcgatggaattgagaaaagaaaggaagatttttttttttatgattatttagcaggaggaggaattgaatgaaaagagacaaatagaggaagcaatttttgtttttgttttaaggttgagcaagtcttttgactattgcagccatgtagtttccttgatgttcagcaagagccaattctgtttctgttgcttctcttgacccatcaccagcgaacacacctgctccataaggagagcctccacgtatcgagtccatcttgaacattccagctccaaatgtgtagcctattggtacaaatagcatcccatggtgcacaagctgtgtgattgctgtccatctgcaacagaacacacacgagatggaaatcagcaagtgtttctgagctttaatgtggaaacgatggcaataaaaatatccacattgcacacttggagaaatacgcaaaagctttaagattccgcattgttatgcttctctatattcgcaaactatcacagcaaccgagtgaatcagctgaagtaaaacagacaaatatctaagtgcaaatgatgactaaagagagtccacatacattgaggaatctatctcagagcttaaacacatgcaaattatcggaggcaacactcatgcctatagaattggtactttgggtgatgagaaagtgagaatctaaaataatccagttttacatgttctaaagatctccccttactagagctaacataagcgtagcataagtgcaagcctatcgtaccaaaagagagaccagggtactattcaatggtgaccagattggacttgaaatggtcaatggtgtagttaagaaagcaattaaagatcaagcaagcaattcaccagaatgatagccatctctgacaagtttcctctaaagtactagacaaagtcctgaccacaacaacctttcaggttttagcaaccacctatatacatcaaattcaaggttgcatttatttcacatagtgactctgtgattatagcaattcaatacttgtactccaaattcaactaatatactttagaaccaatgcaaatggtactaaagagtataagaaagaagcaaaagcttacgcagtggtctcttggccacctccttgagtgccagtgctcacaaagaatccagcaggcttaccagcaagactctgctccttccacaatgatcccgtcgaatcaaaaaacgccttcatctgcgcagccatacaaccatacctagtcggaaatccaaacagaaatccatcagccgccgtcaattccgccgccgtaatctccggaatctccaaatccttaaccggcgccttcatctgctcaacaacctcctgcgaaagcgtctccggaactctgtacaacgtcgcctccactccttcgacgctatccactccctttttcatcctcttcgctaagctctccacatgtccgtacatcgaatagaacacgacgaagatcttgagcggtgacgagatcttagcagccgtagtagtaatcgctggtgttgttgttcctccagtattcgtcgccgttgttcgatcgccgtcaatggtggtttgatcatcgtcaatttggatcggagcattagtagcgtcgttatcatcatcgattccgggaccatcgccggtggtggccggcttcttcttcttgctcggaacacaacctcctcctttccccatcgagaatattctctcccaaattttccgtcaacgataaagttggattaatttaaaatttaaataaatgaaaacaatcacttgaaacaactttagttgtatttttaatcaccactctaatttcgtgattaaaaatggggttaagtgaagatttaacagctcactttatcacactcaggtctacaaaaacggcgccgtatatgttacggtcaattttgagttgataatttgggcctagtctgttggtttcatacaaggagtccaacgtctgaccttcgatcacttaataggctttcattgggccatttatgctatgagaaaaaacccaaaatataactgagctcattcatattgggcctatcaataagggatccccgatcaatataatggcaacaagtaactgattagtgattaaaatcaaaatttattacaaaaattgtaatgtataacgttattaatattccgttttgatatcacattatattagggttaacaaaatgactaaagttgtgaatgatatatgtaatcgctccgtaataatatgtacatagagaaaattgttttgacattatttataaattattagcctctaactataatatgatgagggtgactcatcaaatttatcttgtaaaagttttctcattttttactactttttaacgatccagaatctaaatttgataaagagagaatcgtttttactttttatgcatgagtgtatatagtacaggtatataagtagtattataattaattgatgtatatgatgattgctttcttagtggctaacccgatggtgtcttttgacttgttcgaaagcgtactaatttaaatctctagcgtagtcaaattaacctaatatcctcctacctacgatctagagaaaaggagttgcatgaaaattatcaatcataatgttacaattagaagaaaagcgaagcatatctttggagaataatagttaatagttaaaccaaaagtcaaatttcaactattggttataagtaattgaaatttcaaacgctactggtagattaatgttaaagaagaagtactttaaaatgttgaatcgaacatgctaaaaatttggtatttattatactgtggttagttagagctaatgtagatcttatctgattggttaatgtctggaaaaggaaatataattttatatcaaccgataaattaatgtatgtatacttcgattgattaaaaacattattagttaaataataccatatgcttctatgttgtgccaggtactagtttggaccaccatgaaaataatacaagatcgcgcttaaagctgcaagaaccaaaatagaaagaatattgtaaacttagagcaataaattaagactaattaagagaattttcttttgaaaatatgttaaaaactcaaaccccacgaatctaggaccaaacccaagagcaatctagaaaagcctcctcttttatagctgtcatcggtgacgaatcttgtgttcatagcaaattagcaatgccacgtttacgaaaactatttatggaaatttataaacttaaactaaggagctaatgacaagatctgtttagttgcgaaccatgtgcttaaagctctaatcgtgttatgtgatgtagtagaggaaccagagacaggttggacctcgaaagtggcaaagagagacaatatattgtactgtttttatatttatggaaagtttatctaatttttactccacgtgagtgatttttggaccgtccacgttgtgttttgccgttcaatgttttaatcgtaaagattgtggtggtgattagtgtcttaatcgagtaattgagaatctttaattgttattttaaacaactaaagattaaggcttagctgttttaagatatcatgcctattaatccactacagaaggatccatggaattctattggatttttaaaccaacgaattccaacaattaactattataaatatagaaatgatcttttatgtgaatgcacactatatagtgagtttttatttaaattaagtacaaaaaatttacatgtatatatatagatatatattatcagacaataaaatacaatatcagcattttttaaaacgaaaaaaaaaactagcaccatatatcatatatttagtattctatttaaaattatgcaaaatatttctgaaattcattggtctgtagatgtgcatggcctttttggcttcaacaatgatggcgacgcgcgagacggagagaggctgtgtcccaattgttttttcataaaacaacttcagtgttgacccaaaaaggaaaagagaaaaacatttcgagtatgctttattaaagcttttacttttagggtcactagcttctatttgtttattagtgaaattgtgaacagattatttactggtgtcgcaatctcatttattggtaaacgtgattaggtcaattcttttaacttaccaatgcttattagctagctattcattgaaaggaacgtaacccaataagacgtgaaagagcaagctgagtctttctatttgctacaattttctcaattgcatgcatgtttttattcactatgatctcgtacgtagcttcacaaaagaactaacgctaacgatctatatactaactttttttaaaaattgcaatagggccggtaagatatatcagtacgcacctatttttttggttcattaataaaccatatctaataagacgcattcgtcagtttttaagacgcgctaatcatgattgcaaacgctaaaaaaccaaacgatgctcctatgtttttgtcacaccatgataagtattattaccttttctttgtttgaaacttgatagtgttgatcaagacatatgctcatcggtctattcacatacctcattttgcaatcatggaagcaaaaaatatgttcttgcgaacttctggttttgttttttagagtttctatgcaagaaaattcaaaaaatgttaaattggtttgtaactctattgtgttttagcggagccggttcaatatatgagctaatttttaatttgatactgaattttctaatactcaaagtcttaaacattcgattcgttccagacgagatggggtcgaattttcctgttggcatttgatcaagcacaacactactacgtatttcaaatcagtaatagaaaattataaacatgtaacgctcaaattaaggcgaaattcagggaatatatttgatgaaaaaaagattggtatagaattacttttcccaaagtatttacgacagaaaattaaaaatctataaacacagccaatcattgcggagaagcaaaaaataaatgatcgtctatacatacattttgaagggcaccaactcccgatgaatttatttattaagatacgactttccaattaaagtaacgtattggacgagagagcacagtcacaaacatgtaactaatgttgtttgtcgcaatttatttggatgattatctatctaaagtacaatactaaagtctacctaacgtgggggtgcctatggctctaggtcactaaattgcaatacatttgattaataccaatataatgtagtgtaatttgcacataacaaaaaaaaataagataagatatcaatttctttccgtgggtctaagattttgtagccttatatagtacatgcgtatcgtatatctcaaggttttggttatacacatcatatataagttaatgtatagcatttattccaacttaaaagattggttgaagctgaatggactaatagtttttaatttttagacattgcaaaaataaatggtaatctgttttctgttgaaaagtttggattttgtaacgataaaacaaaatgtcatgtaatgcttttgaatgatttaataaggtgttatggtacgataaattcaactacaactaaatcaaataatgtgaataaaacacaaaatactcactaacggagatatacaaatgtgaataaacacgaaataaccactaacgatacacaaaaatctattagacaaaaaaaccaacactgaccatataaattggctttgaagttgaaaaattttctattattatttttgtaaaaaaaaagagatttacttatttttcttcctcactgtgcttatatatgctgataagggtcactgtactttaatcctaaatcctatcgcccctctatgtttagcccttcaaagcttgaacagctaaccaggaaattcaaattaatgcggatctcaatattttctcaaactcgaggttaatagtaatttaccctaaatcctgtctttataggagttaggtcgatgttaatgcttaatactaaaccctagggtcgatggttgtaaagactttacaatacctgtactagcttttacaataaaagttgaaccaatcataacttattttatttatatattcacgcataacccttaaaatcacttacaactttttttccaaatcatgtggatatgttcttaatcatagtaattaataaatgataagtagttacacggtgaatatattgacgtcgatagattacagcaagttctcatacagttagtaatatagatgtctctaatggcttaacaattaagaaaatgtccgatggagatatatatggaaaatggacaaatggtcaagaagcaaaagacaaagagggtccaaaaaatgtggctactgaagattccacgtatccggattcaaattggtttgggaaacatgttgaacctcacatggtccatcgtttcgtctcgtttcctaaataggaaatctctaaagacgtacgtaacgattgctttctaaatttcacaattcaatcccatttatttggtaaagattcaatcaaagtgtgatcttttttgtgacgctaactatttcgtgttttaagcaaaaagctaaacggttctttgtggataagtttttccttctttgggatatgagtaaaaatatctccctaggcctgtctacttattaggttttttctctcaacttttttttttttggatagctgggtaatataataattcattttgatagtattacttttggatgattggcaaattaagtcactcatatattttctcatagaatatgaaatcctgaacataggtcaagaatttacttacatttactagctacatttactttatgtgacattttttgaagaaaatatgtggttgttcgtgttttgtttgattatgcccagattacttagttagtttctataaaaaaaaatattaagataatacaatgaatcaaaattgaaattggttattttcaatagttttgtatgatttgagttgttttatcttaaaccgatttgatatttccaatcaagaaaaaaaaatccaatcaaaaatataaaggaattatggctggtgacggcgacggttatgggagaacaaaaaatctaattggtctgaagaaatgagtcaggtttcatgaactgaagttgaggacacgtgtacgaatacaagaggtggtctacattattaactcgtaataagtcgccacgtggataaccccatgttcttccctggtcacttttccttctctttggcgtggctgtctttttcacctcctgtttttaataattttcacctccgggtaaaaagaaaacacaaaaaagagagagcagcatagatatatttgcaaatagtaattaactaattactatatctaaacagttgcaaatacataacattaatacaactgtcaaaattacttcaaccctaattctcatgatgtgtgttatccaaattaaaataccatcaatccttaataaattagcaatgactcatacataagttccaaaaatagggtattatcacatgccagactttttaggtggtactttcagtatcaatattttggttccaataaggacatgtggattttcttttacaaaattgtttttaaaacactttcttcaacagtacaaaaattgtatattgagaaggtaattggaggaaagagagagatagagatgtaagggtgggattggaagaacatggaaagtagtagagacatggcagtgtttttaaagcagacacaaacacttacgagaagaaagagggagacaaaaggctttggcttccattgtctacttctctatattcttatttaaaccaattttaaaatatttataaaacttatttaacattagaaacgtacgtttggttgtgttttattcgccacgtttcgttgttgtattcctttcatatgactcccatcgtgttcctttgtctcccctttttctctctttacatcatctcatagaaaacaacttttagaaataaaaaaacgtggcacattatattcaataacgaattcaaatccccaattcaacttatgagtacgaaccttgtagtcaccatccacatgattcctctagagaccgtaagattaatcgggttgaagagttaattgtaatttgttttcaatatatatagttgtatgatcaatcacccattctatcgttttattatatggatgcgtttgtgcagtttagaagcatcagtgattcacttttgtataacaatatgtatatatatatatatatagttttgaatttataggatctgattctactgtgaaactttcattgtagatttttgcttaattaatcatgattttgctagctttattctagatttgaatttattagtacacaattgatatatttttcataaaaagactgaccgatgaatgtgatattaagctcaagaaataaataaatgggtctatgggaaccaaaataagatgcacatagctaaaatatccctcacaaaatgataatagcaatattccataaattgaaaaatctagctagatgataactaatccgtaactcttaactccaaaattatacaccgtttatctaataaaagttaaaaagataagcctttaaaagcagacattatccttaagacaaataaacaagtatcttacccagtttaggggttcattggtccaatattttattaaagagtccacatctacaagcaagtatcatcatgaacatgaacttaaacccatttaaggataataactataactaatcaatgatttacttgggagttcgaaggtgtctgctacactccttccaagcctccacccacattaaagtttctatcctctttatctttttttatccccaagaatatcctctgtggcaacaagctactaatttagtcatttatttgctcattggctgcttgacaaaaaaaaaaaaaaaaaaaaaatttgctcattggctacccattttttcctctaatttgcacgttccgtaatagaatatactcattaagatatgcttttcttggatgttcataatgtccatcagtccatgtatatatatcattgaattgatcatttctcaaatccatatggattcttagaaaatataacctcttacaattactcatcaatttataacctatcacacaattctgtcgatattcaacctctacattaattagtatgcgagttaaaaaaaaaaaaaaaaaaaaaaattagtatgcgagtttaataacaagaaattaaaatttatgccttttttttatctaaagtatatatatatatttaatgtttttctatgatttttctttcggtagtaattaacgttatcaactgaaccttaagtctatgataaattctggcttatttttacggcactagctaattttctaacgaataaactaagaaaattaacaattgatctctaactacgaatttagagaagagtctaaaaagtaattaaggggcttgattgggtcgtggaggacattgagaccggtgaatgtcctctccattggacatcacattctcatttaccaaatagtctctgattattggtctcccctccccaattgtcatactactatatagttttctagactcgcaaatcttattaactacgatagattgatttatgtcattttattttggtaatgaaaaattcactttagtgtgttcacgtgccaaagctttcgacttttcatgttcctatcaatgacgtgttgaaagaatacgtctttgtttagtgttgttttgtattacgcatgaaacagtattaaagttggtgacaaagaaatattttcttctcttttaatttcactgtccttttaattaatattcctaagtactaaatcacgtccagtggtaattccgtaatttaaaataacaagaagcccacatcaggaaaatgacatttcataacccaaaaaaaaaaatcatttcttgacacctactctccttataaatcataggtcttcctcttccccaacaacacttctcacatttcataaaaagtgagacaaattaaagacagagagagatccaagaacatgaactacacggtggatgatcagaacatggcttttatctctcaactgtaccctgatgtctacactcagatagtacaaccaggtttgtccttttttgtaattagtttgttcgaaatttcatacctttttatttaaaagttcgacaaaacccaaaattcatggattttcttataaaaatagaagtgggttttgtttttagttttaatttgtccgaagttctttatcccctcacaaattttgtggaagaagttatatataagaattcaagtggattatgttatgtgcatgagtctttaaaagaaaaaaagttctcgactaatacgcataagcctagttaaaatcttggtatcatctacgtgcatgtgaagtgtgaacacacatcaagaacaatctaaactttatttaagatgtttctgcttttggtcagtaggagaagtgaagcagccgaagcggaggaggaagaagaccaaaggatccgtggcttccgcagatggaggcaacggtttgtttagaaagaggaagctgaccgatgaacaagtgaacatgttggagatgagttttggggatgaacacaaacttgagtcggagaggaaagatagacttgcggcagagctagggcttgaccctcgtcaagttgccgtttggtttcagaaccgtcgcgcacggtggaagaacaaaaggctcgaggaagagtacaataaactcaagaactcacatgataacgtcgttgtcgacaagtgccgacttgaatctgaggtatttcttatttttaatgtttcaattacttcttctttttttccatttcatgctctacttttttttttttttttttttcttgctctattctttttttcattatgaatataataaatatgggtagagataatgattacttaagggatatattaaaaaactttttccaatccaaattttaaatctacatagataattaaggaaaatgctatacgtttaacttatgcatgaatcggctattttttcaagctttttcataatagtaattagaattttcgtccgacctttttttttttttttcaccttgttcctacactcaattgcatagtaaaaggtaaacaaattctttagataattattgtttggcataaatgaacgtgagctcaaggctcgaagaaattagaaaattcaataaatgagacagaaagtgaagttgataacaaaaaaaatattgatatcgaacagtataatgccaccttattacacaacatatacacctttatatgttccgtacaatgttcttattttcttaatagtggcttgtcattgtcaatgggctcagttcaacagtaggcccactgactaaaaacaccatttaagtgtaatcagatgcttgcatcggtgatttaagctacgtaatgattaattttacaataattttcctgaacaggttattcagctcaaagaacaactctatgatgcagagagggaaatccaaagattagcagaaagagtagaaggaggctcaagcaacagtccaatttcgtcttccgtttccgtcgaagctaatgaaacgccattttttggagactataaagtcggagatgatggcgatgactatgatcacttgttttatccggtgccggaaaatagttacatcgatgaagcggaatggatgagtctatacatataaattactagcttaatgtaatattatatcaagttagtatcgtgaattagggaagcatatttctaagtaaatttactagattatataactgttgcatttctaatgtacaaatatattgacgatgagtttctcgctaatgtaatttggctatctttatgaaagcaacaatataaaattgcttaagtagttaaaaaaaattagctactttgttgaattaaatttctaagaaaaatatatatgaattcgttaggatttaattataataagtaaactgtaatttggtttcactaacgaaaaaaaaagtgcggccataaaagcagtatcggctgcaagattcgaaaaacctttacttttaaaattgtagaagacaaaggactagatgacatgcacatgaagataagatgagcaaatttgttaaaactttttatctccatggataagagtttgcccgatttatacaaaagagaagttcggataaaatataactaattctggtaaaacattttgagtcaacttttatagatcggttgacaactaatgtgtaagcttatattatggtttatacataatatattcatcacgtaatcattattacttattagtgatctgatcgcataatataaaatgagagtattagtcatcaaaagttaccacgtatcatgcgtttctcaaaatgttagaaaaaacacatcgttttctaatcaacggaaaaatcaaagtgtctttggacaagatcagatgttcttttgattaaaacctcttccagtaattgtaaactgtacaagtgcattttctgaaaatcaaagttttcttggacatgactagagattctttgattagagtcttctggattttgattgacgttaagatatttttgatttagacatatactaaatcctaattaattaaaattatagatcgaaaacattatggtctcgtaaagtttagaaactatggacccacgaagaagtgtttggcgaataagcgaaggatttaatttagttttgggtatatagaaaacgaagtgtaaagaaaacgtaacgttatggctctttctaaattgggtttgttttaagtactcgtaaccactttcaacacattcactgtatatagtgtgttgtattatattgtttgagtcgtcatatgatgagattgtatatatataaagaaaagtcttggaccttttgatatggtgatccatcacatcaactacgtaatggtaatactaatgctctacgatagatgctatatttacctaagaaaaccgattttttaagaatgcactgaattttgctatcaatcagttaactattgataagtcatatttagatttttattttgtttcatttgtaaacagaaaatcacaagacgttggagacatcttggcttgctcctggcacctataaaaaaatgtatgtttgcaataatattagggacttattaaagtaggcccaatgggcttaagattccaccaaattagcttgacaaacactaagggcctgtctcggatattagttgtttttaattagcaattgaataaactgatgcacgttgactctctttttttcgtcgtcatgtttgatttttttttttttttgtcgtcatgtttgattagttcttaaatcttaacgataagttaaattatcgatttaatatcaacaactgtagcaaattttaatattctacgttaaaaaacttactactattttttttttttttttcagtaaaatgacacaaacatgcaaacctagaaaatagctttgacttggttagtttcttgttaaagaaaaagattacaaacaattaacataatatattatgcactacaacgggaaacaaaattaagaaaaaagactctttatctacaaaaaaaaatcatataaatgtaaaaagggttttatcattgacaatttgacagttatcaatttacatcaaaatatattttaaatgtttttaatattcatgtacttaattagatcgctaataatgataataaattgaatatcctttttgattgtaataaatgagtagatgagtcacaccaactgtagctaccgtgtcaaaaccttatccagtaacacgtgtacagctggacctctcattgtcgcacgtgtcagatcatcaaaccctaaaattaaaatcccaaagaaaaaaaaaactttcctctttcttcgcattcttctcctcctatcggactttgccacaccagatcggaaaatcccaatcctcttttcctttgttttttttgctatcttcaatcaaaaactctccgacagattcaatgaagcagcaaaagagataaaaccctaacaaaagtaaacaatcggagttttaatcttcttcttcttcggagccggagttttgtctgatctgtcggagaggacgtgtcggcatctattaaaatcctagctggacttccacatcactttactcaattagaagctggtctgttttctctgtttttattctaactttttctctcgtttaatttctcatatgcaaacaaacacctttgcatgtaactgattctgttgtacttgaattgaattctttaatcaattatgcaaacagagcttgttttggagatgatgattcacaagtatgagattgtctttctgcttaagaattcgttgagtgttggtttctgaagtttgaattgtgtgtgtgtgtgtgatttaaaatactgatgcatggttcgaagcttagagattttagattgctataaatgaaagcaaaagaacagtgcccttactcttgttctgttttaaagtcattgattgttataattgaaagcaaaagattttagttttgatgttttatgattactatttatcgttaagatttttgatttttgtttatagttttgagtaacacaagtaagtagtaagcttataaaacaatgggaacgagcgaagacaagatgccatttaagactaccaaaccaacatcttcggctcaggttaatccttctcttctcctttcttttcaacatctttgttctgttttatattttaaggtgtttgatgtatctacctctctctttttcaggaagttcctcccacaccgtatccagattggcaaaattcaatgcaggttcgtgttacatgtacaactttggtcactattagtttttatagtgtaagtgaatactttctcgaaaacaccgggactgctgaacataatagtatatgcttatttctttaggcttattatggcggaggaggtactccaaatccttttttcccatccccagttggatctcctagtcctcacccctatatgtggggtgctcaagtaagttttgtatcgtatagttgttgatatgattctatgaaaaagaagtttgcatcttattctttggataacactaaatgagtttctctgttttgcattactttcagcaccatatgatgccgccttatggcaccccagttccgtacccagcaatgtatcccccgggggcagtctatgctcatcctagcatgcccatggtaatctccataccattaatacaacattagctatcgttgaaagctttttgctctgttacatggcaatgcatagataaatgagaaagtaaaaaacttgctcgacatttcttttgttgtagcctcctaattctggtcctaccaacaaggagcctgcgaaggaccaagcttctggcaagaagtcaaaggggaactcgaaaaaaaaggctgaaggaggtgataaagcgctctctggttcagggaacgatggtgcctctcataggtgatttttataacactctactcaacgtggtgcttgttcagtttgattgcagtgtcatatgtaattatgatttttccgttgtgcagtgatgaaagtgtcacagcgggttcatctgatgaaaatgatgagaatgccaatcaacaggtactgttatgtgtttgaagtgttctctgttgctacaatactttgtgatgtgcttcattgagattcatgttaatgtaggaacagggttcaattcgaaagccaagctttggacagatgcttgctgacggtatgcttttgaccgctgcagttttcatggtttttctttgcatgtattttccatgtttcttgacttggtaaagtttccttgaacagcaagttctcaaagtacgactggtgaaatccaaggttcggtgcccatgaagccggtagccccggggactaatctgaatatcgggatggacttatggtcttcccaagctggtgtaccagtgaaggtgtgaccaactcctcatttcaccctgcaaggttgcttttccgaattcgttacattcttccttacaaaatcctctgattactcaacaggatgaacgagagctcaagcggcagaagaggaaacaatctaaccgtgaatccgctaggcggtctagattgcggaagcaggtaatatgcatttgtgtgttagtatcattttactctgtctgcttcttgtaatttactcattccataataaaccatttcgaataggccgaatgcgaacaacttcaacaaagagtagagagtttgtcgaacgagaatcaaagcctgagagatgagctacagagactctcaagcgaatgtgataagctcaagtctgagaacaactcaatccaggtgacaaactctttatccggaaaaatttctgcgaaaatcatactctttccaacttttatcttatttctatcggcttgcatttacactagagtcatggaataatgcaggatgagttgcagagagtacttggagcagaggctgtagctaatctagaacagaatgctgctgggtcgaaagatggtgaaggaacaaattaacacttaggaaaattggaactttacaacggattattgggatttttcaacaccggataaaaaaaactgagtccaaagtcatttgagattacgtaactatacaatcgtttgacatttttgtgtaatagagatttgacctacaagactgtagaagctgcaaaagctacgattacactttgttttattagtcttcgtgattggaatcggattctgaatccgagtttgtttctgaaacggggctaccatttgctatttctcctagtcgtggtgcatcctcgttgactgttggaacaacacagcaagtacaaataaaatagtcagttcaataccctgatagcaaagtattacactaaagatagaaaattagagttccgaaacaaacctgatcccaagattttggcaatcattgctcggacaaaccgtatttctccttggtgtgacctaacgaccttcacctgcagttttttgttttgttttaaagcgttagttaaaagtgactgaagaataagggagttcaaaagaaagcaatcgtgtaccatttccccatatacaccatccacaagttggtccactctagcttggtgtcgtaagaggaaaggacggatctggttgttgtatatctgttttgatccctgttgtcggcaaataagaatatagagaatatcagaactgatgagtaccacgggttaaagctgcctactcgttagatgatggtttaaagagattccgataggtacctcaacagttgggagttgaagccagacgaggaacgcaaacttcacatgatagtacagcgggaacctgcaaataatcgaggttattgagtatcaatactttgcgagtttatcgagataatcaagccatttctctcgataaagtccattagaagaaatatcttatttgtctaacataacagcaaaaccatcaagatattgtatatagtttcaagatgtcaatcataccaggaaatgatcttgtccgtgaacacttcaacaaggctgaaagaaccataagctgcaaagaaggtgaagatagagaaaaaaccccatcaaattccatgtgaaagaaggccaagggagattgaaaaaaaactattgaagataaacagtcaaagaataaggaaagcaattagaaaggtcataacaattgcagtaacaatatcccacctgcccagtaaataagcatcttttgttgttcattctcatctccactctcaattgccttgaaggtagagtacacaggcaaaccgatgccaatggagcagctgcaggaaacaagtttcagacataccacacaaacgtgtcctttataaccgaatcctttagtcaactacagctataacaccttctaatagagaaaataaccaaaaactcggataaaacaaaaagaatccagattccccaacaatagattgacccttgtccaaaagataccctaaagtatcacaacaagtagaatagaacccttgtccactcggctaagttaataactatgtcaacaaaaaaaaaaaaaaaaaaaaaaactccctccctaccccattgcttcacatgtaatgagaatcactcaatcagatcacaatctcaccaatcaaatcattcctccaattcattcgtctacctgtaccattgattctagcaactatatggctttcttcaccttacaataaaaaaaactcaccatgctgtacgaagtacgatattggaactaagtggagagaacaatacacgcaacccaacctgaaaattccattgagaaaaacaattgtttctctcaatccaaaagttgagaatatccacatgatcaggaattgaaacacctctttctctaatcggcttttgtcaaagagtaatccaaacaaaaaaacaatccagtacagaagaaatctgaattccaacaaggcagaagatgaaggaatcctaaatatacatatttaatcataaactttatcacgaatccccaaatcacggatcggaacaaaagccgtacaatcggaaacatcaatcaaactaaaggaagattacctcgccggtgagtccagatccaagaagcgccatggatggaatctgtgaagcaaacccgctcatcggcgattcgtacgacggttttaccaaattgacgacgaactcgcacactcgcaaaaaaaaggtcacttgtgttttgaatagaggagattatgaatcattaaaagactctagctcatacagagactcttcgtaagaaatatttttatttctttatttgaaagataaacagcaaaaagaaaagagatattaaaggcggtaaatacaattattctattctatatcatattgttaaaccaaacccggtttatctaaaaccgccaagctgatgtggcaacaagtgctcttccatgccagcacagcaccaattctccttgtcgtttcgccacgtggaatcctctaacttgcgctttctccaataaacactcagcttgaaagtcggcgaactggctttgctgtatcggcctcatcccggcggcgcaaaacgcttcccgccaagtcatttcgccggtgtgtctcctgtcagccgccgtttctaccgcagcggagatcttcggtcgtagaacgaacgcttccactatcttcttcaccaaatctccgggaggagctgcagcgtcgagcgactccagcaccatcgtgtagaactcaagagcgctaacaaactctcgccggaatgatccagatccggcgatctccgtccatccttcactatccacgaatacaacgaccttaggtgatactctccgtaaattgttaacaaaatcagtgattccacttagacgacgaaatatcgccggggaaatcaaaacgacggtcctctccccctcaacaaacctaatcgctttgaaagataacatctcaaaagtcttcatcagcacaaactcaatctggaaacgaattttcatctccgccgcgaattgagttaggttttctttcactagtcgcgtctctacggcgcactcctccgccaccactgccgtaactcttaaaaatccaccgcttacagatttctcagtgatttctctcataagcgatgcgtattggccaccgaatccaatctcaaaatccaccacgtgaacaaacggagaagacgactgcgagctcaacgaatcgagtatcgcttgattcgccgtgaaatgagagaagagagggatcggagaaatcccggaatattccttaatcgctcggatcctctgaacaatctcggaccaagaagataaccggattggattccggtttgatccggttaaaaacgaaccgagagcttccttaaagtaaaacgcagctctctgtaacggtctacccgccggagatctcaagcgttgattaagccgtgataaaaccacctgagcgagttgtaactcgtccgattcaacacaatccacgactcggatgagatcttcaatgaaatcaaatcctccattgtcgacactatcaagagaattaaaaccgtacccagttgtttggttctgaccaggataaacatcggaagacgattcgaaatccgacggttgaatctgatcgggaaagccagggagatttgaatcgacggcgtaaagaggcaaaatagtagaatctgttgtggttgtggtgaaaccggttttaagtgagttaggagcagaatcgtcatcaagctccaattctttcatgatggaatcccaatccattgaacgcatgacatgttcgtccattgataagtgattactatcagtactattagtgttgttgttgttgttggtcgtgtcttgaggagatgatgcagggattttcatgtgttgtgtgttaagaagaaagaaaggtggagcctttaacgaaaagaaaaaaagtttttttctttctgtcttttttctttgtgtgtgggagaagaagaaggtggcggggcttttgaaaggtgagagtggtaagctttttatctttgagtgagtgcgtgcaaataaagagatttcaactttggtaaccgtgtctgatccgggtttgtttggttttacagaataatatttatacacgaaacaatctgattgacaatgatttgtatatgattccgttttttattaataacatactatttcacatgaaattcaactgaaagattttaaatcagtttttattttgtattaatttctcataatatatctccaaaactatatactatgcacaactagcaacttctgtagctaatgaaaaggaaacttctacagctctttaaagggataaaatacaaataaagttcctctgctttaaaaataaaaataaatcatttgattgaaaagagatccaagctccactatgttgatcatcaagaatgtgaaagttgaaaataaaagagaaaaaggatgttttaaaaaggttaatgatttctctcttttttttgtctgagtggttttttttcagtctttttcatcctaaaattttaaacagtattttacaaaaacatttaactgaaagtttttttttattacatatgacaatttaagtgatcaaaaataatctttctcaaacatagcagcacggctatatgtaactatgttgtacctgagtttgagatcagcgttaaaatatttcatatttgtggatattgttttcgatcattaaatctcatacgtttttgacccaagtatggagataaataaaaaactatgaatctgcgttgattattccaataggcaataggtatatcaacgtttggaatttttttttaaaagtagtttgtgttggacaaaaatattcttactaaacaaactctacaacgtcgtttttattctcactaaacctagttgttagtaccacacaaaatacaatattatgtatttatttagtaccgtgcatatatcacataataatctcaaactagttacaaaagctagagaggtttattcgattgataaccaataaaaaaggggaaaattgcatgaaacaatttgagtcgatgatgtttaacggacactaatccccgctgcttgcgacaaaaaacaaaggaaaggaaaaagggagtgaccactgggctttatgtggagcccacataacacggtaaaaagcagggggaaagtaagcgggtccacaatgggctaacttttgaggtaataatgtcggagaaaatgaccgagaagcccatgggccagagattgactgatcattaagtcagcgcgtaagaatcacgcccacttctttcttttgcttagccccccactcttctctctaactcgcaaaggaaaaagaaagaatatgttctctccttcacttattgctttcattttcatggaaatttaccttccttttttgttttctttcttttctatttggtttggtgtaccagaatgcaaaaccatttcctcaatcttttgaatatactctcttttttttttccttgtgtaattaggaatgtttgatcatattaggttaataactcaccattttcgcaaaatatggcctagtttgcgaaatttaaacatcatatagttctcgtgaagaaaagcttcttctcattgagacattattcaacctttaatatcgtggagaaaaggttcctctcattaatacacctttttcctaacataattcaactttttttcttacataagtcttcatctgtgttatataatttagattttatgcggtatagcggctcaattaacacactaaaatactaaaagttctttttgtggcaactttttttagttgtttctcattaaattaatgattaagcccacatttctgttatgttttaaaaatttaagagaaataatcaagtttaatattccaccgtatgaacgcctacatgcaatgggatccacttgtatcctaatctcatgcttaacaactagttagtttattttcgaggatcatacataaaataccataatattatagtttatatatgtggaacatgcaagaaaaataatcaatgatttatcgaactgaaatcactcgccaaattagttgccttttttttgttagattgaattgccagtattttaaacaaataataaaataataataataataataaaatgccagtattagaccaatgttttcattatgctcagaaattatttcgtccacagaccaccaaaatgttacgtcttgttagcttgaaaatcattacactatcacttttgattctcgttcatacagctaattccctgaaaaaatgatggccctatgtgtacaactattttatttaaatccatctgatattgggtaacgaacgttttaattatatgcaatacaatttatgaatgataattattctgcatatacactaacgtctccaaatatggcaatatcttccctacacatgattggagtttgtcgaaaaagaaaagaatatttcataaataatgttggtaattaatacaagttctatttattaacacacgtgattgtatattaaaaacaaatgaatgacgatcatatcttatattcccactctgacaatattcttttactgatcgaccaatggatcctctcgttaccaaaattgtcccactgccaaaggtttctttcttattattcgtttctgtgttggtagttttataatatgtataccgtgatttatactaagtataatgtctcataaactgtttttgataaagaaaattttaagttgttgtgctgactgctgagaacctgtgtaataatataatatcgccaaaacatattattcaattctcataagttgtttttaatttgaaggttatgaatttgtaaactttgtgtgtttagtatcctgtgattaaaataaaccaaaattaaagacatgatttgattatccaatcttttagttaacatgtcaaaattcaacgtaaaatggtgatatagtgttttgtacaactatctggtagtaatattttttcttgatataataattgtaataaaatctaaattttataatagaaaaagagacagttgtgtattttcttgggagataatttctcaaaccccactacacaaaaaggtcataatacttaggaagtaaggaaaggaaggagaggccgatgatagactacacacagacgcttcttccttctaatcaaaagagagaagcttcatcctcacaaaagcaattttttttagtagattcctattttatgtcattcacaataaataaaatacttaaatagtaaaaataaaagatcgttctccattaacatatcattcccacaagaatgaaaagtagtaacggagaaattgttttaacttttcattgtttatttttttttctataactatccgtatgcatactacaagaatttaatctaaattttggatcgactgattgtagctataaattattgagtaagtattaaattagaccgttgatataaaaatatataagtatatatgtgtgttatactaagtcgatcgattggtaagtctcgtaatgatttagtaaacattattctatttggtgtagatttgttttttttttttttttttttttgtcaaatgtaaatcatttaattttaattcagttacaattttctaactaaaattttgtttatgtattttcgatactgtgaataaagctggtggtgtaaaaaataatattagcgtaacattaaatttataattaagttaaacaaaaacattaatatataatgtaccgacaaaaattgaaagtgaaaataaatggaggaggatgttctattttgcaactcattgagtagtcacaacatgcgttggaaactcttccccgtcaagaatatattactttacacgtttttaaaattattaatttacccccttttaataattgatttttagtaaaatgattgttcgtgataaaatatactttaaatttttgatgaatggaatcattcattgtttgatcgtttacatttaaaaaaaaaaaaattatacgatcacatctttttttcttatatatagtttttaagatcatatatatgatatatcatcacaacaaattgatgtctagtacgtaccaacaagtatgctctgttacttgtaaagatgataaaatgctcttagaaacaaaacattgtactctcaaaacaaaatatttaccatcacttgatactgtcaaaacaattcttatatacttagtactaggtattcggctagcatctcactgattctagaggtcatctattttctcgaataaaaaacaaatataaactcatcataaaaaggataaatctgaattaattcatttgtacaaagtatagtcttggtctaacaaaacgcaaattcccctatatatgtcttgcttatgatgtttagggacttcactaatccatcttagctataaatagaaacaattttttattataagtaaataagtatttagcatgattgtagagcgtaactttttcacttacacgtagagccaaacatacgaactgcttatgaccgttaaggtatgatatgataagtattagacttgagatcatataaaagttattttgtccacgagccaacaattaaccaaacacactcacgagtcagtacgtaacttcacttccatgatggaagtgacatcgaatatatttttcgtcatccatataaagtcaaacacacttcctaattcctaaatcaattagcaccatatagttaatgtctttaatttccacacgttaccaactttgtttgattctattttatattttggtatttccatttttgggattttacgtgtaaacttcggcgagccgatcatcactcttataaccatggcttgtagattcgtctctatatatatgtaatttgtttttgttgtcctttttatacgacgctctcaaataattattactaaatcatatcaataattttcactatattttattttggttctggtacatattcttgcatctatacagattccaatcacccaaagatatgattagaattatccgttctcaggcatacaagtgcagtttggttaggcactcatacatacatactaacatacactagcccaaccactatggacaattgggcctgtcaaattttcaaccttgatgtacagtacgtgtccgtgatcattatctgcccagatgaaattgaaatgtgaaagattctcgagttttcatttccaaaacacatgttaataatgctaatacatagtattggaaaataagcatatccactaataccgatatgcatgcatatctcaatatcgcatcgatgaaaactatgaactgccatcacttggaaccgtgtcatttaactcgactgtcgcgcgatataaactatgcatctttgttgttcataccttcacaacgtcatcatcaacagttatgatcacttatcagccagatttttcaaactcgagctttgtattttagcggcaatttgtttttggtaacaaaggaacccatgcacttgtcagcgtaaagcaaacacgtgtccaaaccattaagccacgtggtcattgtccgactctacaacctctctctgtttcttctctcattcctttatatgatactacgatttaatacgctttgcattgaataacaaaaaaaaaaacagagcacaatgactagatttgcggtattgccactctctgttcttcttctcgttctcttgttcctctgcactgagtcgttggctaagtcggaggagtctgaagaatacgacgtcgctgtgccttcatgttgcgggttttcgtctcctcttctgattaagaaagatcaatggaaaccaatcttcgagacgaagtttggacagatctcaaccgttcaaatcggcaatggatgcggtggaatgggaccttacaagatacattccataacgttggagccaaacacaattttgctccctcttcttcttcattccgacatggtcttcttcgttgactctggtacataataaactgtttaaatttcttcggtttggtttacagatcagtttcggtttaggtcaaaattggattgtgatttgtataggaagtgggattctgaattgggttgacgaggaagcgaagagtaccgagatcagactaggagacgtttacaggctacgtcccggttcggttttctacttacagagcaaaccggtggatatcttccttggaaccaaacttaagctttacgcaatcttctccaacaacgatgagtgtttacatgtataagtttgatatgattctttcttttttcactttcttgacatctttttcttcttcttattgtatctgtattccatggatgcaggatccttgctttggtgcctattcgagtatcacagatctaatgtttggttttgatgagacaattctccagtcagcttttggggtatgtcttaatctgccgatgaataagttacgaattgtctatatcttacttgggaagcaagataggaattgtgtatatcttacttcccaacttactctagtagaggatattttgggttgtattaagtgatatattaaattcaatggttttaattaggttcctgaggggattatagagctgatgaggaaccgtacgaagccaccattgatcgtgagtgagacgctttgcacaccaggtgtggccaacacttggcagctccaaccgcgattactaaagctctttgctggaagtgcagacttggtggataacaagaagaagaaagagaagaaagagaagaaggagaaggtgaagaaagcgaagacattcaatgttttcgaatctgaaccggatttcgagagcccctacggtcgtactataacgattaacaggaaggatctgaaagttttaaaaggctcaatggttggagtttccatggtgaatctcactcaaggatcgatgatgggaccgcactggaatccatgggcttgcgagatttcgattgtattgaaaggagcaggaatggttagggttcttaggtcttcgatatcatcaaacacatcatcagagtgtaagaacgtgaggtttaaagtagaggaaggagatattttcgcagttccacggttacatccaatggctcaaatgtctttcaacaatgactcgttagtgttcgttgggtttactacttcagctaagaataacgagccgcagttcttagccggggaggactcggctttgcggatgcttgaccggcaagtattggctgcatcgcttaatgtgagtagtgtgacgattgatggattgttgggagctcagaaggaagctgttatcttggaatgtcattcttgtgcggaaggagagatagagaagcttaaggtggagatagagaggaagaaaatagatgatgagaggaagaggagacatgatgaaaggaagaaagaagaagaagaggcgaagagagaagaggaagagaggaggaaacgtgaagaagaagaagagaagaagcggtggccacctcaacaaccaccacaagaagaagaacttagggaacggcaactaccgatggagaaagaatgggaaatggaaggtgaagaggagagttaagccggaggagtaaaagagaaggccaacgtacgtcaagagtgtgtttggtttgttgttagtggttagaactttggttctgacctctcttgtaactttttttttccatagtcttgtttatttgttaatgtacttttgcattgtttttgttgttgccatgtttaaagttgtattgtgtttgtataatgttttgttttgtttaaatctttgtagatggtaaatgagaaataagtaaatatttccgagagactgttgagtgacgacgttacttcttgttattgataactctgtggtttattatacacttgtagtagtagtcgtacttgctaacttatgtcatttggtttacaattgtataatgtatttgtaaccctcttgctatagcttcggcatattaaagttttgaatggtgataacggaggagtcgtagataatgcaatcaacttcccatgctctgttctcttgttgttgcaagagatattggaataaaaggcaaatttatctcaaacacagattgggccatatcttgaaaaggcaaattcataaaactctcaaaaagtagatttatcccaaacacgaattgggccaactattggaccggatgcgctgaataatgggccttatcagatttggaccggcctgtttttatatgacatttacaaaaataccctcacaggaggtcccgtgttggctataaaaaaatagaataatccgtaattgccctaaaatagtttggtttctgcatccacccctttcttcgaatctcgacggctgaaacagattctaaatttatctccggtgagaaagagatagagagcgttgattccggcgaaaagatgtctgaattcgaagatcacgagggaaacggtacggttgctgacgcgatttacgacgaagagaatggtggccgcgacggcgaaatcgaggatcaattggactcgaaacccaaggtaatttcccccctgattatcttcaatctcctagcttatagttggagtttcgaatctatatttcctagcaattggattgaattgagaatcgaattatgagatgattagttttaaagctgcttctgtttcattgattcttaaactgtaattgatgaggttttgggtgtgtttacatgtgcagagagaatcgcgtgaccatgaaagagagacatcaagaagtaaagatagagaaagagagaagggtcgtgataaggacagagaaagagactctgaagtctctcgccgaagcagggatagagatggagagaaaagcaaggagaggagtagagacaaagacagagatcatcgtgagcgtcatcacagaagtagtcgtcacagggatcatagcagggagcgtggtgaaagaagagaacgtggtggtagggatgatgatgattaccgtcgaagccgtgatcgtgaccatgataggtagactgttcttgaattgaattatacattttcaatttagattgaatcctttttgattttatggaaggtactgatttggcttattttttattcttctaggcggagagatgatagaggaggaagacgcagtcgtcgatctcgatctcgttcaaaggatagatctgagcgcagaacaaggtcacgatctccatcgaaaaggtagcatttttttctcattggattacttactcttctatgaagtaattgcttcaatctaagaaagtttctaacctcactcaatatatgttgttgcagtaagcagcgagtcagtggattcgatatggcacctccagcctctgcaatgttagctgctggtgctgctgttacaggtatatctctttaatttagcaccttctcattagcataatgtagaattcatacctaatacacgtactgggattgataaaatctgtttctcctgaataactacaaaaacataggctgttttctttctttttttacttgggacataacgctagaactgagagcttttggttgtttggtggtctttgtgtctcttgtttgcttttctgttttggtaaggcaacactgggtgtgggctggttagctcttatatacaaggaagaattactgcgtatgggtattgctcatcctcagtacatatcactggttttgttagtcttgcaaaaattttccatgcagacttaaacctcttgatgtcaccaatacatttccagggatggtaaactaggttttctcatatgtaattttcttatgtattaacctgtttttcttttgtaggccaagttcctcccgctccaccaactcttcctggggctggaatgtttcccaacatgtttccattgccgactggacaggtctgtggtctttcccttttaatattttcttaattgatgtctttcttgaactaagtcgtctatgtcctacagtcatttgggggactctctatgatgccaattcaggctatgacacagcaggttagattttatttatcatggatatacgcaagatactatgtatttctctgttctaatttaatccttatttactttgtgtcttcaggcaactagacatgctcgcagagtctatgtcggtgggctttcccctacggcaaatgaacaggttattatccactttcttttttcattttctcccactgaaatatgtttcagcaaataatgatactaacattgatttattattttgtatttgcagtctgtggctacattttttagtcaagttatggctgctgttggtggaaacactgctggtccaggtacataatcctggtgcagatgctagagtgtctattatgatacttggattaatctttttttataaatcttttttcttactcgcaggtgatgcagttgttaatgtctacataaaccacgagaagaagtttgcttttgtggagatgcgatctgttgaagaggcaagtaacgctatgtctttggatgggattatatttgaggtatgttttaatgtttaccgcactaccaaatatttggttgagttttagtactggcatttctttggtatataggttacccaactgaatgcttatctttctttttctttttttcttttccagggagctccggtgaaggtgaggagacctagtgactataacccatctctagctgcgactcttggtccaagccagcccagtccccatctaaacttagctgctgttggtctgactccaggtgcttctggtgggcttgagggaccagatcgtatttttgttggtggacttccatattacttcacggaatcacaagtgagggagttgttggagtcctttggaggcctcaagggctttgatcttgtaaaagatcgagaaacagggaactctaaaggatatgccttttgtgtgtaccaagatctttctgttacagatatcgcgtgcgctgccctaaatggtatcaagatgggagataagactcttacagtgagacgtgccaaccagggaacaatgctacaaaagcctgaacaagagaacgtattattgcatgcacagcagcaaatagcttttcaggtaattttttttcttcttaataatattggaagaaaacaaaatgagcttgcaaaacgtgttgagacctaacttgaatatttccatttataagattaaaagactgattgatggttttatcttttgcagagggttatgttacagcctggtgcagtggcaaccactgtggtgtgtctgactcaagttgttactgaggatgagcttagagatgatgaggagtatggagatataatggaagacatgagacaggaaggcggaaagtttggtaagagacctcttaattgcgcaatatggtctattttgaaatataagattaaaagcatattgatctgtctctctgttttcttggttgtgctgttttacagccttttgctataaagaatcagccctaacatacacagacaggagactgcataaacctcctaatctatttatcaccaatggccactatttcttaaaagaaaaaactgacttgtttttgtctgtgttttcttgtcttgtattcgaaatgttttgttctttaactcttaaaatgcaggtgctttgaccaatgttgtgattccgcgtccaagccccaatggtgagccagtggcaggccttggcaaggtaaacttatctctctctctttctctctacttcttgtatatttctatttagtcgtaatctgactgtctgatatatttaatgtgcaggtgtttttgaagtatgccgatacagatggctcgactagggcaagattcgggatgaatggtaggaaatttggaggaaatgaagtcgttgcagtgtattaccctgaagacaagtttgaacagggtgattatggagcctgatcacttctttgtttgctttctattacttaaaagttaagtactttgcttcagtttcaagacccttttgcgtgattgtaagagtatgagattatcgacacgttgcttattataacgtttttatctcatatctttggtctatttcttaaatatttatctcaaaaattattcacagaataacatcatgagtccctcgtaaaacatcattcgtctctcgtaaatgtgacatatgttctaaatcaacacaagaagttgagtactctctctattgaaatattcaagtagtttggttctcttctgatagaagaaaaaagaaagaaaaagaagcaaacttgtaaaacccaaaaatctctgttaagccactaaaaccctaaaggcgtctccttttctcgccaccactctccacaatacccatttctgcaaaatggcttcttctcgtatttctctccgccttgttcgccgatttgcctcagccgccgctgacggtacgaccaccgctccctcttcaggcaaaatctctgtctccaaagctaagtccactctccggaaagaacacgatcccgacaaagctcttaagatctacgccaatgtctccgatcactcagcctctcctgtttcatctcgctacgcccaagagctcactgttcgtcgcctcgccaagtgtcgccgtttctcagacatcgaaaccctaattgaatcccacaaaaatgatcccaaaatcaaagaagaacctttctactctacgcttatcagatcttacggccaagcctctatgtttaatcacgccatgagaaccttcgagcagatggatcaatacggcacacccagatcagctgtttccttcaacgccttgctcaacgcttgtctccattccaagaatttcgataaagtcccccaactgttcgacgaaattcctcagaggtacaataagatcatccctgacaaaatctcttacggtatattgattaagtcatactgtgactctggtacccctgaaaaagccattgagattatgagacagatgcaaggtaaaggcatggaagttactaccattgctttcaccaccattttgagttcattgtataagaaaggtgagctcgaggtagctgataacttgtggaatgagatggtgaagaaaggctgtgaattggataatgcagcgtataatgttcgtataatgagtgctcaaaaggaaagccctgaaagagttaaggagttgattgaagaaatgagtagtatgggattgaaacctgatacgattagctataactatcttatgactgcgtattgtgagagaggaatgttggacgaagctaagaaagtgtatgaaggacttgaaggtaacaactgtgctcccaacgcagctacttttaggacattgatatttcatctttgttatagccgattgtacgagcaaggctatgcgatcttcaagaagagtgtgtatatgcacaagattccagatttcaacactttgaagcatttggttgtgggattggtggagaacaagaaaagagatgacgctaaagggttgattagaacggtgaagaagaaattccctccgagtttcttgaatgcgtggaagaaactcgaggaggaactcgggctgtattcaaaaaccgatgcttttccatcttctgcaaaagaggctgctgctgcttaatagctcaagagcatttcgattgaacatcttattttgttgcttgaagacttgttgaaaactatgatctagtatgcaggtttatttataagctgctcctgcatttttctttcctcataaattagcttgtaaaagcttgacggtttgttgttggaatctctagaattccatagtcaacaattttcaggttcatatagttcactgctttgttctacacacttgtgcttcatgatgaattcaagtttctttcagttttatgttgtttttacatatccttctacttgcaactaaagggtcaagctggttctgttggtatagctaaactctgtttcttggtacgaagatggtttcgcgtatagtggaatcttgatctcgttggaactcaatttgacttggcttcccctaattttgacttgcacgaaagataagagtgacaaattttcaacaatgattttgataggtttctgatcaggtaagtatttgagttgcaacatctttcagagaatttgcaaatcctaaggttgcaaaatgttaatcatcttgcgtagttgtttgcttattttgtatcaatagctctaaatttaattaaaaagattccaaagttcaaacgaaaattacgggaatcacataagtaatactatactatatagtctacattatatgtaatgtttttaattttctgtaacactgatgtctctataatattttaatacaaattgtggaacatttttgttgaaaagtatgctttcttcatactagtaagtcaaatataaacttttgacgaaataatccaataacatcacctactcgtccggaaacagaacagtacaaagttggtgaataaaatctatggatattttatatagtgagctttttgagaaacgtgatctactttgatgtactaaagttaacttttaacaatgaaaacaaaaattgaaaaattaacaacgttaaatcagaaacgtaaataaactgaatcatcatttcaacagttgattccacaagctattaaaattttaaatattagaaagtattttaaagatgcttgaaacttagcagacagtttggtttaaaagagtaaaagtggtaatgagctgatgttggcggctaaatctctaaaatcagtaaagcatatcgcgaaccaaaagccaaagcaccaaatgaaactgagttaggttcgttgtacacacgatgttttccaataaataatcctccacaaaattcaaacaccggatgtatctcgaaaacattagatgttctatatacaaacatatagaatcatggtattgagttcgtgattttttttttgtaacatgatgtaattagtaattcatcctaatatatgtaatcatctttatattttgataatacattcgtgattcgttcgatgacattaccacacgaggttacgactgcgcacatatggtgtattatgagtccaccatacgataaattattaaaagtgtggtagagagacttttcttatggttgataaattattattttcaatatcgtcaaaattacttattcattttctctttatttggaccaatttagatttagactcgattagtttttctatagatgtaggttcttcctctcaagatgtagcgataggttttagggttaaactttgtcgtggatataggaagaaactgcatgtagtttttgatgggttacacttttagttacaacacgaaagtttatcggaaatactagttggctcatggctgccttacgttagacaattaattacaaacatctctttttttctttgtcaataattgtttcttattgtaggcatactattggagaaacatgaggtacgaacttcccaaatcagttttttttttttgggaaaaagttgaaattatgcaaaacactgaaaaaggaaagaacaagtaattaaaatgcaaaaaaaaatttttaattaaaatgcatgaacatataaacaaataacatgttataggttcaaatctcatccactgatccacaaaccgtaatcaccatcaaaatattcatgcaagtcaacttgaggatatttacatactataattaagaaaataccacaaatttccaaatcaagtttttttttttttttttggctattggcttaattaacaaacaagaatttggctattcacgtgattcaaagtctaaactaatgaagcccacttgacttttcgggcaactcatctaaaacttcaaactttgaaatctaatttaaaaatggacccatgacgttttacactctgactctccatagttgactccatgagtccatccaaatcgagtgtttggttacacagtgacatgaagttttaaaattctcgcgatctaaaacaagatatttttaaaatattcacgtgtataaaaacaagaaaatttaaaaatattcacgaggataaaaacaaaaagcacctattagaaatagctcttatccaataaggcaatgataacggactcgtgtcggtgtctacccatatcttattaatcgaaaaaaaaatcttagttagtccaaaactcacccccaaagagtcaactttgttacacatacgttcttatccaaaatccaaagttaacttattaacgactaatgccaactcaggtttacacatgacatcagagcttccaagtttatagtctggtcaagctgtaactgttaacttttaattacagtcaaggtctgtaattagaatttgatcacaaaacatgtttcattctataaacatatattaaaacgatgtggatgactcttgtccattggattcaaataactaaatcatctcttaacagtagcttgtggctttcacgactactgttttgtcaactattttttttctatataatcaccgaatcttttctttggtactgagagagcaagagagattagtaagacctaactcttaacgaacttttagataaaagcttataactgagagagacatagatcgacaaaagtctctataccttcttgtaacgtggtggttaattaatcatggccgatcaaatctccggcgagaagccggccggagttaatagattcgctcttcaatgtgctatcgtcgcctccatcgtctccatcatctttggttacggtaagtaatagagaattctccaaaactaacatttgttgtggaagaccatcggggttgtaatatgagaaaagaatttttaaaaaatatctgtgatagtaactttttttgtgctagtaactttgaaaagtacagaggtgtttattctctataaaagtttttgatgtcaaatttatggttttctctagaaatatgatttttgattatacatcatccacatatcattcaacgatttgaatgacttgggatggtattttttttaatatgatcatgagaattgataagattataagtttttttttgttttttttgggtatttgtgtagatactggtgttatgagtggagcgatggtgtttatagaagaagatttgaagacaaacgacgttcaaatagaagttctcactggaattctcaacctttgtgcccttgtcggatcattgctcgccggaagaacgtcggacataatcggacggcgttacacaatcgtcttggcctcaatactattcatgttaggctcaatattgatgggttggggtccgaattatccggttctcctatccggtagatgcaccgctggactcggagtcggttttgctctgatggttgctccggtttactctgccgagatcgcaactgcttcacatagaggactcttagcttctcttcctcacctttgtatcagtatagggattttactaggttatatcgtgaattacttcttctccaagttacctatgcatatcggttggagactcatgctcggtatagccgcggttccgtccctagtgctagcgttcgggatcttgaaaatgccggaatctccacggtggttgattatgcaaggccgtcttaaggaaggcaaggagatattggaattggtatctaattcccctgaagaagcagaactccgctttcaagacatcaaagctgctgcgggaatcgacccgaaatgcgtagacgatgttgtgaaaatggagggtaagaagactcatggtgaaggagtgtggaaagagctcattctaagaccaactcctgcagtgagacgtgttcttttaactgctcttgggattcatttcttccaacacgcctccggaatcgaagcagtgcttttatacggtccgaggatctttaagaaagcaggaatcacgactaaagacaagcttttcttggttactatcggtgtcggaatcatgaaaacgacgtttattttcactgcgactttattgttagacaaggtaggtcgaaggaagcttttgttgaccagcgttggaggaatggtcattgcgttgacaatgttgggatttgggcttacaatggcccaaaatgctggcgggaaattagcgtgggctttagtactgagcatagttgcggcttatagtttcgtggcgtttttctctattgggctcggcccaataacttgggtctacagttctgaggttttcccgttgaagcttagggcacaaggagcgagtctcggcgttgcggtgaacagagtaatgaacgccaccgtgtcgatgtcgtttttgtcgttgactagtgcgataaccaccggtggagctttctttatgttcgccggagttgcggcagtggcgtggaatttcttcttcttcctcttgccggagacgaaaggaaaatcacttgaagaaatcgaagcgctttttcaaagagacggtgataaagtacgcggcgaaaacggtgcagcttagcatgatgaatataatgttatcattaaatgaaacgacagcgtttggggtttctcactcattacacgacgtcgtttagttgtacttttgtgtggcttttatcaaattataaatcaacggtcaagattgacgcacgctttagtatttttttcattaacaatttaagatcaacggctaatacatcgccaattactagctaataatggcccagtagtgtgaactgtgaagagagtgaactgatttttttttttttaaagttctctctcagatttaacaaaatcgagccgacactttcccaattgaactgaatctactgaaatcgattcacgagagctcagatttggtgttagcatcactcactaagcaagattattgagttgtaattagtatttgagatcaagatgaaggaggacgatgcattgccgacgacgacgacgactggtacggcgacgggaacagctatggcgaattcgaagaaggaaagctctgactcggtcttgtttggaagaggtcgatataagttctgggcgtttgctgcgattttgcttttggctttttggtcgatgtttactggcaccgtcactctccggttatctaccgggaatctgaaccggttatcggaagatctagggattccgaactacgataatctcgacgttctggttgtttactctctctgtttctatttcggttgatttggtgtgtaatttgattgtagtctggtttttgaggttttggaatttgtggtattttttaggaaatggaggagagagagaaagtggtgaagcatatgtgggatgtgtatactaatagtcgtcggatcaaattgcctagattttggcaagaggcttttgttgctgcttatgaagaactcactagtgatgtgcctggggttagagaagctgctattggtgaaatcgccaagatgtcggcgcggtcgatcactcttgatccacctccttctagatcaaggtgatgattcttgctttaaatttcgatttgttttcactatattagtcacttagaatcagtaggtagaggtatagatagatggtagtcgatcttgcctctgtgctggagtaaatagtaatgttcaatctggtatctggagtttagatcttgagtgtacctagcttaggttgttcagtttgatggtcaagttcttctgtgtctggagatatgccattaagatttagtgttactctttaagttattacctgttaaagttagtttgtgtatactctatctttgtttgtgattggtgaccagctatatggatccatgcttgatatccaaacatataaagacctgtatgaactttcgatacacatagtaccttataatggtcaaggtctaatttttctggagactgggtatgtagatctagtgtaagatactggtatgcataatagcatgtggttgagtagattatgtcttcttaaaattatgttatgagatttcagataggtatagctttcggttttgtttcttgcatttaatgctaaacctcttttgtgaaagttggttgatcaagtttggtagagcttccatcacccaccttagcttcttgatcaggattcatcttttaatttcttctcttaaattgttcatagacttaacctgagtgttaaactcttttttcttttctttatcggtttgttctcagagtgcaagggatttgggaagaaacttgaagagaattctacacaagccagcagctagtagctgataatgatattggtaacatatgtctactacttgctgaagccaaaagatgaactaccaaatggatagatttcattttgggactaaaattcaattttcgaaatcaaattgctctttttacattctatcgttggtaattatatagagctacttttataaatatatgtagaagcaaatggaaccttatgactttacacgaaaaagcaatggatcccttatgatatatttcttcttctgatatcttcaaaacttgggactcttgaatctgtgttgttattggcaaccttttgccactgtagattaccaaattaagatttgttgactaaactaaaatacgcggtttgtttactcttgtagtataaaaaagctttaccacactcgcacgtgagagtgaaaaaaaaaaaaacacaaacgtaaagaaacacaaaaatgaagtgtccgtactgttcatcggcgcagggacggtgtaccaccacgagctccggtagatcaataacggagtgctcatcttgcggtcgcgtaatggaagaacgacagacgcaaaaccaccacctcttccatctccgagcccaagacactcctctctgcttagtcacttccgatctccaaacggcggcgcaaccgtctcctgaagacgaggaagatccgttcgaacctaccggattcattaccgccttctctacctggtccctcgagccaagcccgattttcgctcgctcttccctctctttctccggtcatctcgctgaactcgaacgaaccctagaactcgcttcgtcaacatcgaattcgaattcgtcgactgttgtggtggataatcttagggcttatatgcagattatcgatgtggcatcgattttaggattggattgcgatatctctgagcatgctttccagttgtttagggattgttgctcagctacttgcttgcgaaacagaagcgttgaagctttagccactgcttgccttgttcaagctattagggaggctcaagaacctagaactcttcaggtaattagagaacctatttcattacaagttttaatggcagatttagctacttagtctcaattacttgaagttacattgctagatgaattgtttatgttagaaaactagttcgttctcatcgttttgagttgaaagaagttgtgactatatggttgattctggataaattatcattgtagtttcttgaacagctaccatcgttttcgaattgaagaactatgaccagtctatgctaggtttctaaagcttgtgtgtttgcttgaaggaattaagcttccatgttggtgtactttatcttaatcaataactgttcttatcatttgtctcagttgtttgatgatatttttgacatgttttgttcgtaaattagcttttagatggatatcgtatcgtagaatacagaattatcttttctagaggcagattttgttacaaccaaatgtggaccatcacttatgaacttatacaggagcagcacttctttcagtttattattgagacttgatttgtgtctaatgtatttgtcttactttgcacaataggaaatctccattgcagccaatgtacagcagaaggaaattgggaagtacatcaagattttaggagaagctctacaactaagtcaacccatcaacagtaactctatatcagttcatatgccaagattctgtaccctccttcaactaaacaaatctgctcaggtgtgctactaaacttatacttctttttgaaaggcctaaaatgcaacgtgaatagtgtatcaatgcatggactttttcccgcttccaatgacttttcactatccaatgtgacactttgcaatatctcagatgcactactctgatgcctattatgatccccctaagtatttgtctgttttcaatcttcctaggaactagcaacacacattggagaagttgtgatcaacaaatgcttctgcacccgtagaaacccgatcagcatttctgcagctgctatctatctggcatgtcaacttgaagacaagcgaaagacacaagcagagatatgtaaaataaccggactaactgaggtaactctacgcaaagtctataaagaactgctagagaattgggacgatctacttccatctaactacacaccagctgtgccaccagagaaagcatttcccacaaccacaatctccacaacccgctcaacaactcctagagccgtggatccacctgaacctagtttcgtggaaaaagacaagccctctgccaaaccaatcgaaactttcgatcatacctaccaacaaccgaaaggcaaagaagataagcagccaaaattcagacagccttggctgtttggaactgccagtgtcatgaacccagcggagatgataagcgagccagcaaaacctaatgctatggactatgaaaagcaacaactcgataagcagcagcagcagcagctaggcgataaggaaacattgcctatatatctaagagaccataacccattcccttcaaatccatctccatctacaggtatcagcacaatcaattggtcattccgaccatctgttgtccccggatcttccagcaacttgcctgttattcatcccccaaaactacctccgggttatgctgagattagaggtagtggaagcaggaatgctgataatccccatggagacttctagagaactaatagattagtcgtgatgataatcttcatttcgtttactctgtctttgtgtgtatcttgggctatgtacaaaatatgcttccgagcagctgtcgcgtctgatcttgggctttgtattagcccatttacgttttggcccattatttctcgactacgacaaaatcaaagtggaagatttaatctagaaggtgggccaatttgttgttccttttaaatattgttttttaattaaagaaaagaccaagaaaatatggaagagtcgtgaaggaacttgctacgaagatgccatttgtcaatgagaaaacgtgcaatgaatcggtaaaacaccaacaacaacccatattagctgtccctttcccaaaacgcctttactttgtaatttcttttgtgtaaaacaaccgcctcacattaaaaacgccactaaacacgtaatctctccaacaatataaatcttagaccgttgatctaaacgttaatcaattaatctcgtccgtccattactcccaaccctctatatataacaacgcgtcgacctaattaagttctcatacccgctttattcattgattcattcaatttttgttcatcgttttctctagatctctcttctatatagtcctctcggaggttttccgatgaagatcgtcactgatctccttccgatctacagatcggcgtcttatacgaagagatccagaggctccggttgattcctcgtcagaagacggatcgtcgcggttgagctccgaagatcggttgaagatctggtaaattatggcttctcgtagctggatctgataattgattcgtttaattcgattgaattctttgtagttatgtatatattcgttgttttcgattccagatctgatcttagatcatgaaccggcctcgaggttcgtcagatctgcgttactgagcttttgatgaggtgatgaatgatgaatccgtcaattctctatggagctagagagatgagagggtgaagaagagagaagaagctgatatgtgatattgatgtgagttaagttgattgatggatgtatgagatgtttatagggacgatatagttctgcgtaaacatctttgtcatccgacctttgccatgacaggtgcgcttgcatggcaggtcaccaaaatccttaataaaaaaaaaaagtttcgtgttgtcgaggggagttcgcacgggggattttttttgcccgggttctcccctcttgcgtgtgtgtcttgcttctcgctcttcgtacacactacctttgatctcgattcattcacgtaaattctctcaataccacagaaatattctcgatccggatcttaagatcagcggatctggagacaagctggccaaatcttaatccaacatcctccaaccaaggtaccttcaattttgagtttaaattctccgttattctctttatttgcatcatataacaaacctgacaccaaatatttattacaatctcgaatcggcctttatttttgagcatggaaatagttgcctcattttcaaattgactgttataatacattattcacaaagtacttctaccaaagtattcgtaggaccttaaattgtctaatcgaacggttccatggcagtttgttatattctccactttatctatctactgttgtttgatgtttgtactttttctgtaagaattctcattggaagaaattgtacccagttttatgattacgtaaagaaatatcagtagtgaatattctgacctattctagaaaatagcgctgtagtatttagtctctcgtatgggttttacgatttggatttatcacggctgcattcattagcaagagctatggctagagtagctagctcctggagaagtaatacgagtatcgaaggtctctgatttttgatatgatggcgtttggactcgattcgagcctgcagtttcgattgatatatactctgttgttgtatcatttcgtacagtagttttttttagacttttgcattctgatgggatctttcaaatttaataagtcagtttcagtttatgcattgatcattgtttgatatcatacaactctgtggtgttactacttcaaattagttctatttgatgattttatatataaatttcaagtttgatttatatctaatttggttttattaaactcttgcaaccgtgggctttccgtcttcaggatgcttcaagtggggtggaatattggagcgaccatattagaaatgattctcggtagcccatggagttgatccaaataggcaaggtttgtgctaatagatctgtaagctcaaaatggtagagctctcattatgagaggttggtggttcgaatccatccagatctgtcgactttctatcctcttttacctttatcatgtcattgtataacacaatatttcaaatctatgtgtgttgaatatgatctgccgatgttattgctaaaaccagggcagccgtaaaagggcctctgtaaaatttagcatctgccacggaggaaggtggaattgatcatttttaaagcaacggcgtctaaacatggactgacatcctaagtcctaactagttgtgttatttggactacaagcaataagcaaggagcataattcacttaacagtaataaaaaaacatactaatgaaagatgactgcaaaactctgttaatcattgttgggttatgatatttatcaaggctaactcattcaccatctctatgtattcgtcatttcttagttgataaagaatatttttataatataaaaaaaaagttaaggtaattaatttcatattttttaaaggaactttaaaaattcatgtactttcttaaacaaacaatgtcatattgaatatatggtttaaatatgttatatatagaggtggacaatccggtttacttggtttggtttttaggttttagaaagagtgaaaaccagtgttacattttcgttttgctataatgctagtttttttttttttttttttttttttaaaacctagtattaataatttctaataataatttgtgtgatacagactattcaatattataaatacctttcattcatatagataacattatgcatataaagttttgttaaattccagttgattgaggtcggcaacatttgaatactaatattttttatgtggtaacaagtaacaacaacaatttaacaacaactgataagatgttctttcgattatatgaagaaaacgtcgactccaaatacagagaaactatcaatataaaataacattattctcagtgtatacctatttgatagaagaccaatatatatcttggtagaagagatgatatgaaagtatcagattaagaaaagatttggtgtcggattaacgtcacatggtgttattttaaattgtatgccatttaataatcgtccattgtcaatgctgttaatataatacaaaaccaaatatatgttaactaacatagtccaggaaccgtttaatttgattaaaccaaatcatacgcacatgattgcgatgataaaccgaatctttaatattataaaaatcaatagatcgagtaaaacgttacattttaattattattattagctgatgctgtcctttatggacttttcttcttcgtttttttgttcttctacctaaaaccatgaaagagtggtttgcacataaatacataatgaatatagtatgaaaaaactgttacatttttttaattattttgaagctaattagtgaactcaataagttttctaatcataatttacctgttctctatcgtgacacaataaacaaagacagataagagttagttaaacgtgaaagaaggttagaattttggaaaatgaccaaatttgttattacttcaccaaattcggatcttgtcctcttgtcataaaatcatttcagatctgagttatttggtccaacgccaatactgaaaattaatgttattaaagtaaatcatatttattattttcaaccaatggggcctttcacaataacaaacaaagggccagctttaaagttttattgaaattttacatgccacataaattggttaaaatacattttcttcacgtttctcgctttttaagtccctttgaagtgggaatgatactcgcgtgacgaccaaactccatcgagcctctctctctctctctgtgatcagtttaatctactgaaagaaagaaagaaagaaagaaagatccgtattattaggtaagaatgagattcccttttacgtttcgattttgattcgtttgtgtttgattctcgatcgttttgcttcgatttagcttccttctgtttttacaagtctctcttgattagaaatgtttaggtttcaatgtttcatgatcatatttagaaaaaagtttcatggtgaccaaaaaagaaagaaaattttgatggctgagagatgtcagagtcttgttttgtttttttgataaattctctgtttgtgtgcttttaaaaagtcaaatataagaaattctttgaatcatttaaagccgtatttatgtccttttgacaagtcgatttaatgctttctagaagagagtttatcagatgttaagaagattcaaagttggattataacgaaaatttgtatacctcattagagatttttcaagtggtaaatactaatagaattcatgatcccgttttagatgtaagatttggttgtgtttatcagttttctattaatagccgatattattaaaaccttttgcttaatcttggatctgatttaatttgctttaaattggacttgaaagaaatctgaatttgatttgatcgtttctaggcttcgaagctgtctcaagattgttgtttaattaaacatgttcagaagaaggaatgctcaccaactcgacaatgatgattctcaacaagataacaaggtacaataagctgcttctttttcacactatatgaaaacattaacatatattttggaaagtatttaaaacacttgtacaaatttcaggttagagaattgaaatccgcgataggaccattatcgggacatagtttagttttctgctctgatgcttccttgaggagatttctagatgctcgtaattgggatgtggaaaaagccaagaaaatgatccaagagactcttaaatggagatcaacttataaacctcaagagatccgttgggtaaatatttgactttattatatacttcattttaatcttcttgttactttgtatttttttcttactttttttttaatcatcttcttctgattctcttcagaatcaagtagcacatgaaggtgagaccggaaaagcttcaagagctagttttcatgatcgacaaggtagagtagtgcttataatgagaccagccatgcaggtaactaagcccattgtcacctttatgaatatttttcttgagttttttttaaaaatgatatctcacttaataaaaatgaaacagaactcaacatcacaagaaggtaatatcaggcatttggtgtatcttcttgaaaatgcaatcataaatcttcccaagggacaaaaacaaatgtcttggctcattgatttcactggttggtctatggctgttaatcctcctatgaaaacaacacgcgaaatcattcacattctacagaactattaccctgagagactcggtatcgcctttctctacaatccaccaagactcttccaagcagtctacagggtacacaaaaaaaacattcgtcattattacaaaaccatcaaaatggtctctcttctctttttctttaaaaaggtttactatatacctactatattctttcatgtaggctgctaagtacttcttggacccacgtacagctgaaaaggtgaaatttgtgtacccaaaagacaaagcaagtgatgaactgatgacgacacattttgacgttgagaatctccccaaggaattcggaggtgaagcaacactagagtatgatcatgaagatttctcacgacaaatgtatgaagacgatctcaaaaccgcaaaatactggggactagaggggaagcactatccgaaaacaaacggtttctctccatccgatgttgttcctgagccggcgatagaaatcgcatcagcagctagctgagagttgaacgatatatacacacaagagcaagaagagaagaagaataaaagggttattctcattcatagaagaaaagccaatagaatgtgctggttaacttgatgatcaataaagtttcaaatagtctttgcctctttttcttattagtgagccaaacactttgtaacgtttttaattagcagagactatcctgtatgtgtgagagaatattgttaccatgtgtaatactactagttttgtgttattagttgaagatatgagattatccttttagttctattgtttctcaagttaaatacagttatgatgaaatcagagaagttattgtcgtctagtgaggtgatgatcaaatcttagactttaaatataatattaaactttaaatataatattgaacttaaagagaacaaaaggtcccgtagctcagttggttagagcgttggtcttatgagccgaaggtcgcgggttcgagccccgccgggaccatttgtccttaattcatttaaatttttaaattttacgattttttccttttttttcataatttatcaacgcacgttgtgaaaaaaataaaaaatcaatcatctctgttgtaattggattttgtaacatgatgaatgcgtggtgattcccagaagaagaacccagaaatcgatcgaagatatggttcacaacgcttatgattcgtttcagcttctcaaagattgtcccgctaggatcgatgctgttgaatcctacggctccaagctcttcgctggatgttatgacggttctctccgcatttactctccaccggaatcttctgcctccgatccgtcggagctgcatcaagagacttacgtgctagagaagacggtagctggattctctaagaaaccgattgtggcgatggaggttttggcttcgagagagttgcttttgtctctctctgagtcaattgcgtttcatggacttcctaatttggagactgttgctgtgattactaaagctaaaggtgctaatgcttattcttgggatgatcggcgtgggttcttgtgtttctctaggcaaaagagagtctgtgttttcaagcacgatggtaaaaatctctgaaactcaactttgaatcatgaggattggattttgatgaaatgttgtttctgttgattttttaggaggaggaggatttgtagaggtcagagactatggagttcctgatactgtcaagtctatttcttggtgtggagaaaacatctgtttaggcattaagaaagagtatgtgatacttaatactgctaatgggactctctctgaggtgtttccttctggtagggttgctcctcctctcgtgatatctctaccttctggtgaacttattttgggaaaggtagttatgcttttcctttttcccccattcaatgtatttgttcggttttgaaatgttgtcttcattagtttcttcttgtacatgtaggagaacattggagtttttgttgatcaaaatgggaagctccttcaaacagagagaatctgttggtcagaggccccaacgtctattgtcattcaaaacccttatgcgatagccttgttacctcgtcgagttgaggtatataaggttcctgcctagagatattgtagttttgctttccttctagtttctggatacctgttatgtgcttattccttttggctttgttttgataggttcgcttgctccgaagtccatatcctttaatacagacaattgttcttcaaaacattcgtcgcctggtcaagagcaacaatgctgtgattgttggtttggataactctgtttatgttctcttccctgtctctattggtgcccaggtattcactttagccctgagaatattgatgtttcttgctgctgctcatggtttcttgtggatgaatatgaaaatgtgtttcattttacctaatatatcggttgaatatgacactatttcagtattctttgtaaagactttgattttactcgcagtagctgcttttgaaatattttgaaaaggttgagtttcattgtagattgtgcaattaacagcttcgggaaattttgaggaagccttagctctatgcaaagtactcccccctgatgagtcaagcctacgagctgcgaaagagagttcaattcacacaaggtgtgtaaagctagaagccctctcttccttctactagttacacattaatagtgcagttccatgggaatctttttgttcatatttgttgtctcgttatcatgatacagatttgctcattatctttttgagaacgggagctatgaggaagccatggaacacttcctcgcatctcaagtagatatcacgcatgtactttccatgtatccatccatcattcttcctaaaacaactattattcctcaaccagataagatggtggacatttctggtgatgaagcatctctgtcaagaggttcatccggcatttcagatgatatggagtcttcatctcctcgatattttttggaatctgaggacaatgcagaccttgaatctaagaaaatgagtcacaacactttgatggctcttataaagtacttgctgaagaggaggccggctgttatcgagaaggccacttctgaaggaacagaagaggtcatttcggatgctgttggtaaaacttacggggcaaatgattcatctaagtctaagaagtccagcaaggtgcagatgatttatcttccgcgatacctaattgatgactagttcttggatattaacactttataagcttttgggagctactgactgactaattccttggaagttgatgcatggataatataagcagcttcccttgatttgtacgtttgatagtaatttgttggggacttaacatctttttttctgcagggacgtggtatgatccctcttaattcaggtgcaagagagatggcagcaatccttgatacagtcttctccaagcacttttacacactggccagtctggagctgctatagagttattaaagggtgtcaactacagtgacgttaagatttgtgaggagattctcatgaaaagtaaaaattattctgcactattagaactgttcaagagcaattcgatgcaccatgaagcccttaagcttcttaaccagctggcggatgagtctaaaacaaaccagtcacaaactgatgttacacagatatttagtcctgagttgatcatcgaatatctcaaggcaggttttctcggtgctaacctttcgtctttgtctatctttagattctaaatggttatagaaaactacaaatttgttaaccacctttgattttggtactgactgaaaataatgagtattctaagaaacagctgtgagatgctaactttctgttggtggatttctctctgcagcctctctgcaggactgatccaatgcttgtcttggagtattctatgcttgtcctggaaagctgtccaactcaaaccatcgacttgtttttgtctggaaatatctcagctgaccttgtcaattcgtatctgaagcagcatgctccaaatatgcagggtagatatttagaacttatgatggcaatgaatgacaccgcagtttctggaatctccaaaacgagatggtgaggaaaccacacttatgggaagcattttcagtgagtttacgttacatattgctggcagtaacaatttggatgatgttacaggtacaaatctatctttcagaagtgcttgacttgtatgctgcaaagagtgcgcagcagaaatgggatgagaaggatcatcctcctgaaaggaaaaaactattgtctgcgttagagagcatctccggatatagtccgcagcctttgttgaagcgtcttccacgtgatgctctctatgaagagcgtgcagttatattgggcaaaatgaaccaacatgagcttgctttgtccatctatgttcataaggtacccatcaacatgagcttgctttgtcgatctttaacatgaaccaaatatcattaatttatttcaccaaataatcttctaattgttggccagttgtggtaaaaaacactttgatatgcaaatgcattgttagataattgtatcattgtgtagataagtatactctgaaactatttagaactcagatatcggtggattctatggagtgttgttgcttatggcttaactctttgtttttttctttctgatagcttcatgcacctgatctggcgctggcttactgtgatcgtatatatgagtctgttacttatctaccatctggaaaaccgtcaagcaatatctacctcacagtgctgcaaatatacctgaatcctaagaaaagcgcaaaagactttgcaaaacgaattgtagctctaggatcattcgaaagttcagacaccacaaaaatgatggactctgttttatcttcaaaagctaaaggaggccgatccaagaaaattgttgcaatagaaggcgctgaggatatgcgagttggtctcagtagcagcactgacagtggaagaagcgatgttgatactgaagaacccttggaagaaggagactccaccgttatgatctctgaagttcttgatctgttgagccaaaggtgggagaggatcaacggtgcacaagccctcaagcttttgcctagagaaactaaactccatgtaaatgttttgaatctgacttatacttatcccataactacttactagcattttattgaagctcacctattctattatccaattcctacagaacctgcttccgtttcttgcaccccttctaagaaattcaagtgaagctcacagaaacttttcagtcatcaagagtttgaggcagagtgaaaacttacaggtatgtttgtgtttctggaactattgacacctagcattaaaagaaacccgtatgtgaaattgatgatgtgaaacgaataggtgaaagaggaactatacaaacataggaaaggagtagcgcaagtaacaagcgaaagcatgtgctcattgtgcaacaagaagatagggacaagcgtatttgctgtttatcccaacgggaaaacgttagttcactttgtatgcttcagagattctcaaggcatgaaagctgtttctaagacaacacatggaagaagacgatgaggtaatcatcaattactgtaacaaagagaggtttaagacactaaaccatcttttcttttttacaaaactcccaaagtgcaattaaagaaaaagctcctttcgtgttgtttgtctgtttatagagagagatttggagctacttttttggtgttttcttctgtggttttttgtgtttggttcaaaatgatggtcttgactcttgacaaaaccagtttggctcttgttgtaaaatctgttagtttatataaagacttttcatttttgtgtaattgggacttgtcgaagaaaataacgaatgttagtgcgaaatctaacaacattcaaccaaatgaaggtgatatgatgggccaagaaacgtgggctggattaggcgttatcaggcttcaacagctcagttagattataataagattagaagtcacgtgagtgaagagacatgacatgtaatgtgaaattacgaagtcgaacactttgcgtcttggggtaatcgttagggttaggtttcgtgttctacgaagcaaagagcataagagacagagaggcatcttttgggaaagcggtggtcgccgtatctcaattgaaccaaaaattaaccaatctcaagaccgatccgattctctttgttccctctctctctgggtctcttggtgttcttttaatcttttttactctttcccgtttcacgcattttgtccactcgtgtttggcggcacacgacatcctccaacaagattattgaattgatattcttaaaactcatcaatttgattgttttccttttgttgaacgagtgaggtttatagaaaacacagttgatatttcatgtttgtaataaaatgaaatgaatgttggtaaataagataatgaaactcaaataatagtatatataaacataaaacgtacaatttatttattcttaatatttttttttttagttgagagcttataaaattagtataaaaacgttacacattttgacgtaccccattacgataattgatccaaaaatgggtcggccgatcaaatttaaaattatttgatacaaaaccttactttgaaagcaaaaaaaacatagatctgttcttggagataacgtaacttcgttatttgatccaaaattagataaaaagagaaagaagataaaggataaagaaataagagcttagagctacagagtgtactcatttgatgggttcattctctttgtaccctttttcttttaaattttaaattttggttggagtttgcttctttgactaaatcaatagaaacatagaataactctcaccaagctaaagaaagaacacaatgtaattgctttaaaatcattgcaaagtatctcactttgtctttattcctttttagttcacttataacttgaacattggctagttttgttcttttaactccttaaaagcaccgatcttggcgattacgatctctcatgcttgaccacaatcgtaacaacaatattcaatcacatacaaaacaaattttttgattaaggttaaaaacaacataattatacgtcatatacaacattttatttgtattattacgactgtcgttagagagccactgaaattgtagtgcggtgaacattaacagtgtcgcacactatttgaatttagaacataaaatggattcatgcatatatgagagtatgacacgtcgaattggtgaagcgagcgatgacgtgtggaagaagagattcggaaagagaaggagcgtttaatttcgagatgatcgtgatcagagagagaccagatccttggaagaccgtgacattgccagtcacgtgcctcttttttgactaccttcctctctgctgctttaactgcagatgtacttatcatttattttcttactttaccatttaaataatatatcaaaacactgtagtttgcttagcattgttaaacaagactactcacttggtacttggtcgtggaatattatacggtatgcaatgaatttgcataataatctagattcggagcagtatcattaattaattttgttaggttaaaacgttttgttattaaaaatcgcttagaactgaacaaaaaccaacacatatttagaatattcattgcaacatctttgtagacaaactaaaggagcaaattcacatgtaaatctaaagaacaaaagaataaagcatagattaatcatacacacataataagaccgggaccaaattttcctcttttgccaagttcccaaattctctataaatacttcttgtctccatttcacaacagcaacgtggactctttctttgttttggctgactcttctttcaccgtttccttagagaacttattcatctcataaacaccacacacaacacacacttctctttctccttctctctatatattttaatatcaactttctagggtttccaagttcatatatagtgatgggtttctcaatgttcttctcccccgaaaacgacgtcagccatcattcctctccatatgcttctgttgactgcactctctcacttggaactccctccactcgcctctgcaacgaggatgatgaacgtagattctcgtctcatacctccgacaccataggctgggacttcttgaacggttccaagaaaggcggtggaggcggcggacataacctcctcgctcgccgttgcgccaactgcgacaccacttctactcctctttggagaaacggtccaagaggtcccaaggtatttaatatgtaacctttacatcaaatattttatcatttcttgatgtgggactaatatttctctctgtacaacaaaacaaatattgataataactttatatgatttttaatttggtcagtcgttgtgtaatgcgtgtggaatccgattcaagaaagaagagagacgtgcatcgaccgccagaaactcgacctccggcggaggatcaactgcagctggagttccaactttggatcatcaagcaagtgcaaattattattataacaataataaccaatatgcttcatcgtcgccttggcaccatcagcataatacgcagagagttccatattactcgccggccaataacgaatactcatacgttgatgatgtcagagttgttgatcatgacgtcacaaccgacccgttcttgtcttggaggcttaacgtcgccgaccggaccggccttgtccacgattttacgatgtgatgagtgatcatttcatagatattccccttataagtcttagccttggataccttttaacaaaaaagaaaagtcttagccttcgttaaattctttattttactttcctttaaatataaatatttaatgtctttttttggtctctgtgtaagtgtttttcttaaatttataattcgtatgatggatgctacttgtgttttccttgcatgacttttaaaatgttctctcgggtaatgaactaataattcgtgactttataacctttacatgatgtgtgtcctactttgaccacgattcagtgatatactatacatatacagaatacatattcattcctttaatttctttttaaagcatctttgggtttttgtacggagaatgtgaatattttgggatgcagatactatcttcacaaatacttatatcttaaacgtttaatttgtgagtttcttttccaaattgaaataatcaaatacttggaccgaatttgaaaattaagccaacaaatatctgcagggtggccaagctgaatgtttgtcgtgttttgcccaaattgtcttggaaatttgaccatcaattaggtcttcgtgtgctgctctgcttaaaactgttgctgccaactgcatgtgaagaatatttatctttttcataacgtgtttagttattgtattaaaaaaacgttagtttttatttgattgtttccggaaacacaatccaagataataaagtgttttgaaactctataacaacagaaagcgagagtaacaatttttttttgagtcatttatgagagtcaagacgaaaaaagagtcactaaactactaaatttgtcttccaattagaataataatgaaatgtttttctattttttcacgaataaaattaaatgtcttcagaatttctactttccactttcaaccgctcctgaccgggaatgagcatataagttgcgattttatttgggcctaagcccattcgatataaattccattcaaagtcaaatgaaattccaaattgaaacgattttttaaaaattggaatatagaccaccgccagattctatacctataaaactctattttaccaagacctacatatacatcatacaaatatacattacttatccgctacgcaagaagaaactgtaacatacggatttaagtaggatgtttaggtcatccaccgggtatctccccaactgtaattagatccaacaaacgctatcttgtcatcattcattgaaaagctaattaagtcattttctcaaaatcatgcataatgacaaacaaacaaaaaaaattaccaaagcaactatcaaatggtggtaatctagtgatttcggtctatttaatatcataaatggaattttgaagggatttgactgtactatgacacttttagtttctagaattgttgtgttcttgtactggttaagaggctaattaaaaaaaaaacagaaaagcatagattaacaacccaacacctaacattttaacaaattccaaatccaagtgccaattctccaagttacatttgaaaagatcgaatggaaaaaatgtttatataatgttgcatcccatttgggcttctcttcaaacatctctcaacaacaacaacaaaacaaaacttgcacaatggtgaactttgttgaggtacaaaaaccattgttgtacggtctgatgaaaatggctggcgtcgttccttacactttagagatcgaaccagggacgaagatcaacttttgggtccctaaggaaaccctaaagaagaattccggtaccggaaaaccaacgaaacccgataaacctaaaaagcctgtcgtcttgttaatccatggtttcgctggcgaaggaatcgtgacgtggcagttccaagtcggtgcattatccaagaaatactcggtctacataccggacctcctctttttcggtggatcctacaccgacaactcggaccggtctccggcgtttcaagccgactgtttggtcaaggggcttcgtatcctcggcgtggataagtttgttcccgtagggtttagctacgggggcatggtggctttcaagatcgctgaagcttacccggacatggttagagcaatcgttgtgtctggttcgattcccacaatgaccgataccattaatgaggcgagcttgaaccggttagggtttagttcttccacggatctcttgttaccgacttctgttacgggacttaaggctctcttcaccattgctgtgcataaacccttgtggttccctaaacgattgttcaaagactacatcgaggtgattattactactcaaagttaatttatttattttcttttcctttagtgaaaataacaattccgtagcaaatgattacattttggagtaagaaagcatgttagtttttctttctttttttttatttttccacaaattcacattattagtatattttactgtcgcaaggacatattcatatggatcacgtttccaagaaagagtgattgtgtgagttaggtgggacttgcgaagtatacttacctctattcgatcaactgaaaatgaattggaactttaaaattaaaattccaatttgttgcctaaaaattaaaattatatacaatagaagtaagtaacgaaaaatagattctagataaatctacatttctggtaggttagctattaaaaatattttattttgtcaaaggttagcttaatttgttcaactactctcaactacatctcgtatttattttctaggtaacatatgtttttttcgtcactatacttgtctaccaatgattgatttaactagagtttctattatactatattctaagagtttttcgttgaataaatgtgaacgtatggtcctaaattaagctttactggtgaacttggtaggtaatgtttaacaacagaaaagaaagagctgaactgttagaggctgttgtggtcagcaacaaggaagcgcaaatccctcatttcccacgggtacgtatgaacatatgtccacatccgtatgatttgtaggatttagactctatataatagcatttcatgtgtgtatgcagaaaatacatttcttgtggggtgaaagtgatcaaatctttgatctcgaattggctagagacatgaaagagtaagtttgaagatattataattttataatttctgccattttgaaaggattttttggtgttatcctaatttttgccgttatgatttttagacaaataggtgagaacgcaacaatagagagtataaagaaggcaggccatttggtacaattggaaagaccttgtgtttacaataggcgtctcaaaaagtttcttgcatctattcactcggaagataaaattaaaatgctacattaagttctatttgatcctgatatactgtatgtatggatcatttgtgtcgagattgaataattattgggtttgtttttacttgatttgtctttttgtcatttactatgatcacaatatgtaatattaatctttatgagactatttgattatgagcattattgcatgcacactctttaagtattagcttaattattcggtactttatgtcaatgtcttcaacattaaatcaataagtaacgcaaaaactcagtttctctgtttcgcaacaatgctctctgtttcactccctcggcacaaaacaattaaccttttcttccgatcttgttaaccaaaagataagaaaacaaaaacaaaacacaaaagaagatgatctaccatgttgatagatcgagagtaaagaaacaactcgcctttcattgagaatctgattttgcaactaatacaagcaactccaccattcttacatatacatatactgctgatatacacatatatataagaaatttattgtacaaacgaagatttgaaatctaaatgcaaacttaccctatacggctatacgttataattttttcagttctaaagctcagcgctacggtctctcatatatgaaccgtactcaccagcagcatcagaagccttctcctttgcactctcataagcttcttttgtgttctccgacatagaatccttaactgcaccatacctctccccaaccttatgcattgcctcgtcgaatcttccggctgcttcgctccccgattcgtatgcatcatttgctttgtctttagcatagtccaccgctcgccctgcggtttctctaacatcgtgagctttatccgatgcaatgtctttagcattcttagatccttctttgaatctttcgtatgttccatacgcactatctttagcttcaccactcgtatccgtagccatcttaatcacatcctctgctttgttataggcagcgtcttttgcgtgagctgccttgtcataggcaaagtctttggcttgaccagccttctcagatgctgatcctgctttgtcgtaggccatgtccttggcttgacccgccttgtcgtaggctgatcccaccttgtcgtaggccatgtctttagcttgacccgccttgtcgtaggccatgtccttggcttgaccggccttttcgtaggctgatcctgctttgtcgtaagccatgtacttggcttgaccggtcttatcgtaggccatgtcttttgcatcaccagccttatcataagcataatgttttgcgttatgagcactatcgtaagcagatccggctttgtctgatgcaaagtccttggcgtaacccgcattgtcataggcggatccagccttgtcataagcgtagttcttcgcagattcagccgcttcttctgcctcagctttcttgcctcccaatcctctgttacaatattggattaatcatctatatattatcattcttaaatcacttcacagtttgaaatgcaaatgatgcgtaacatgcgtttatatatatacatttcaaatttctcttaaaacaaaactcagatctacgtttacaatttgaaatcaaacactatgagaagatggttccattagaagaaaccaacacagatccaaaatagaagtatgatcatgcctaaacaaaagttaacgcttacgtggaaattttgtcggaaaccccaaccagcccaagaggcggttttgtcctttgtgtcatgagccgcatcggacgccattttcttagcggtctcggctgcgtttttagcatgctctgcttcgtttctaaccatatcctctgctgtctccgttccccatccatagcattgcttctgccacgtcagcgtcaccaccgtcgtaagcatcataatcatcatcaacgttcttctctccattattcctattctttaaaattccgattttttgttttgtttcttggttccaatcttcatggaggaagtttctagttatagatgagcgagagagggagagatcacattcctttctttcactagataagcggttattgtaagacacgtggttattcgatgattacgtggttattcgatgtttacgtggcaattaaagaggcggttatgctggaagtgcttgcgacgtgtccacttgtggttcgattttgtagggttagtgtctcccgacccgaggtcacgtggccggtcgcgtagaggaagtttcaatacttggaaagattaaaataaccggtttagaaaaccgaagccatgcgcttagcagggttacaaaccggataatccagtaaaaaggtaaatcagaaagtgtttatttttttacctttcttagttaatccaatgttttttttttgtcatctcatttttaaagaaaactgttttttttttggttcaaccaagaaaattgatttaaaccataaaaaaacaaaactaagcccaacaagaaacccagcatgagcccaaccgaaagtgagagaggtgaagaagacaccaattttaaacgttttgacgatacaattacaaagttttctaataagataagtcagatagtgtaaactttcacaaaaaatcaattatataaaataatttaaaatatttataagaatcaataatgattattgtaatattcaaacattttatttaagaacaaagatagttaaaaatcaacaatatttgagtataaatcattttatttatatcttagaaatgttaatttcaataaacataactcactatcattatgaaaaatatatctagtaaatggtatatatctaaattaaaaaaatttgggcccataactcaaaatcttttgaatttcatttaataattttttttattatgtaaagtacaactgtatattttatctagtaatgattgtgatatctcaaaaatagataaattttgttttactgtataaatattacttgcattagctgtatacaaacaaataatttaatggataattttgttcaagatttttcccaaaaatatagattaagtattttaacaaacagctcataaaattttaatgtgcctctcatgggcagttggtgcatacatttgtcaaactgttatgcatttaccaactaatataatgatattgcatttgaaatatcatgaattttatatccttaagaaattttagagataattatgtccttaagaaatttcagagataattatgaaatattcctcaaattggaaaattaattttttggcaaaattaagggttgaaggattatgtttacttataatggacctataatgtattacatttccatatgtaatacacctgtataaatataaagaacatattttatttcttagcatcaaatttgtcatttgtttattcaaatttttgagaaaatggtgagaagtaccaaaggtcgtcagaaaatagagatgaaaaaaatggaaaacgaaagcaaccttcaggttactttctcaaaaagaagattcggtcttttcaaaaaagctagtgaactttgcacattaagtggtgcagagattctgttgattgtgttctctcctggtgggaaagtgttttcttttggccatccaagtgttcaagaactcattcatcgcttttcgaatcctaaccataattctgccattgtccatcatcagaacaacaatctccaacttgttgaaacccgtccggatagaaatatccaatatctcaacaatatactcactgaggtaaacaattttgttttaaagaaaaatgcaagagaattatatatatatatatatatatatatatatatatatatatatatatatatatatatatatatgccaattctatgtctataacttaatttgttaagggaaaaagagaccatcaatagttagattgttttcaaatcgtatccatagttagattgttaaagatatcaaatggtatccatagttagattgttttcttcaaaatgttcaaatatataaaccatatctcgtttttttcacaacatgatgaaatgaatctcattgcaggtgctggcaaaccaggaaaaggagaaacagaagagaatggttttggacctattgaaagaatccagagaacaagtaggaaactggtatgaaaaagatgtgaaagatctcgacatgaatgaaaccaaccagctgatatctgctcttcaagatgtgaaaaagaaactggtaagagaaatgtctcaatattctcaagtaaatgtttcgcagaattactttggtcaaagttctggcgtgattggtggtggtaatgttggcattgatctttttgatcaaagaagaaatgcattcaactataatccaaacatggtgtttcccaatcatacaccaccaatgtttggatacaacaatgatggagttctcgttccgatatccaacatgaactacatgtcaagttacaacttcaaccagagctagagtctgaagctagaagaacatcctaatcaatatttgcgttattttggctatggttactgttaggattgttcttgtattgtgagacttaagtttgttttttcttttaatttgtttcagttggttggtttttcattttattcgtcgtttgttttcctttgtttttggatatttttgtatccagaataaatttatttatcctttaattttacttatatttttatttttattttgctatttaagcttaatgttatatactgaaatcaaaccagatttacaaatgaacaaaacaattttttaagaaaccctcatcagacagaaatgaatctaatgttaacaacgagaagtgttcatatgtaagacttcaagattctgtaaaactctttaacatgtttaatctaaaaattcaattttaggactcattttaaaacaatcagattcttctttctgatcaagtaaatgacatgtataatcaaaatccaaatgactaagagaagagtaatggctgaaaaccttcagaagcaagcatatgccttcggtgatgttcttcaaccttatattcaacaatctctttaaaaagctgtgaatccaaaacacaatccgctcgtccgtacactccagcttgtactccagccacaagctttgcaatctcacggccagagaatccttctgtcttctttgcagcctcagaaatcactttatcagttaagtcttcttcaacggtaatcttctgtgacagcttcttaaacaaatgactccatttcggttttgtgtcttcgttgttatcacccatctttagatatttgttgagatagagattgagaagcttgaaacgttcttcttcccctggaagtgggaactcaatgacttcatcaatcctgtctgtaaccgcactatcgagatctccacgtctgtttgtagccaagacaagaacaatgtcccgagattgatcaccagttcggaagagcaaagcgttcagagcactacgttgagcctcactcatgtaagtgctgttacgcctgcaaagaaaaaggaatcatctttcttgaaaccaagagaaaaagttgcaatctttttgtcatattactgtcaaaaacctaaaacgctaaaacatccactaatccttgtaaagaagagaaggagatcttactcgcatagaaaagcatcggcttcatcaatgaaaagaagtaagcctttgttcgatttcttagcccaatcaaatatctgatggattttagtaacagcttgtgatcccaagggagcaacatcacctcctgtcatcatagcataatccagaccctgcaacaaataattgtatctaagaactcatgaagacggtactaacaaagctactaccatagttttgataataactcaccgatttccgagctatttcccttgccaccatagttttaccggtaccaggaggtccataaaacatcatgttgcggaatggtgcttgatgggatttggtgtttgctgtagctctagcgagacgctcgattcgtttcttcaaagaagtatggagaattacattatcaagcggctttttgccttctgctgcagaagctgctgcagcccctgagatcctgttcttaaattgagacactgagcctgtccatggaaatctacgcatggaagattctcgaataagtgacggttgtccaagcatcctattaatataaccccatgtaactctagctccttcactgtcaaacacaaaaagattcatgaaatagattacattagaaaatgataaaagaatctaagatcacttgagtcaaatcagactggttcagagaatcccataatatccaatagcttatttggttcggagatgcataccgagttgtataaacccctgcagctaatgcagtagctcctccaacagtcataatcagcttatttcgatcagttaataaggtcctgaatccccctgccaatttcatatagaagtaagcaaaaggaacaaaaagaactgatctttccttattcaaaatcaaaagcaaaaagatatatttttcttgatttatcagtttccataccttcgatgtgactgaacattgtgttgattgcagcaagccacttctctctttcaccattaatcctttccataagcaatcttctgttttgctcttcagtaagtttggcttcatgagcccgaccttcagcttcagccatggccttgacacgaatcgtctctcgctcaagttcagctctctctttctcagtttggcgatgctgagcttggatctgttcttctgtggcgatttttgccttctctttcctgatagaagacgcctcttgcatcttaaccaattccacattatgatgcctctgagcttcatgatctgtctacattactcccaaaccaaaatcatttgtaagatttttatacttcagaaagattaatccatctacgagaactcatgagaaaaaaagaataacctgctgtctctttctggccaattcatcctcatatcgcagattttgcgctttggtttgcgcctgtgtctgcaaaagatttctctggtcctcagccaatttctgctgtctgccctgcccatttcaaatgccccataaaacaaatcatattactttgcaatcatgtcaagaatcagataaaaaaaaatggcagaaaaaatggaaaattcaagtttactcacaatatcattgtgtgcttgaatagcttcgtaatgagaagtctctgccgttaattcagctaaccgagttttctcctgcttcctcatgagatcaaacacctaattgaaaaaccaagaacccaataagctaagaagaaaccccaattctgcaatcaccaaaagaccaatctccacagatcaaaatccaattttttcataccatttttgctaaatcctaatttcattccctaaatagatatgaagggtcacctgcttggaatggggagagctattgatatctctaagagctttagcagctctctcaagagcctcaggatcaaaacccgatcctttaggctcatcaggctctgctttagacttcgatgaagattgattcgccggagaatctgacggaggaggagaaggagaagaagaaaagaaaggaaaccggaatcgagaagaatcggcgtaagcacggttctgagacattgacattgaagtgaacgcagcagctatcgccgccgcggaacacaatctagaagcagccatcgattttgataaaaagaaaagattgacccttattcagagattgagaaatagagctaaaggttcatgaaagttgggaaattgacggtgaatgatggtcgatttctgggttttgccgaccataaacccacggtggcagttagcttttagggtttaaacggtatttttcaaaaggacaaaaaataaaatgataataaaatctcgaccgtataagtttactttgcttggagaataatcaaaaagcagatctgggcctaaatataattgggcttattattgcttggagaataatcaaaaagcatattttcataggaactattattgggccatgttctaaacagattcttttttttcttaactcgaaccacgactaaaccattagtgtaaaattttggtttttaaaaaaatgtttgaagtttgctaagttttgttctcctccactcagcgacgaaagatatatatttataagattccgtttgtgtagatcacgggtacgtaagataattgttcttcagataattaatatagttagaagaaattattccacaatccacattcaaattattaaaacgaccaaatactgattagtatattctcgcaggaatatcaaacaaaaacacaccatttgagctagtggattatggatataaggattattcgaacgtacgtacttgaaatttttataagtttaaaatatcggctatattctactatttttgtcatatttttaagtacaaatctaatccacttaattatactacataattttaaactaaacatttttttttttatataattgtaatttcatccatttagttgaaagatgaagttcgaagttgaaataaatggttatgcatgcaccgtataaaaaaatccacaactttaatcactttgactgtaaaattatcttttgtttaatgcttttttttgaaaaaaacgttagttcttgtctagttctacttgcaacgattttgaacgcagtattttctataaataactgaaagacatttacggttttttagttttcaaatttttatttatttagttcttcattgttgttagtatgggactatgggtcgctattttgtgccaggaatatatacgagacttgtgctttaaaatattacagaataatgtctctctttttcagaaaaaaacagataatagtttgtcttttctttttcttaaacgaattcgaattgtaattattaatatggactgtataaatccaattatccgtcatggttcatatatgggtcgcaatttttcggtatacaaggcatgtgctctaacatattacagaatatatatacccctcttgagctcttcttttcttttagaaaggtatatgtaatgtatttttttattatttttttgcacaaaacgaataatactcgagatgaatcaaattgacaaaaagtttatagctcaatagggacctctcatcttgactttcaaatttagtattaagaaaaattgtaataggtaatctatcgtttctgttactctttatcacttaaaaataaaaatattataatatcttgtaaaatagtgttttatcttataaaaataacattttttgtttgttttaaaaacacacgataaatgaatttgcttatttacaattttacgatatgccgtgtttgcatgcatgcatgagtgcatgtactctccttagttatagtagttgttttaattttcatcaacgcaaatattataaacgaaaaccataaataaagctatgatatttatatgacaacgaaagttaaaaaaacaaaacaaaataagaacgctacattttcggggacaatagttatgaccaccgtcgattttagcccgtttgtattcaaattacatcccatgcaaaaagtttccccccaaacacagacgcgtgtatatgaggtatctgacgagaactaaacgatccagtattgatttatccgtaagtaaatacacaattttctactctattacttttatttgatgatctcttgatttttctgcgaaaccgtatcaaatttcctcaaattacaatgttcatggagattctcatcaggctacgcgccaaaacgacgagatgagtgcaaaagtgaatcaaaacatgttctgaatcgttttttcaggagttttgatatttggcctatcgatcttgtttgttagacttagatcgatttgtaaagatttgtgtatggatggaattcaaggagaactatagtttgtccgattgttaatactttatactatatgaaaccacattgattgatttagataattcttacatattcgtaacacaaaaacaagtaaatacatttagatatctttgcttagatgtgctttgtgaatggttttggaaccatgtccacttcagtagagcctgcaagacataaaatccagatgagttaactacttcaaaagactaaaaagatgtagatatcaaaatgaagaaatcagctagataatcttgttacacaaatttagcaattttaataattctgaactttaactataggctaaccaaaagttagtagagaagggggttacgttatactatttatgtttttgttttttgggggcaaaatactatctatgtaagtggagtagtttttgcaatggtaaagacaagaaacatggaacatgctatcagcctatcactatgtgggactttgatttttgtttgctaaaagacatataaaaagatggatggaagcttttcatcttttcaccaggaaatggctttttgcgtctatgactttttatatatatatatagagctaatgggctaatgatcaatttcaagaacttgacaaaactaacttttgaattctctgttactagattgcttttggccccacagttagaagttgggacagttcatagatatgggaaacggtggtgtttactatatcataaagctagattttttttttctctggcctggtgaaacaagaagacacgcataagaaactggagagtgcatgtctattatttatgaatgctttcttatggataattgttgtgatattctgtttaccttttggagttcctttaatgctttcagtggttgtttccatttgaacggtaattgggatgtggataacgccctgactcaatgtcattgacatccctaatgaggaggctcgtagtgtcgccttacttcttcagctgatttgccgccaacggctcttgcaacgttatgccaacggtcaggagtgtcctggtcatatgtagccaacgccctttcaaataatttgttctccttacgtgtccaagaagcgctagagctcattgagttggaagccatataaaataagtatgtatatcgagagtacaagatctgcttcttgggagggagaaaaaaataagaaggaagatgtatctatgacttgataaaaaaggagttgatttggttagctaagagaaggagaagctccttataagtaggaggaaaaagcatggtgtggggttaagccagttggaagaatatatactttaagagagtgactatttcttttagcaaccacataaagtcttagagaaggtacacacaattgtgaaacaatccaatgaaacttgagattccttgaccttgcaatagagaaatataagatgttttcttccccgtttttcttttgtattaattgctactatatttccgtacagtaaacgactaagtcagtaacccatgcatgtttgtggaccttcccttacctctttaaggctcttgtatagatctagtcatcactagaccgtagtatcggatgcttattataaacacatgacattgttagattatgtttgatgcttcttttgatctccatccattttgattggaaatatcaaatatctgtttatgatggataggttagtgatgatatgtcttttcgtagatgccatatatagtcgaagtcatttggtaatgtcataaaaataaaacacaatcccacttcgtcgattcttgccattcttgtctcatggctcttatagcaaatttggtaatagaattatctgagtgatctcttttatacatttggctcgtgttgagcatctgttgataagaacagaaactcgtgcatgcaacccttattagtgaatatcatcaaactctttacatggcttgatgctctttagctttaaattatattccttccaatgagaagacaaatatcagagtagtactaagaagtgatttggcttaattaataatgaaagattagcccctaaacatgtaatcctctggaccgtgatcacaaaaacattctttggcaaccataagatgataagaaccgaaccttgttaggttatagtattattgattaattcgtcatcaaattagtcaatatttatcttttataggtataggaatatttgctttgtcattcttttcttaaaatgggctaagaagattggctgatttaaaccttatagtaaacttgagcagctacttttgttgcataccactcctttttaaagatgtactccgtttggcgcatgcataaaaaaaattaacgtggatataaaactgtaaagcatggagataaaattctagaaattgttctatttcaaaatgttttctaatgcttaattaaaaattaattttatatacataaaatccggagaatgagttgaaacagttctgtacgaaaaattgtcaatacttgtcatattatttgtttgcaactttattaaaacttaacagaattatttttgtgtataacccttaaaagatattttaatgatagtaattctaaagatatacacaagcgtaagatataaattaagtacttttacaaagacactccaacaaagtgttttttttttttttttttttgtgtgtgtgtttagtttgttcatatacgagatgcatatttagctttggtttagtaatgcatgacacaaacgaaaaaaagaaaagaaaaaaaacagcaccttttcgaggatattcaggtgttcttgtttatatttctctcttatttaacattgagtggcaatacaagtggacaaattccaaatcttgggaagatctcgtagatgaattttatcgacgacatctgcgcctttcctacgcttcttctgctcctttgttttggacattaattgtttaactactctgatccctctccactcgctatgttttattgtacttattattataagatataaaataacaaaaagatgaagatatggactgtatttcttctccaaaaagtttaaaaatatcagctctcgtagtacccttttggtctctattctaagctttgtgataaaacattcttttggcagatactcatctcctttcaacttcatcttcccactcaacaacttgccttcttggaatatttctttggactcttccatttggatccgtaacttcacgtctacgccttcattgcttatgctaagcactcacattcattactcttccattacgaacgtctaaactattcctgcttccaagttttgtatgaataagttgtttctatgtccgcttttggctagtcatgtgatttcttatagcaaatttgtacccaaaatacgttgagattacgttgggtttgatcagttaggtttattatgatttcttaagaacgaaaaacttgctttttccagtgattttgataacgatttcattatttgaacaggccatatatggggttttaccctatacccatttaacctatatgtcaatgttcaacgtactcaattaacaatgcatttgcggatattttttacgtataatgtggggttcctaatactgtatatatattacagtatggactaatagtactacctccctatctaatgacgggactaataatattgttgttgtctcagtccataggggggacaaattctcttttcttctttatttgattagattccgatcttacctgatccttttgaagtggacctcatttgacgtttcgaagatgctcttaattacttcttttcgaggttaaatataaagaaatctcatggtggcgttattatgggggcacaaattaaatgcatgcaaatgaaatttccattgtttaattaccatatatgttcccgaatccacgtattttgatgtcatcataaacatcagaaccttaacttctgtttttggggataaaatacaatgtagtattacaaaaataattcattttgcctcctgacactgcacgtaattgtccggagacgactattttggctgcaatattgtaagtaaaaagtaaaagccgccaaatcatttttgaatacacgaaaaaaatctggatacatgtaataattttattttcgtgttactttttttgttaattttttttctttttacgtaacggaaatgtagtaatcgtatatatatacgattagagttgaaaagtaggatgatatgactgcgttaatcgtaataatcaaactattcacttaataaattttgtttccatgtataatattgtaaattcgtttaggatgatatgactgcgttaatcgtaataatcaaacttattcacttaaattttgcttccatgtataatattgaaaattcgattgggatgacgtaagtgaatatgtgcgttacaaaaagtttaatgcggatgaaagtttgagaaaaaaaaaagttgaccaaagaaaaatatctcgaactatccgaatagggataaccaaaaaacactacatgatgttataagattggaaaagagctaacataattcctaagaaaatatctcttggtgattacatttgcatcgaagactaatcaaaattttgggctcaatccaactttccggccatggctataaatttgttaacaatttcataaattcttcttttgactgttttgtttatatgaagaaaagaaaagattgtgaaaagtattattatacataaaaccacacaattttctattaatcaatctgtttgttatattttaaaaaaaatcaccaaatcatcgaattttctatttatagctgtttcatcaacttggcaattaagaaatttcatacggtccattaattatctattaatctaatactattagtgggcttgagatccattgatcattaacttgtcatgggccttgtagctgccactagtttaaaaagaactattttcccccttaaatgtgcctttttcttgataatatacaggtagttacgttatggtttttagtactacgttatcatatagtataaaaataagaagatgcttaatattgttctataaaactataaaaggcatctaacaaacaggtttagcgtaagatgtactttcatctaacctatacatctactgaatctaaacaggtctaccacctactctaaacgcgtgccttaccaaaacttggaaaattttcaattttgattatcatgtgggtgaaaaacatcaaaaaattatgttgatgtattatctaaagtcattcacaattaatcaagaagtgtacttgttgtgagactgagagtagctttcacttgtcaatgagtaggtacctattcatttggccaataacaaaatgacaacaaaaatttacctaaaacttaaataatttagtgatttggtcagtaagcctaattaaaccctcaagcagtttacatcacaatcaagcttgaagcttttatttgatttggccaatgaaggagtttataaccctaaaacagttcacatcacaacaaaaccatttgactcgttttctgattaatttggccaatgacgagtcatcttgggcttcacatatggacattgatgttgtgtccatattacgacacacctttatcattttccatttcaaaaaaagaaaacaaaaacacccatgctattttttaaaacacacttaagaaacaaaaatcaaattaaatctttaacccatgatatctactaccaacaactaacaatattttacatcaagtgtgtcgtcaatagtagcactattatctaatttagatctagataaagccagataacactcttttgaactttccatgcttgaatatttcttctataatatcatcattaagaaatcttctcccattctttggcttcttttagaaaagatactctattagattttttagcgagtgaaagaagaataaaagatggaccagtcaacaaatggagacgaacaagtctttatacattgttgataatttgcgtttgcgaaggatgtggtcacaagaaaagaaagtattccgtccctctctctagctaatggcgtgtgatgtgactactacactctctcttctatacatgtttattttttccagaaatgtctgtttgaatataaactttttaagtgaaattgttgggcacaacagaaaactttaacaccaaaaaaaacgcgacataacatgttgcattgttgattagtttctttctactagagattagcattctcagactccgaacggtgactgcgttttacagtgcggaaaaaatgcggtacggtttaaatattaacgaaaatacataaatacatatgtataaatagagattttaatactgttatagcactgttgcggtacggttttgggtgcggttttgatcaccatttacagttttttttattcagattagatttctgtaggtaattttgattaaaatcttttggtgataacgcagtcttttcgtctggactggacccacgcgaggacccaaaatttgaccaatatgcgatccaataaacaaaaaaatggtaatttaaaatgaaataatccacatgtatgatgtcaaatgtattattttacattcacaattaaatacaggtcagcgaagtaattgttttgacaataaaaatggtaagaattacttggaacgtcatctaacatcattttaattaatactaacatcatcattttaagtaaacaatttttttagaataatagacagaaattaaggtggagttcatctttttgataattagcattaatccctactctaccatgtttataattgaaatcattatttcatattttgataattagaattaatccctactctaccatgtgtataattaaaatcacaatttcatgaaaaagatcaactaacttaaccaaaactatagtcaatgtcttttactgaaaaattcaagaataaaacaatcttagttacgtcactatcaatctccattagaaagaatggtttaaaatcattagtttttaacaaactctaatcatgattattaaaaaaaccaaagaagcaaggaagacttttattcaaaagattaaattttcttccatttaaaaaaggaataaaaagagatgtcaaaataattactacaaaaaacattagaatttgttggatatgtaattgacctaagaccataacgagcactcagacctcgtcctttcaatttagtctgcgcttgacacggcactcttaaaaataaacacggtgacgtagacgccgtcaccgtccaatctcatcgtcccttttttaattagcagctcaacgatttaaaatcgactgtcatttacaaaggctgtcatttcaacactcttcagtccttcttccttataatcctctcatcttctttttctccaggtttttaccaaccagttttttttttttcaaccctcgagatctttctttgcacgaacaaacctcgaaaaactcattctttatcttgacccatctgaaaaagtttctctttttttgtcggaataccatagagtttcattattttcgttttagggttctttttttgtaataaataattggaagcagaggagctatgctcaagttctcagatgaaattctcgcttttgatcatcagttcttgtttctctttctgatttacgctggatttgcaagggaaacactctgactttgtcaggactcttctgtgaaattctgcaagtttatgacttttctagtgctttttaactgtttgtgagtttgaagaaaacaaatttcaattgagttgctttggaatccgttgacataatagggtaagtcaattttcttactactaatatttatcccattaatgcttgagaattgttcctaatagaactctttttgctgtttgttaaatttgcagaatttagaaacttctcgtttagatgaggatcgattacacagaacggatgcctcaatcctataaggtttgttgttttatcaaatatgtcttatgatggagttttggtgtcttaaggtttgttactgtaatgactgacatgttgtgttgttctgtttcagatgcactcttccattgtgcttagaattgaagaggctagttgatagaatcatgagaatctttcctgatatagaagatgctcgacctggatgctcttccggggatacagactctttgtttactccacaatgctttggataaaactaagcagcttcttcaatattgcagtgaatccagtaaactctacatggtatgtgttcaaaatctcaactttcaatacattttcatagttggttttggtactaatcccttggtttatctctatgtggtctaatgtgattaatactatgcttcaatctgcaggcagtaacaggagatgctatactcgcaagaggttctagagctaaaaaatcattagagcaatgcttaaacgacattagaagtatagtaccaactattttggagatcaaggtttgtaccaaatattatgtttcttctcgatgttttcataataatttgaatcactgatgtgaatcttgcttgcagatatctcagatagtccaagaccttagatcaacacagttgactctagaattctcggaagaagaagctgggaaagctattagagaattgatgcaaaagagcacgtcttcctctgcttctccggatgagataaaagattttcattatgctgcgttaaaactccaactttcaacacctgaagctattgtgacagagagaagatccttaaagttacttttgacgaaagtaggagagagtgaaaggaacaagagacagattttgaagtatctttactgtctcctgaaaaaagcatgagagaatcatttgtgaagatcacaaacagaactccttcacgcatcatcagtccatcgatgattctctgcatgctaatgctgcagaagctgaggcttctgaggaacacaatggtacacttcctgagaaatttaagtgcacgctttctcgtaccgtgatgtatgatccagtcatcatctcctcaggcaacacctttgagaggatgcagattcagaaatggttcgatgaaggtaatgattcttgtcctatatctaaaaggaaactggatgacttcacattgaagcctaatgtagagcttaagagtcagatatcagaatggtgcgcgaagaacggtcttgatgttcaagatccagcgaggaagcacgtaaaggcttccaacagtatcgacttctctgtttccatcgctagtttcggaagttctctgtacaacatccctgatcacagcggcatttcgattacggatttcaactcgagctattccattgattcgtcatcctactctaagatgtcaaagggtggttacttcactccaatgcagaggatagattctgcttcaggcgctggtgacacagattctagtcacagcgagattgagatagatcccttgtgtggactcacaaaccttccatgggatgcgcagatcaaagtcgtcgaagatgtaagaagtcgttttgagcacagtactcgtgcttttcggtctatgtcaccgagtaaatttcttgagccacttatcacatatttgaagaatgctctcgaaagaaatggcaccgctggagagataataaagggtggattggatttgttgctggctttccttagtggaaataggagagctatagaatctttggaagaagaggttttcaaaatgttctcagtctttcttgagtctgaggtagtagctgaagaagctctaaacatacttgaggttctgtcaaaccatccgcacggtccgtccaagataacttcatcaggatctctttcttcccttttgaagatcgtagagtcccaagcagaacatctccaagaacaggctatgatcacactcaagaatctttcatcaagcatggagatttgtctggaaatggtatctctcgatttcatccagaagctcacatctttcttgcaacaaaaagttttctgcaaacactcgattatcattctgaaaaacctctgcagcaccgagaaaggtcggggttgtatcaccgaaaccccggattgtttagcttccatagctgaattactcgagtcaaatgttcccgaggagcaagagaacgcaatctccatcctccttcagctctgtgtgcagaagatagagtattgctgtcttgtcgtgagagaagcaactgatatttactcatctctaatcttgatatccaacaatggaacagaggaagtaaaggtgagtgcatcagaattacttagagctcttgtagaagtagattccgacaaagaagaagaagaagaagtttcctccagaccagaaggaagaacaactgcttcgcctacttcacaggttgttactccagttactcatccggaacctgttaaaataacaccatctcccaagaaatctggtctttttggattcaatttctccagtctcaagaagaagaaaaaatagaaagaagcataagatacattattaggctggatttaacttaatttttgagaaatttttttgattttttttttggctctctgtttgttggcttaggtttgtatatgttgataccaggccaaaaggcatctccattaatacaagtgtagttgtaatttgtgaaggaaataattgttacgaccacaagagtttgattttacaatgtacaaaaaaaggaattgctatgaccacaagagttttttctctttcttctacacatatacatatcccctggaatatatgtaaatcactatatttgtatgaagataatagattgagaaagatctttggattggtttcctctgtctcttttggttcaaatttcagataagatagataaatggataagacaacaacaaaaaaccgcgatttttttaatgaggctatccctaatttttttacttgaggctgaagaaattggaaacagaatcggttctcaagctgttgtaaagacactgtgagtgagtttcccagcttgatgatgtatgatctttctgcaaaacagaataagaaataagttacttcacggacaagtaacaaaaaattgggactaatgaaagatttgtctgagataaagattattacagcgccgagagatgtggtgtggtctgagtttatgactgagtaatctaaagatccttgctgatgtaatggaaaagaccgaaaatccgccatgattgactgcttcgagtcaccttctggaggacctgtgaagtaagcctgaaactagattccaatatttaaccagtcaataaatgcggtaattaaactcttggttagttcttgggatgaaaactgactattattcacctgttttgcggataaatcatcgatatgacactcaagttctggatttatgacagagagtttcatcgacaagaactcgacttgttgttgcagagattggacatagttgatgatctcatcaagcataccagcttttccagtaactttgttgcatccaggaacaatatcttgtagacatttcatcttcttgcttatcttttctcttcttgcctgccaaaatcccacaaatataaaaccactcaaatctctaatgaaagtaatttctctgaaacctatttaacaacaacactttagttaattaccctctctgctaagctatgtctgtcggtggcttcacctcgtctagccctaacatgaatgtaatctggtttctgaatttctgaagatgtctctgtgttactcatgtttgatttccctttcatgcttggctctgtttcatcctctgctttgatcttcttcttctctctcttttctgtcttaccctaaaaccaatagttaaaacgatcagaaacaatgtttcaaacaaaatctaaactctaatactcaatactttcttgagctacaaacctctggttttctcttgttctgcaaggtaatggctctgctgtgtccattattcttcactggctccatatggaagctacttgtcctagaaatgcagccatcagtagtatcataatccggtccgaattcgggaaaatgtctgaaactctgcagctcatcattgttgtttcccaagtaactctcaactcttttgagctcttctctcccatctgagccaagtatctgaagaaactcaggtgaaaccatttgttgctgttgcagccacttaagcctatcaagtacagacaagtccatgaagagaaggtaaaaaaaaaactttaaaaggctcttatcttttctttgagggggttaaagcaaaagagaaaaagagagagttaagttatatatgtgtggaagaaaagtaatccattagatataattattcttagctttaaatagaaagcaacattgacccacacacatgagattcgaaatctagtgagagagggacaaaattgataaaagtggaggaggttggggacaaagaaggtgagatgagaagttgtggggtctaattgacataacctaccatgtggtcatgtccttatgaacatgagatgaggagtctcttaagttagtctcttttgtgtcttttctctgtgtttttttttttccttttggcctttcaagtttttgagaggatctttttgtttggcaacaataatcaaactttgtaaaacttaaggttcatgagggtattatcatataaatatcctcttttgtaaaatcaaatcattgagtttttggtaagacaaccttctaattgtaccaatttgttttgttagagagagagagagagagggtctttcttaggcttgaaggtggagaatgtggggaatgtgaattatgaatcttaacttgcaaatgaatagaaacaatggtttgaatcatgagtgatatcatttcaatgtcttgttgtgaatctatacgtgatccttgtgacgtatgattactacccttcatcaatccatagattacaccaataatttaagtggatttcatatattagagagatggcaactcgatgaatatatgacatattataatatcacatattataattcataactgatagggacacaaaataagcgacctaaagaagaaaatgggtttgaagataagtgataggaaggtaggcgacaccattgcttttgatctaagtgtttggtccctatactttctttttttccctattaattatatatctatacattatctataatgcgtgacataattcaagagaatcaatactatttcgattttttttttttgaagaacttgaaaaaatatatccaaaattagaccgatttcaataacacaccgtacaggttgctttgaggtttccatttcattggttctttgggaaacatcaataacaagctgcttatgagatgagaagagtaaatgcttcaaatgccaaaatacttaacgttgagagtatctgttgttttttgcaatttccacaaaaaagttttagaaagtttttgattcaatgggtttcaggatgtattcttttgtaaagaagtttgtgtcaatgcattcatgttgcaattaggcattttgtcgaatcacgaaaacggaaggaacactcgtattcgtcacatcaaagtataaggccctagatcgtgtgtatcacgtctctaatttgcttacttacaaaactgtgttgtttgctcttttcactaatgatggatctatgtgataacaggaatcacattccacgtcaattatttctgtttacttcaaaagaatgtcacacctatgcaacagtgagacaagatctgaggaagagagttagagaacatgaaatttaagaaagagtgcttcaatatcttgttgtgtacaaatcaatagttctgtttgataatatcaacttgacagcttttgtcaaaatgatgagtaaaaaatcaggatctttgggacaaatacggctgaaccggccggtttagctaagtcgaaattaccggcctaatcgttaaaccataaaaaccgcaactttcagaaacactctgcttcgtcgagcggattcgacttgtctggctcaggggtcgccacaactctcccgcaagttcacacatacactcggtgctcaaaaagtttgtcctttttgcatctctcagttctgaaatatctggttctcttgtccttgaaaattttacgaggttgttctctgtgaataatcgatgtctgcttcatgtgctttaacaccgtctgttaggacagagttattcagttcatcatcatctaaaagatcaatctttcctgctagaatttgtcgaccaagtaagattcaactccaacctttcatttagatgtgcccctaagcctgaattatgaacaatctgtttaatctttgcaatgaaggaaacaaatgtgaaatcagcagaagggattttgcaattaggggagggattgttgcttctggagtttcagtcatggatacttcttctgcttcttctcagtctgttcaaggtaaaaaaaaactagctttggaactattgcttctctcttggtctaaaaatgtcatctttgttaaaaagaatttggatgattctttaggtagtgagaggttggcttttaaaccagaaggctataacttttgggaatggagaggtcacaagattcattatgttgttcaaggagaaggctcgcctctagttcttattcatggttttggtgcttctgtctttcattggaggtaccttcaatctcacctccatgctctattgatcagtgtaggctttaagtcaactttttaccttatcatacgaattcgagctaatatcggtagatttttataggtataacattcctgaattggctaagaaatacaaggtttacgccttggacttactcggtttcggatggagtgacaaagctctcatagagtatgatgccatggtttggacagatcaagttattgatttcatgaaagaggtagtgaaagaaccagctgttgtcgttggaaacaggtaaatgaatgtcttctttgaagctctttttgacattccacaaggaagtctgaaacaagttcttccacttctttacagccttgggggatttacggcattgtcagttgcggttggattacccgagcaagtcacgggagttgcacttctgaactctgcgggacaatttgcagccgagagtagaaaacgagaggaagctgatgaaactgtgataaccaagtttatagttaagccgctaaaagagattttccaacgtgtggttcttgggttcttgttctggcaagccaagcaaccttctcgaatcgaatctgtcttaaagagtgtaatgtcttattaacttctgtcagacttcatctcaagtatgttactttgtacttagttttttcttgtttttgcaggtgtacatagactctactaatgtcgatgactacctcgtcgaatccatttcaaaacctgcaacagatccaaatgctggagaagtatactacaggtattaaacccccataaagagttttttctgttttgatacataataaagagacctaactgttgtttgtttcgtgtgttaatatcttacagattgatgacaaggttcttaacaaaccagagtagatacactctagatagtgttctaagtaagatgacttgtccgcttctgttggtttggggagatcttgatccgtgggtcggtccagctaaagccgagaaaatcaaagcattttactcgaactcatcgctcgttcacttacaagcagggcattgtcctcatgatgaagtcccggaagctgtaaacaaggctttgttggattggttgtccattaatattgcttcaaagccagcttctcctatagtcttggagacgtaaaaactctttttgtgaaggaagtatatagttgtaaatacattgttaccttttacaattgctgcttctgtgcttgtgttatctgagatttagcagactaaaacataacatagattctgattttatagcatagacttgatcaagtttatcttaagcaagttttggttaaaagcccctgaagagaataaaagacaacatacaatacaaaacataacatagtacgacatttaaatctattaaaatgttggaaaaatagtgggtaccaataccaatagattgactttgacaatgacagttttttcacacgtgtgaaacatgcaaattgaagttttttttgggctacaaatttaagggtgcactaaattgtggtatggacaatcttcgaaattagttgcacactgtacaacaagccattgatttcttctatacaatctggttaagcttcttaaaaataaaaactcaactgcaacaatatcctctagagatcttactttaatcctataaagtctacagaagttcacaattatcatatattcagagaaaaacaaaaacacttaataacttagaatataaatgactaaatgtagatcatagacttcgtagtagcatagtaggtaatttcttcacatgattttgattgatgcaaatttaatgaagggccctagctatgatttattttacctaagtcgttttttcttctttcaggtcaacacctaagctaacaaatatcataattagtaaggaaaatggtcgtatgaatatttgagtgctgcgattccaaccaaagtggccaacacgaggaccctttctttcttttctttagtttcttttattccagagattctaaactcgagaatgatggagtttccaaagatacatggaattttcgtatacaatgttacttattaaactgtcttttgcttggtatatagagtaaatgtaaatatatacactagctattagtacttattagtgttctggaaaatgttggggcaatcatttgtattttatatttctttattattaaggattgcaatcatttgtatgtggggagtaaattataagttccaactcacttatataattagtgtatatatatatatatatattaattagtaccaatttgtgttaaaattttattttcgatttaaagtacctagatagaaatttgaataatctggttaaataaactattgttttctgtaacaatgataagcggcaaacatttagaatcatatcttgtgtggtttttgattttcttttgctttatttgacaattttatcaactatatgcatgagtttccacatctcaacatagaaaaagatataaaatgaacacaatcttccttagcataactttatcatgtacctatacataatattcaattaaataaactaaaaattacgcgaaaagagaaaagtggtccaattaacatccagattgatctaactgtaggctgcaaggaatatatccaatcgagtgaaaatggaaaaatataaactaaaaacgaaaaatgaaaatgggcatttgaatatgtaaaacctagtatttaatttggtctttatatagacatatacagtgtattgttatattgttaaaacgtataaatagactttatagtcctgtccaacacgatcagagacagatataggcgtgtctcttaagttaacatattacatacggatactcagatcgtagcttattggtcaagattgatattattcaattgcagaactacccaaatttgggacaacatccaaaaaattatagttgaaaacaacccaatagagatatcgtccagtaaacttatctctagttactcaaaatataaagatatatttctgtttaatacgcatagtttttctagacaatgtgcttatgaattatgatctagaaaatcagatataatagctagtagtaactatttaaatacaccgatgatggaaacgaataagtgaatacaccgatgacggaataagtgaatcttgtaagtagggcaagcatggttatcaccgccatcattatgttcgaagcataatatttaatcatgtttttatttgcgaagttatttttactaatatagctattcaaactataagagactatagtattgatcaaagtgtgaattcgtcttttatatatttttttatcatctagggttcatgcatgctttacaaggcacggagttttaagcaagcacgcgtatacacacccacacgtttacatatctatatacatgtttgaagcgcgaataaatccagctaattttatttgaatgaaattttactaaacagaaaacgaatttgaatttatatttggctctaaaccaaaaaggtaagggtacacaattgaaattcattttaaaactaaaattaactgattaaattccgaatctaacttgtagaaaaagttggtgttgtcattaactaatgatttaatatgcttgcactcgttcatatcacaatgaattattttgtcgtaatagccctagtgcaggtaaattttcactatcataattaacaaaatagatatatatcaattgatttcatagttaatgagtaccaaaaaaaaatcgaatacatacatgtacattaattgatgctatacaacttaatatgggaagccaactacccatatatgaacaaatattaattatcttctaaatttcaatttcgactttaagaggggcaacgtagagtgataatcatatgagttgtcaacaaattaataaatggttcaaatcattaatcatgcatgccacgatatatctcgttatcgattgtggacaccaaatcgttacactagcgaatcggtatttattctattttattagggtgataataatacgtataaggaataaatatgttgtatatgcaccatacttgcgtcgtacttaattataagtgtaatgaaattataaatttcgacttgcaatggactatatatgcttgtgagaagaaaaaaacaaaaaaaaaggatactcaatatgatctggaacggtttaggctgtcctattcgtgacttaattagtgtccctttttaatttgattttttcttataaaaatgatctggaggaatggtgccaaatttggattaatacttatatgctcaaatcttgattaaactacaccaacagtgtcattttcaggctattattggaaacgtcagaacagttttacaaaatgccaatgattcacctgtttttactaggagtttttgtagattacatatgtttaatcaagttatttggataatcaaatatattgtcaatattgtaatttatgatttaaattactagtttcaagcaaggactacttttttttttgtcaaagagcgaggactacttttgtcaaataatactgttggcttttagctaaagttttacaatcatagcttaatacacatgtaaatgtattcataactagtggttaaaaactgctagcgaatttataattactcgttttgtcaccaaatatctttcattggatacatatatacacatcaattagaaaatgctaatgctagaatttgaacaaaaaggaaagaaatgggaaatagtagtacaagtaagagtgcgttacacttgtaactgattcattggccgaggcaactccacagtttcttactcttaccattttcactacatttgtttccctcttgggaacctttattttcttcttcttacatttattatcactcttttattattctttttgtttttgtccgtatattttagtttggttttttatagccttgcaaaaaacgacactggtatatctatactttttatctagatgactagaccaggtccgaataatccaagttttgtactactatagtataatattaaaactatgagattcctgcgtatctgtaatttaatttttataaattcattctaacgttataattatcaaagagagaattattttcctattttttcatggaaagtgatgaagatagtgtgctgcaatagtcggacccaccggagacgaagaagtgacaacaacgagtattgtgtatttcctattttaccctttccttttcgtttcgcgcgtcttcaccggcttaccggctacacctgtcctcctatatatcggtttcatcatttcattataaaattaatagcacaaataaaataaaacaagtcttattaaaatactaaaaattgttactgtatttaattagttgccgccgcgccggccgttacgattgcagcagcacgactgttttcagaactctttttttttattaacaatcaatcaaaattttttatttgttttagtattatatggagacaacaagcaataagttaaacagaaaaatcctaacgttcttatttttttactattaaataataattttgacatattacaaaattatgaattaacctaaaataaatagaattaattctctttttgtacgatgtagagagatgggaatattatatacccttttgaaataaagacgactcgaattagatttcaaattaaagctgaagaggtcctttttcgtcattttggagtttctttttgagacatttttcctcttttgattttcgctttttccgtccgcttgacttctgctgtttcagactctcaacaacggagagagccggagagattgaagaagaaaggagaaatatttgcgaacccccaagaatcgtttttgttgattgactctctcatggaaaatctctctcattctcggaatccaaacaggtcttcttcattacctaagaaaccttacaatggcaataacaccaccggaggttttagctacaactccggcaaaacggctaatacaaccaccactactacatacgacgacgtttttggtggtccacctaggttcggagctccgactttatctcctcgtctcgaagactattgcgagattttctccggtttcaacggctcctcacgcgccgccgtttcttcgattccggtactcgatcttccacttgttgatgatagagatgtctacttcgatgttcggagtcaaggttttgactaccgtgaagtcttcggagggtttaacgatctcgatttagctccgtcgtatgaagaactgtttttgcagcagaagtctactacggtggttggtgatggtgattcctccgacgatgcttggtactgataaaaatcgaaactttatgattcaatttgtggaaaagagccttcttttttaagaattgagctttattttgtttgtaggactcctgaggaagtagagtcatgctcaggtggtacagaacattctggcaaaagtccttgcttttctaatggtagagactcatatgattccattgatggaagtacagagttcaacatttcttataacaaagctagtcagataagcggcggtgagacaaatatgtcctcaagtggtgtgatacgtgtagctgatcttggtgctattcctggttacactgtcgcagttgatggaacaacaaagcttaacaaggtgactgggccatcttctgttggtagaggtacaagtagatttgtctttgaagacaagtattacagtagtgaaccttttgttactgtttctgagattggtttgaagactcatcctactggaataccacctccatcgagagcagctcctatattgaagagtgattttagaagttcggcttctaattctaaaaccactggatcacaaggatctgtagatagtagtagttctccaacgttctttgatgtagaggttgatgctaattcagctgctgtgagagaagctatgctaaaagctgaggcaaaattaaaaagtgcaaaagagctgttagaaaggaagagggatgtggcacggaccacctcaacgccatcctccacgaagaatagaataaaagaggaagggaaatcgagctatgcagctggtttgccagttgttaagagtaatattgatgtagcaagaaagtctttgaaggataagcgtggaagcaagtctctgtcttctcaagggtcagcaacctctgatggaaatgatgaatggaaagaagctaataatcaatatgttgaattggtgagaacagagctaccaagaaatgctgatgagaacagtggtggaaaagatgtttctattcctcttaatgctgagtttttcgatcaggagctgacatgggcaggcaatgttgactgggagaaacaacggaggagagcaaaaggagatagggaggatcatgaagctaggaaattgccaaaacactctggaacgagaaagttatcatctaggcataagagacatgagaacaagcttgctgaaaaggctcctgaagagccaaagattgagaaatcgagacatgttgagatgggcaacgatttacctgatcatggtgggatagtgaaacacagaaatctgctcaaaccagaagaaaacaagctctttactgaaaagcctgcgaaacaaaagaaggaattgctctgtgaagagaaaacaaaacgcattcaaaatcaacagttggataaaaaaacacatcagaaagcagctgaaacgaaccaggaatgcgtgtatgattgggaacaaaatgcgagaaagctcagggaagctcttggtaatgaaagtacgctagaggtttccgttgaattgaatggaaatggtaaaaaaatggaaatgcgtagccaaagtgagactaaactgaatgagcccttgaagaggatggaggaggaaactaggattaaagaggctcgtctaagggaagaaaatgacagaagagaaagagtagctgttgagaaggcagaaaatgagaaaagactaaaggctgcgttggagcaagaagagaaggaaagaaagattaaggaagctcgtgaaaaagcagagaatgaacgaagagctgttgaggctcgtgaaaaggcagaacaagaaaggaaaatgaaagaacaacaagagttagaattgcagctaaaagaagcttttgaaaaggaagaagagaaccgtagaatgagagaggcctgtgagaaggcagagcatgaaagaaaaaatgagagttgcacttgaacaagagaaggaacgaaggataaaagaagcacgtgaaaaagaagaaaacgagcgaagaataaaggaggcacgtgagaaggcagagctggagcaaagactgaaagcaactcttgaacaagaagagaaggaaaggcagattaaagaaagacaagagagagaagaaaatgagaggagagctaaagaggttcttgagcaggcagagaatgagaggaagttgaaagaagccctcgagcaaaaggagaacgaaagaaggctgaaagagacacgtgaaaaagaggagaataagaagaaactgagagaagctattgagctagaagagaaagaaaaaagactgatagaagcttttgagagggcagagattgagagaagactgaaagaggatcttgaacaggaagagatgaggatgaggctgcaagaagccaaggaaagagaaagactacatagagaaaatcaagagcatcaggaaaatgaaagaaaacaacatgaatattcaggagaagaaagtgacgagaaagaaagagatgcttgtgaaatggagaaaacctgtgaaaccaccaaagaggctcatggagagcaatcatcaaatgaaagtcttagcgacactctagaagagaatgagagtatagacaacgacgtatcagtgaacaaacaaaagaaagaagaagaagggacaaggcagagagaatctatgtccgcagaaacctgtccttggaaggtttttgagaagaccctcaaagacgccagccaaaaggaaggaactaatgagatggatgctgacaccaggttgtttgagaggaatgaagagacaccacggctgggtgagaatggaggatgtaaccaacaaaatggagaatcaggtgaggaatccacatctgtcactgagaatattataggagggaagctcgaacagaagagtaaaaattctgaaacctccaaagatgcctcagttctcaaacgagtcagtgggttgaaaactgaagttgaagaaagattagaagacgttgtaggtgttggtcgtgatcaaaggaatccagaggaaagtaagtccgctcccaaaacatcctatggtttcagaaaccatgaatataaattcacccatcagcaggaaagaggaaatatctatgagacgcaagcaggtttaaatcaagatgcaaaagtagaaagaccattgccttctcgagtatctgtgcaacgtgagaaagaagcagagagactaaagagagaaagagacttagagatggagcaattaagaaaggtagaagaagaaagggagagggaaagagagagggagaaggatcgaatggcttttgaccagagagcattggctgatgcacgtgaaagattggagaaagcatgtgctgaggccagagagaagtctttgcctgataagttatcgatggaggctcgacttagagcagaacgggcagcagtggagagagcaacctctgaagctcgtgaccgtgcagctgaaaaggctgcttttgaggcaagagagcgaatggaaagatcggtttccgataagcaatctcagagttcaggtttctttggtgaacgaatggaaatatcactttctgataagcaatttcaaaattcagtctcttttggtgcttcaagatatcaagattctcatggtaaaaatactctgaaaactctctagtggttttatttttgcatacccctattagcttaagtgcttaacccattttcgtttcttttgtcttttaaggtactgaaggtgaatcgcctcaaaggtatacatcaagattagaaaggcatcaaagaacggctgatcgtgtggtaactgatgcttcaatactcgttttgaaatccacaccattgatgatgttagttaacgggcatattgaattcttaacaggctaaagctttagcagagaagaacatgcgtgatctcgtggctcagagagaacaagcagagagaattgtacaaccaccaaactgaactccttcctatattttcactaaagccttcctttcttttcaataatcacatttttgtttatgtttcccacagagaattgctgaaaccttagacaccgaagtaaaaagatggtcgagtggaaaagaaggaaacataagagcattactctcaacactacaatatgtaacgtttccttaccgaacaacatagctagagatcaaagttagatagttaaaagctatttctcaaatcgatttttctttgtctttgtttgttgtgaaccagattctcggtcccgagagcggttggcaaccgttaccgttaacagaagtgataacttcagcagccgtgaagcgagcttacaggaaagctacactttgtgttcatccagacaagttacagcaaagaggtgcaaacattcatcagaaatatatctgcgaaaaggtcttcgatcttcttaaggtattggttcatgttctgttacacctttttacacagtctctgaattgctcattcaagaatctggaattgtcttaatgttctaattaatatccaggaagcttggaacagattcaactcagaaggacgttgatgtgatatatggttcttctttaattttttgtaaagttgtgcttgattagttgagtatatatcctctatattattagtccacgttcgtatcgtattagtccacgttcttccattctctcgcaagtctacacatgtaaatttgaactaattagcttagctaacaaaagatatgtaaaatgcaaaatgttatagatcacatcgactagatatgatgggccggaaaaagtgggctggattaggcgttatcgggctattagataatgaagaaatatagggggatactttggacaaaccttttccgcggtcgggaggaaagggcagcgataagccatgatgatacggggtggtggatccgcgtttgctaaggtagctgaaccgatttattcatatgaatttctcctgctttgattcaaatgtctctggctgattgcaattgcgtcaatttgcagtactgtcgaagagggatgtcatcatctcgagagttaccttcagagaatcatcagatgggtgagtcagcaagatttttgccattactcatgtttttctttgtttttgtttattttgggtctaacaattgccatatgtttcatcttcggtttgctttttggtgtggtgatgtcttattgtttttgctcaagaggcgaatcgtggttttgccagttacgtatttaaaggggcagtcttttacacgtcatacgccatgagtatgtaattcgtagccgggaagaagatcatcatgcttctgcttctggttcccttggcgaggtaaaagaaagaaaatagtttgtttttggattttattttcaaaacccactagttggatcttcatgtatcaacatgatcatcgtttcagtcgtcgacgacttcccaagacaagagagaatgaaggaatcaatcgtaatggcttttgcttgtttctttcgctttttatgtatttatgttcttacctgagttgggatctgtagaactaacttcccataattgtatctcacgaacgtgatgtagtaatctgagtaaatctaaaactatctcgtggaattgcaacaactatctcaagtctcaactcttcttaactgcaaatccacttgtatgatttcacatttgtttccttacatcgcaaagttgaaaaagattgttatcattcaggcttagtctttttgttgatgtcttcagttcttgagtagctttgtccacttccactcacctgtttatcaagaccaaccgcagttagcatacattttgtaccaaagaccaacggtgggcttttactccttgattccacatggaatccttttgagttttctttcttgtaatacttgacagtttctagtaagccctgatataaacatagcagtgtttggatcatagatagaagaagttaaccggggcaggaaatcacgacaattgattggatcatcatggtaatacgagagcctccaaaaaggaaaatcatgaaataaggactctgtctaatgagcttaaaattcaatacatgcgtcaagatgatccatcggccttgacatgagttagttaacacacaaaatagaggtttcaaataaattacaaaccaagtttagcgttctggtagatcaaacaaaataacattaatgcgttgaccgaccgacaaaaaaatatcgaattcaaaaattttcaaatccataccacactcaatgtgaccgaccaaaactccacccgccattaatgcgttgattttaagaaattggccattaatctgtgttagcaagaaatttcccgtcttaagggcggcgaactcaaacagctctctcattacctgaaagttttctcgcatcatcggatcataaattaaaataataattagcaaaagagggacatatgataaattaattaaaatattgatatacctctttttacctacaagtgaaaatgatgttcttttttttttttttgtaattcgaagtttgacgtaataaaatctcactttgatagtccacttttgaaataaatcaggttctaggtaattctcttagtgaattccatgtatttagtttaaaaattcatgcgaattatagaaatttagacctttccctcaaggtccaaacaagtcgataccatttatggtttggattaaaatttataactaaattaaatggtaaaataaattattttattaatattaacaatctcaatgaataccttcgaggattaccgctttttctttgtaaagtatatattttatttataataatcgttaggtgtaatagaatcttaatttgattcatattcggtttgtaattaatcacagatatcttacgctatttacagtgtggattgaaaattataaaacaaaatggataaatttcgatttttattgatatgtgccactaaataattttgatttaataaagtttaaatacccataataaaaatttatcttcaaaatagatttttacttatcatctctttactctccatcaaaagtcataagattgaaatcttcactaccccatcttagcatattgatttaataagtctaaaccaaaaaaaaatttcttcaacataaatcttcattacttcgacattgcaacttcatataaagatagtatttagtttttctaagagcatgggttgttgccctaaaccaaatttgatgtagtggtagaaatatctaaaggctagtgcacagaatgtacatgtgggcattgacaaacaatctttgataaatctttcaattgtgccgagagtggcttcctttgatagcattacctttttattctttcccaatcaaaaatccaaaactccaaaaactaaaatcaagattaaatacccacaataaaggtttatcttcaaaataaatttacttatcatttcttattaacgaatagaaatcttagattttcggtttttcaatacataccttcatggcttctacatcgcaagccaatatagaagtgttaaatcttttgagagtaagaaaagcacgcaatcggagctcgtcagattcctcaagaaacttcatcagctgtccagcaatatttaatagcacgctcactaatttctttactcttctcggacttaagaagaagctcaacatccaaatttgatgtaggtatcgaaatatctaaagattaccacataatgtacatgtgaacatcgacaaataatatttaataaatcttttaatagtatttacctttttattcttctcccaactaaaattcgaaaactcaaaaaaccaaaatcgagattaaatatctataaataaaaattagttttcaaaatatatttatttatcatctcttgttaaagaatataaatcttattaaaaataaaaaaacaaatgtagatcttaaaaagtttgaaagattagaaatatatttctacaaccagatgacaaattctactttttcgacacaaaaataataatatatatattccacagtcatgctatcacacagacagccgacatgtttttttatacttttaaattagatgttttttaacatgtttttaaatacaatattttcttaaaaaaaatgctattcatttatttgacccactttgaacaataatgtcgagttctataattttgtaaacaggacgatattatttatttgaccagtttgaacaaagtaaacatcatctagtcagattttaatataaaccaagtatcgtggaagttctttgatttgtttaatcctcctctagttagattttaatatataaaccgagagagactcgtcactcagctcgtggaagttcctttgatgagcatgaggtcaattattgcgttagaaaagacttgaaaagtcaaagaaagctcgtcgaaaccatccttgtcttcacatattattttttattttattttcagaattaaacattacaattgtcggacttttcaaattagctagcaaccaaagtctgaccatttccacttgaaattaaataagatacaacaaccataaaatctcatcacatctctctaagtataaattataacacattgatcaaactctctctcattccaacaaacaacaacaatcatctctttacttctctcttcacatcatctttcttgaattctttatatacacagtttaaagatgcaaatgctaagaagcttgagcacgaggacaagaagccgtcgtggaggatacgagagagtgagtgatgattcaactttcagtttactcggagcaaagctaaggagatcgacgagtgttccttactacgcaccatctataaagcttggagctggtggtgttccgaccattcttgaggagcttcctcgtcagaaatcaaagaaagtcaaaccaacaggcaaatttagtcacccaatctttagtcttttctacggaaagaagaagaagtcgacgacgacgaagcctgagttttctaggtatcttgagtatttaaaggaaggtggtatgtgggatgccagagctaatgcgcctgttatctattacaagtagatcgatatatgaatttgttaaaacaaataatcaagaaagagagagggtgatgaaagttttcttttatttgtttagttcaaatcttcttcaatttgtgatgatattatttgtatatatatttcaacgatccaatattgttatgttttataagcatattacaagtattggaaacaaaattgtatgcttttgagcacattttgattggaaatgattttgagtttgaaagcaatgtcttagacgagtcgaaattaaaaaaaaaagtcaacagtcaaacttggtagtccagctgaaacgatgccgtttagtagaaaaatctcaatagcttatctccgttggttacgtggagcttaagggaaactttccatcaatcggaaatttccaaaaaccctagaaataaagaaatcagctttacccgtcgaattatgacgtcatctttagtttcccagaaagtttccatctttggtcttccccggttagagaattaggttttcgaatgtcaagagaagatttctctaccgaattagattcaatgttttatttactcaagttgattgtatttggatttgaaagtagtaaaattggtttggtatacaagaaccaagagggcaattcaagatttgggtctgcaatggtgtaggaaattaaacaaaatcagaaccaaatcagtttcttctagacagagtatctttcacatttgattgtttgtaaaccagatcctctgttccgagagcggttggcaaccgttaccgttaacagaagtcataacttcagcagccgtgaagcgagcttacaggaaagctacactttgtgttcatccagacaagttacagcaattagccctctctctctgtatttcttgtttctctaggtttttgtttgtgatgatcgatcgaagatacttaaacgatgaggctattttataaacattaatgatgtgttagggatttccttttttctgttgtttcctttttccacatgtgattagggttcaacgtaacggtcctttttaaaaaaactcttatgcgttgtttcctttttttcactcatgggtttatttgataattactaaaccaccgcttctgattatatacttgtgagttaaactagtaggaaactacaaaagaaaattgcaatttgatgtacatggtattttgataatatacacaagagaaagaacaaaactttctttcttttcaccattctttaataataagaaacacaagaaattggttttacaataagcttggctttgatgattttggtcagagatattttggatacaatcaaacaaataaagccaccactaagccttcgcttcatggttcttctctcaccagtagttgaactgttccaagaacaagcagaacaaaagatcagtcatagaggttatgtgaaaaaagcacaagacttgatggcttgtgtctcaagttccaagagtctaatgaaagaaagacttaccagcttcttcttcttcttctttttctcgatgtacgccacaagctcctcctgacgaccaagagaatcatccaaagcctgcattgtaacgaaaattagtattaaaaagaactttaatggaggaagtttatcttaatgattcagaatgtatgtaccttcttggtggcagcaagctcttgctccaatacattggaccggctaatggcagcgttaagcatctcttccttatccggaggcataactgttggctgcgcgcttaagacggtcactttctgttccaactcagccattcgtttcataatggccatgaaatcttcccctgagattgcaggtacagtcattttctctgactgcatcgcactcttgttcattgatgcatcatcgcagtacacggggctcgagtacaaggttgactcggttagtttccttgggacgtttttagtcactttaatcatagtgacaacacccatcacaagagccatgacccctgtgaaaataggtgacctccctccttctgttgtagcgttgttgcacgcctcttgaatggcgtaaacttcttctgcttagaagagaaagtacaagaagcgttaaagctccatatgtcttagctttaacatacaacaaccatattgcaagaaaaagagatgcacaagagtcatcatcttactctttgagagggaaaatttgtgagcttctggcatgttccaagctgggtgagcggccgggacctgagtctcgagaaacgaataacgattaagtattaaaagcgaacttgatatcaagagtttagaggttggccattcttacaatttcgacctcttttgaagccttttcctcttcagaagccggctctgttgtagagtcatcttcctggaagatcattgaatataattagcattggaaggagtgatcaagattcaggtaaaggaaactattcaagagatatagataagctcaaagtaagcaaagacctcagggatggtcttctctccagagttttcagcttgggatccttttgagcatttgtgatcaccattgtgaactctctgtaagaaaaaatgaaaaatcaagttcactcttgtcatttatgttgctgtcactatagttgtcttaagaatcattcaccttcatgatctctggatttttccatgggcctttgtcagagcgcatgcagccaccattgtcagcacaagtacatgaacctccaagaaactcaggaagttcactggtcacaaattaataagaatcagtttcatgttatataatatataacatagattaatttgtatgctaatcgtcttgcatagctcacctttcatcaattatctcaagcaacttgctttggtacttgttgccaagaacctggtattcaaacaaagtataattacttaaattgtgaaaactaattatcattcagaagaagattcaatagtaaaaggttttgaatacttgcatggatttttgctgtagtcttcgggtcaaggaaggacttaaccgtgttccacaacattctgaatcctgagccagcattgatgataaacatcctgttcaaggtctgatccaaagtcgttacaaagttaaactactggttcatagaccagtggaaaagaattgagcatgcagagatataaatcacacctcaggatagttgtcaccatcgaccttttgaagacgagtaatcaagtctctagcagccttgttgaagtttttcagtccctgttataacaaaaacaaggaaaggcatgtttagtcacatactggaaaagcattgaaggtcttctcacataggttttttacataccactccttggacatcaagaatagttgtgctctgatcaatgtgcttcttcgcggcgatagagcacgctgggaacttaacattgaaggtcctctcaaactccataacatggtagttgacatacctatccatggttgtgacttgcatcaacttggtagaatctactaaaccaagcctctcaatgtacacaggtcgtccttccttgtcaactccatggtgtccttgagggtagtatttcaacacttcatcaatttccttgaaatcaaactccttaaaaatatacaaaaccaaagaagagaatgttagtactactcaaagagaccattttcaaatctgcaaaacgttcctctagaataataatcatacctccatgacagtatcagcaccaaattctttcctccatctaagcatttcagtccacatctgtttggttttctcaagatcaaattttctagccttcaaaaatctaagcatcatatggtagtcatcgtgtttctccgggagtagctcatcgagaataagcgattggcgaaaagcatcaacggctttcaactcctctgcgtcatgcacatcttcgatgatctccacagacatcactttgctacttcttcttctctttgtcattgaatacctcaaattcttagaagagctcctcttcttaaaagaacccatccttggtttcaactcggcatctaaacacaaaacaacatcaagaacaagaagataacaaaacagagaactaaaaaatctcttcatttttgtttactataccttggatcaaagtcatgattttgccagatagttggaattaggcaggtaagggcacgagggacgagcactctaacgagtgtcttattatttttagccaatgccctttgccaaattcctgtaagaaattcacattccctaattacaaatcaaattcgaacaacgataacgatgaacatgaagttaagaaaacagaacaaaacagagagacaattaaaagataaattacctctgcaaagaggaaatgagaggaaggagaaagataaaaggagagtgagattgctccgaaaatctctcaaaatcgttccattggattctcaactccattaacgtcgaggtaaagctccacctcatattctctctttccccaaccattgattcttcttctttttttggtcactgttttgtttttgtttttcgttatgcagttctaattatacaaacttagaaacagaggaagagagattacctgtccctcgctctttcgttcacattataccgcccacgagtgttatactgacacgtgtcaattatgcacgagtgttatactgacacgtgtcaatactattgagatttgagagaggcaaaaacactttcttttaccgcaagaaactcagaaagccttaagaggctgatgtcagcacatgaacttttttgtttcccataaattgaaagtttttgaatttcggcaacaacactaagctacttgatcattgaagggtatgagtaggaaaaaaaaaaaaagaactcagatgatcaaatgaaataaatgtaagaacaagaagccattgtcttcgataatcctccttcgtcaattgagcttcagatcaaccacaagcccatcactgaaagtggagaaccagtttaggaatctgctatgaacatcttcaagctactgactctgcggattctgttgtctactatctcacacggatgtgttcaaagagttcccttcagtgttgttgttcttgaagaaaaaagagtttcggtgtttcaggacttgagtagaagctctgaagcaagtctcttcagtgactccgacgctttaagaagatcggattccgaatgtcccgctgagacgtagagtttgattcccacaggtaaccggcatttatcaagaaatgatcttttagaactcacaaccaacaatgagtcttccttcagagcctgcatgcatctagtcatgtcaagaaacggggacagggtctagatttggttttgcaaagaaacaatgaacttacacggtcagccattttctcaagtagaagcaaatcatctttagctgaaccgctagatttctctaattttaagaaaacaataggtgattcccggttgcttgttaatgacatccccttgatatctgacaatcctgcgttgttcccagcatttctttttcaattagaggaagataacaaactaaatcaaactctaattgttgctagattagattaaaacttgaagatcaaacctttccataacagagcaacattttgcttcagcttaactaacatatcagggttttgatcaatgacatcaatggcggtgatagcagcacttgcaaggtatggtggtaaagaagcagagaacacatatcctgaactgctaagtctctgtgcatttgagcgtcccagagaaaagtttctattatcggtagttttttaattttgtttgtaattagttaatcagcatgatcgatgtttacctggtaatcgatgatgcgggcattcccagtgcaaaatccaccttctgtggctaatgcatggcccattgcagcagtcacaacatctatcttctcaatctgtttaaagataaaccgccgtgaaatttttagcatcaggtttggcaaatgagaacactactaaaatgtgtgtcaatcatacttacagggacactatgatgctctgcaagacctctcccagaacggccaagcacaccaaaagagttgctttcatccaatataacacgaaaccgatacttctcttttagttttacaatctcatccagaggcgcaatttgacctgaattctgtagattttaacatacccaaaggcaaatgggtaagcatcacagttcagggagaattttcaaaatatggaagcaggagaagaaagaaaactgccaggtacttgatatacagcttcagctacaatataacgcctcaagttctttgagcgcttgtactttgtcatgattttctcaagggtaattcgaagggattccatgtcattgtgcttgaagtacacaattgtacttcttgaaagctgaagtccattttgtattccccagtgaacaccctcatcactaagaaaatagaaaagacaagaatgagtttaatatcgagataaaaaagtttcaaacaaagatgttcaatgtaatcctgggatttctactaacgtaatctaataagtagaacgatgttataagaaattgtgtacttacgcaacaatgacatcgcctttcttacagaaacaaggaattgtgctgaacattgtggaaagtccataagagtaaaggattgaatcaggagtacccaaaaatttggatattctggtttcgcagtcaaggtggacatctagtcaagagaagtaatcaaacagtaagaaccctttccaagcgagccaatggatgaaccaaagtatctatttagaaaattattgtcttcttaccaattgtaccatagaatccacgaggcccacaagaaccgaccccatatttttctaatgcagaagtacatgattcctggcataagacaaatcttaaataaaactattcaaacagaagagagattgtattgaaaacaaagtagcttcacgttaccagcaacttctcgtggccaatgagcccaagataattagctgaggcaaaattcaccacatcttttccattaactgttgtatgcggtccagcagcactgtatggacccaacaaaatctttaagcataacacagaataaggctatacaacgaactacatagaagtcttctacgttacctttcaagaactggtggctcatgcttcatgtcttcagtaattggcggtataagaggttcaggaacccactcatcacacaactcatctatttcctgagtaataaaaaaccccgaaaactcaatacatttcaactataccacacatcaaagatgtcaccacgaaccaaatcctatgtgatctatcaaaccaatatcaagaaaggatctgagacagaacctgctcggtcaatggtcgcttgggaggtttataactcttccgagtgaggagaatgataatgacaacacccaacaacccttccacaaagaagtgccctggaaaacgaaaacaaaaacaaaaaagttgaaatctttagtaatctcaaataaccaacaaacttggatagacagacaaagttcacttaaagttgtttcttcaaatctatacctcggattgggacaccaaacaagacaactctagctgaaggactctccagaatcatagtaacccaattcaaagcagcattaaacatttccacgagattcgaagccattgctaatttgctttaataaagctctgtacttttttcttctatagtattaatttgctcgacgaatcgagcataagagaagctagctcaactttgggaaaacctacaaaacccaatcttcaattagtattacaaattttcaaaattcacaacaaaaagtggcaattttgaatccaaattcgacccaaaaaaaaactatcaggaaagatctggcatcggatcactgagcaacgagaaatcgaaatctcggagaacagattaagaaagtatatatgattacaaatagatccgacaaataaacgaggaacgttacctgatcccaattggattttgggtggcaaaatggacaaggagcagaaggtatcgtgcccacaagagtgtcaaacacacgaggagtgttgttcaaattcggcgatgcaaaaagattgactttcaacgttttttcgagatttttgataacgcagacggcaaaaaaaaaaaatcaatttcagagagaaaaaaaaaaaagtaaaagaagaagacgagcggatctgtctatgttcgtaatacgtcagtagaatcctgggcccagatctgtgtgttggttcatcgatacgacgccgtttaagtgttagatatgggcctagaggcccaatgtttcaacagcacacactgtgacacagtcactagtaagcattcatcaccaccactaaagtcttaaaggacaatgcaaagagagaaagaaagagtactaaagcctaaaggtaaggaagagacagaaagaggaaaatggtggtcacacacaccaatcatcaccactcattcttgtttagcttttttctaaccttcttgtaatcatattcgaccccaaagttccccctactttttctgtaatattttgtagcatttacattacactatacatatattattcctattctgttcaaccatagtatcatatcatattcatatttacatctcacgaattagttgcttagatacgacgtcattttaatggaacggtcttaggttttaaatatgggctttgttagaggcccaatgactaacttttaagtgattaacttttcaccacacttgaaaaaacaaaacgtaagcaacaagagagagacgatcatggttgaagaagagattatatgaagaaaaaagattgatacgttacggttttgcattaatccctcaagcgacacgcgtgcgtccccctcggccctctctctaaccacaaaaaccttatcataccaagtaccaacacacagtctctctcacctaacagagcatttacactacccttatgacgcaacaagcattcatgaccaccactaaaatcttgaaggcaaggcagagagagaaagaagattactaaaaaagccttacggtaaggagaaagagagaaaaagagaaggaaatggtggtcacacacacacacacaccaatcatcatcactcattcttgtatagctttttctaccttcaaaagtcaatcagtcttcttcctcctatctcccaaagtttcctatacttttttgtatgttttgaaacatttacattacaattaaaaatatcatccatattctattccacgatttttcatataaatcaccaaatagattctagcaagggtaatttttctaatgaaatttagtttatgtttaaacgaataaaagtccttaaacaagaaatggcaatagagtccaccacgcaaagcaagaacagagtctagcactgatagcaagaacagagtaaagaaagtacaaacattacatgaagccatcatgatgttgtttgactaatttatcctttatatttacatgaaacattatcctctactttgtttattcctatttttggtcactttggactacacctgccatttctccttaaactaaattcatccaaccaaagaaaaatttattttcgttgaatcatgaccaatgatgaacgaatcccacatcgtattttcaagaaagaaaatagatggaaaagtaaacacacaaaaaaaaaggtagggtaatggaagaatgaagtgacaggccaaagatttctcctttaagaaaagcaaattctaacaccaaaagaacaaaccctaacccaaaattatactaaatttcttcacttttattgttattgtgatggataagaaggatatggagagagagttttacatgacaggaggagatggaaaaactagttatgccagaaactcttccctccaggtaggttcttgagatttcccacatatcttcacttagttcataattttgactctctataaccacttttcctgttttaatcttgtagaagaaagcatctgatacggcaaagcacataacactagagacacttcaacaactctacaaagagacaagaccaaagagtttaggaatagctgatctaggatgttcttcaggaccaaacactctctccaccattacagacttcatcaaaaccgtccaagttgctcaccaccgcgagatcccaatccagcccttaccagaattcagcatcttccttaacgatctccctggaaatgatttcaacttcatattcaagtcattaccagactttcacatagagctcaagagagacaacaacaatggtgattgcccttcagttttcattgcagcttaccctgggtcattttatggaagactcttccctgaaaacaccatccactttgtctatgcctctcatagcttacactggctttccaaggttaatatattgatgtagagagagatacgtttagatgtttgtatacagatactgagttgtgtctattggtctttgcaggttcctacagctttatatgacgagcaaggcaagtccataaacaaaggttgtgttagtatctgctccttaagctctgaagctgtttccaaagcttactgcagtcaattcaaggaagatttctccattttcctccggtgtagatcaaaagagatggtttctgcaggaagaatggtgcttattatactcggaagagaaggtcctgatcatgtcgatagaggaaactctttcttttgggaacttctctcaagatccatagcagatcttgttgcacaggtactatagatagatacgtctgctgatttttgcaaaaaatatgaaacttaatttccattttacttgtagggagagactgaggaagagaagcttgattcttacgatatgcacttctacgctccgagtgctgatgagatagaaggtgaagtggacaaagaagggtcttttgaattagagaggttagagatgttagaagtgaagaaggacaaagggaataccgagggtgatataagttatggtaaggcggttgcaaagacggtaagagcagttcaagaatcaatgcttgttcaacactttggggaaaagattcttgacaagctctttgatacatattgtagaatggttgacgatgagttagctaaggaagacataagacccatcacatttgttgttgtcctaagaaagaagctctgaaactgaaacactgcaacatatgtatgtagcgtttattccaaaaccaatcagcttttcttggttcctagcaatcaaatgtgaaagatactcgatagaagaaactgaatttgggtctgaattttgtttaactcctacaccattgcagaacaaatcttgaattgctctgtcttggttcttgtataccaagtttagtagtttcaaatccagatacaatcaacttgagtaaagaacagagcttattcggtagagaaaacatttacctttctcgacattcgaaaacctaatttcttaaccggagaagatgaaaattttatcggaaactaaagatgacgtcacagttcgacgaagtaagaagagatcctgcaaatctgatttatttattatgggtttttggaattttccgattggggaagtttcccttaagctccacgtaaactaacggagataagctattgatattttcccattaaacggcatcgtttcggctggactataaagttaaacacacgaccacgagtaagtttataagtttatcatgggttccacggaggcacggaccacgagtgacgagtctcactcggtttatatattaaaatctaactagaggagaattaaacaaatcaaggaacctccacgacacttggtttgtattaaaatctgactagatgatgtttattttgttcaaactcgtcaaataaataataacgtcctgtttagaaaattagaacttgacattattgtccaaagtgggttaaataaatgaatagcattttattaagaaaacattgtatttaaaaacatattaaaaaaatctaatttaaaagtttttaaaaatatatgtcggctgtttgtgtgaatagcatgattatggaatatattttttgtcgaaaaagtagtatttgtcatctagttgtaaagatatatttctgatttttcaaacttttttagatctacattttttttttaataagatttatattcgttaaaaaagagatgataaataaatttattttgaagatgacaaagaaaaaaaaaaattgaagacaaattaacttttattatgtctattttgaagatttttattataaaaaaataaactattttgaagatttttattatgtctctgaccaatggcagagtagggcaaatgccatgggttcattacaaaattcaaaaaaaaaaaaaaaggaaaaaggcccacttttatattaaaaaaatatactaagaggttttaaaattttttttgaattttaccaaaggcccacaaaaaattgagacgggcctaaaataaataataacgtcctgtttagaaaattagaactcgacattattgtccaaagtgggtcaaataaatgaatagcattttattaagaaaacattgtatttaaaaacatgttaaaaaattctaatttaaaagtttttaaaagtatatgtcggctgttttttgaatagcatgattatggaatttatattttttgtcgaaaaagtagtatttgtcatctagttgtaaagatgtatttctgatttttcaaacttttttagatatatatttgttttttgtttctaataagatttatatttgttaaaaagagatgataagtaaatctattttgaagatgacaaaaaaaaacaaaaaacaaaaaaaaatctattttgaagacaaatttttatcatgggtagttaatcttgattttggttaatggagttttggatttttgggtgggagaagagtaaagaggtaaatgctattgaaagatttattaaaggttatttgtcaatgtccatatatacattttttgtacactagcctttagatatttcgagacctacattgaagttggtttagggaaagttgggtaaatctctagataaatttgatatgatcaaattgcgttgaacactagttttaagaaaactaaaattttcaatatggacttgcgatgttgaatcaatgaatctttgtctagaaaaagctgaaatctgtttgagtttggtgaatcaaaaagattactcgatcgagatgctaagatggttcctgaagagttgaaaattattagctttgatggagaaaaagaagttattggagtagttgggaggatcatcaaatcttttttggatggaaaaggcaaagtgaatgccggtttccgtgagaatgtgttgtatcttgtgaatgtctgcctgcgcattgtgtgtctagtcacttaccaaaaatttgagccttatgaagactttggcagtgcaacgactgttgttgcgtccaccatcacgtcgattataactgtgtggttgttgtacaacaagtttgagatggggatatacgacaagatagaagtatttgctgcttggtatttatttattttgtccaaccgctatgaagaaattgtgatgtcggatgacttcgttcatgtattgctgtttttttggattgttaaggtaatattaacatggtctatcttcttctactaactagtttagagatattaacattgttttgtttgttgtaggtgcataatgaagttgcattgctatggaggtttccaaaacttaactatgctaaaatcaattatattctttgtagatcgcatgaaaaaggttagatagaaatcgaatgattggtacaatcttaaataatgatatgaaatctaacttaattttggatctatcattagtagttagcgattgtaaacattcaacttgtttttttattattattatttaaatttagcattcaaatttttgattagaatttttaaaagttgttttaaatttttgattttgtttattattgggaattttaaaacctattttgtgttttttttttttgaaaattttatttgttggattctaaatttacataatgataaaaattctaaccggattttggatctaatattagtcgttagcgattccaaacattcaacttatattttctattattatgtaaatttaccattcaagtttttaattaggaatttttaaataattaaatgtccgtctttaataggctcctaatccatctttttatttatatatatatatatatatatatatatatatttttaagttaaatatcaatattttatgaataaaactgtattttctcagtaaatcgaattaatagaacaattaggagaagattaacgtattaggctccgtcttcttcttcttcttctcccttgtaacgttttctggtatgggccgctcacgatttctctctcaaaatatctttgcctttgtacttatctgatccataataatctctggataacgacgaattgacgattctgagactttatttttgtttggttttttgctagtttactaattcgttaagtgtttgatgataatgactcttgaaaaaagtttactttatcttcttctcttcttctgcttttggtagtcgtctagtaattaagattgatagctaagtaaagccaagatttctctggcttgtttttcaagaggaataacgtaagcgagcaaaaagctccacttattgtcgggaagcaagcttcgattctttaaattcctccaaacaaaaaaacacaacgtggaaacttttctataaacccttttcaaattctgtggattagaccagaagaaagaagaaaatttactataaacccttttcgattccactaattgttttcacaaaactctgttctgtactctgttttttgttaggtcattttttagcaaagaagaagaagaggaatggcgatgctagttgatcctccaaatgggataagacaagaagggaaacattactacacgatgtggcaaacattattcgaaatcgacactaagtatgttccgattaagccgattggaagaggagcttatggtgtggtttgttcttcaatcaacagcgaaaccaatgagagagttgctattaagaagatccacaatgtgtttgagaatcgcatcgatgctttgagaacattgagagagcttaagcttttaaggcatgtgagacacgaaaacgttatctcccttaaggatgttatgctgcctactcacaggtacagcttcagagatgtttatttggtctatgagcttatggattctgatttgaatcagatcatcaaatcctctcagtctctctccgatgatcactgcaagtacttcttgtttcaggtacgttggttcgatacattttctgtttctcttgttaagctttggtttgatgattgaattgtatctttttgtcgacattgtagttgctaagaggattgaagtatcttcactcagcaaacatccttcatcgcgatttaaagccagggaatctcttagtgaatgctaattgtgatctaaagatttgtgatttcgggcttgcgagaacttatgaacagtttatgacagagtatgtggtcactcgttggtaccgagcacctgagcttcttctctgttgtgataactacggaacctccattgatgtttggtcggtaggatgcatattcgcagagattcttggaagaaaaccgatattcccgggaacagaatgtctcaaccaactaaagctaatcataaatgttgttggtagccaacaagactgggatctccagttcatagataaccagaaagctaggagatttataaagtctcttcctttctcaaagggtactcacttttctcatatttacccgcacgcaaatccgctggcgatagatttgttacagaggatgcttgtgtttgatccaaccaagagaatatcggtcagcgatgcgcttttacacccctacatggagggactgttggaaccggaatgtaacccgtcggaaaatgttccggtcagtagtttggagatagatgagaacatggaaggagatatgatcagggagatgatgtgggaagagatgcttcattacctcccccgagcttaaatcaatattttgtaaaatcatctctctaacacttgtttataactttagtttgtggtaacttgtattcgtcttccatgtttctttgttacgttgttttgtgcggaatgtcattgagatgtatgcgtcaaagtagactttcggttattgaaatttggtctggttatttgatttataccggatccggtttactcccctcgtatgagagaccttcggaactatggagaaggttttgactctctcttcagtgatatgatccgtcgcaaatcggaatctgccggcgagatggttccagtcgtctttgttcccttattgatagaataatcaaaaatccgagtcggagacgacgaagacccgagttccagctattaactatgcagataccatcaagagagcatagtttcattctatttctcttcatatctggtaaaaatcctcgtcgcacgaatttgccctctctcgaatttttgagcttttgaaattttatcttttgggaaatgctgcagcttttgtaattggtgctgcgtctgtacctgtacctgattctaattgctacgctctcgacaattcaagtcgtcttgtcgattttgtatcctctttctattttattaaagcttaggatcaattcttagtaaaaaagtttgctttttgttgcattggtttgatttcgtgtcttgtaaagctgcttcctttaacttggtttgatcagagcagctggatcggtcatccatttgaatatgatggcaaggttgtgtatatgtttctcattttttagtgttgagagttagttttaaggactttggggttgagttggtatgtgttttttgatgcaggaatttgatttggtggttagattttgcaaggatgtggaaacaagagggcaggcggtaaaatatttctatatcatcaaattcaaaagctttttgtttctactctagattccactaatgtgcgttttcttgcgtgcagggatatgttgattttggacgatttgacccgttaagctactttgtttctagttctgaaaatttcgatttcgtgcaagtaagagctttcacttctttgctttgctctttgggatcaggcatcagaaccaattgttgcatttggtagactagtattatgatattatcctcggaacatggattcatttgttagtatatataaatatagggtttaccatggcgacctgtcaaattgtgaacagagttatgacaaacttggacgtacagcacaggttagatatcatctacacaagagtttttactttttgagcttttttgtggttcttgtcttttgagtatggtttctatgttttttcaggttaatattatttgtgggaactgtagtgatggacggtgtaaaggtgtgtttgcttctggttcttttttgtttgttttgcttcatcaacatccaaaatgcttccaattcttggaaagctattcatttttattctttcttttcctatatcaggtggacttggatgcatatgtagtgtcacccaagattcaacttgtaggtctgtctgctactattgtctattgtctcttggtatagtcgattgttcttacaacgaattcctgctctttcccactggtccagagttactgtcgacttggctattccatgtgagaaacctggtccgcgggtgtttaagggatttacagtcggtttgcatcctcgctcatgggaaattgtaagaaacgaacaatcccaattttctggttacagctttttcttcaaactgaacataaacttaaaattggatttttcacctgcagatctataatgggatgacacagtttggatttgataagccccgtcgtgagtttaggtatgaaatcaagaactttgtttgttcatgtttgagttgctgtgtatttacatcctgaagtgtttctgatttgtagcttcaagaccgagcagactcatctcactctctatatgactgcaattgcttctctttcaacattggtagggaagcctatcatcaaggtttccccagagaatggtcttgatgttaagatagctggttcttccttgactgggaatcatccaacaactttatcaccgtcaactttagtactggattggaattgtaataattcctgttatcttactttttgcattgtgcctttgatctttgttgttacttaatctgtaacctttactttttttctcctggaaatttcaaaggtgagaaatctcggcgaactccatatgaagtcaatgtcaccatcccagtggatggttatgatcctgttcagtttttccttacaaaactctgcggtgagcttattatagactcggcttgatcatccacaaggcattccccttgagctaaatatttccattgcttgatatcatttcagaatacaatcaaggtaacgaaggaggatcagcgaaaggatgggctatatttggagttttttcctgcgtgtaagtaatgctttgtgatcttccatgcggacatataactgaagaataaactcaactcattgtgttctggtgtgtttcttctgatcagattcctcgttgcatctgcacttttctgctgtgggggctttatttataaaacaagagtagagcgtgtggtaatcttcatatctttctacaattccacttccattctctaattattctctcacgtgatatacacacactcaatcactgatgtactcgtatggatgcagcgtggaactgatgcattgccggggatgtcacttctatcgggcttactagaaactgtaagtattacaagaaaactcaaaaggattccatttatgcaaaatctaagagaaagctcactgtggtctttggttacaatttatggatctctcaagagacaaatgctatgtaagctaattgattttggtcttgataaacaggtgagtggaagtggacaaagctactcaagaactgaagacatcaacaatgcttttgccaatgaagtctcatgggaccgctcttccgcatcttctactcaagcgacaacaacacagagaccaagtgaaagaacatatggtgcgatctaattttgtcaagtgcctcacaagaggtactgtttcaagccatggtatggcacgcttgtgatctgcgatttctggattttgctttgtatgtttattttctaccttctagaaagaggtcaaaaagttaatagcttcaccgtgagaatgttgttttcaccagattcatgtgctatgatagaaaaagacaaagcaaacaagagttctttctttgcttaggttacaagaacaagagtatcgttataaagtcaacaaagattgaaacatatttttgtcaagggagtggttagaatctcttcctactctcttgcctttctcactaagacaaaaaaaagacttggactttgtctaaggttttgtggatattattaaccaagtccttttgcaaaaagtaatattgttttttcgcattcctcttttagaatttagtttaatctaggctttatattggttattactttcttgaaaaatgatctgtttattctattcatacttggttacctcgctttttatcttacttctacaaaaggattatcagtgaaagttagtctcttactctcaccttccgaaaataaaacaaaaatatcgatacttctagatcaaaccaagttgattaaaacatccctattccctacgattctgatcttgagatatattatcatgttaagatctaaattgacaagaaaactgatttttcatttctagtaggaaaaataattactattagtgatcatgattgtcgaccgtaagaggtggtttagttactctccatctttctttgaagaagtcagaaagtcagaaattatatcaaattaaacatcaatattgaacacatatatctgtatggttttatgtttagaaaattccaatatttatatattcctagggaaaaagaagcttattcttcaaattattgttatgagtcgttaaaatatggataaaaatataaagtctaaatattaaaaactcagtttgctttgcttttacctctccaagtctccaaagtcaaattaattttagttaattaaaccaaaaaaggtttattagtcaaacttagcatgcaatgctgggtaccaaacccaagcattagtctcttttaatcttctttttctccaataagtttttacaatttttaattgtttgcatttcccttgattatttatcttcatcccaatttagctaataccaactccgtttcttattcttccaagtcttttcctataaatacgttcttcttcccctcttatttcatatcactcaccacaaagtcttctcatttcctcatcttcttgttgaaagtaatggcaagactcacgagctttctccttcttctttctctcatctgctttgtccctctctgtctctgcgacaagagctatggaggcaaacttttcccgggttattacgcccattcatgcccacaagtcaatgagatcgtgagatcagttgtagctaaagctgttgctagagagacacgtatggctgcttccttgttgagacttcatttccacgactgtttcgttcaggtttagttaatttcttttacgtttcaacattttatgttgttttaagtttacttgctaaacaaggtaactgtgaaatgtagggttgtgatggctctttgcttctagacagcagtggaagggtagcgactgagaaaaactcaaaccctaacagcaaatcagctcgtgggtttgacgtagttgaccaaatcaaagctgaactggagaaacaatgccctggaactgtttcttgcgctgatgttcttaccctagccgctagagactcctctgttcttgtaagtttcctccacaatctctattttctcgaaccaaaactgaaacatcagctaactcggttggtttttggtttagaccggtggaccaagttgggttgttccattgggaagaagagattcaagaagtgcaagcttgagtcaatcgaacaacaacatccctgcaccaaacaacactttccagaccattctatctaagtttaaccgtcaaggacttgatatcactgaccttgtcgctctctccggtaagctttcgtcactctatcacagtttcttgcttcacacacatggaacacaattaaaaaaaatccattatacattacttgcttctcaagccaccacacttctcaaatgttatctcaggtagtcacacaatcggattctcgagatgcacgagtttcagacagaggttgtacaaccagtccggaaacggcagtccagacatgacattggaacaatccttcgctgctaacttgcgccaacggtgtccaaaatccggtggggaccagattctctcggtgctagacatcatcagcgccgcgagcttcgacaacagctacttcaagaacttgatagagaacaaggggttgttgaactcggaccaagttctgttcagcagtaacgagaaatcgagagagcttgtgaagaagtatgcagaagatcaaggagagttttttgagcaatttgcggaatcgatgatcaagatgggaaatatctctcccttgacaggttctagtggcgaaatcaggaagaattgcaggaagattaactcttgattgaaacaagaaaactcttcttatatcttgtggaacaaatgtgagacatttacttttactttggagtgtgttttgtttgtttttttcaattctgtcatttggaagttttatttcgtgttatttgcgttgtgttaagacataagtttgaaatttataaaacttgtacgaggaaatattttgaaattataaactttaaactattattgggcctaaccgaacctaataatttatgaattcagaaaacactaaatcttaaaactgataggcccataaaggcccatttcacatcccactagttagggtttatgctttcttctcacatttcagcttcagatgcactgacatgaattctcaacgaagctaagatcaattcgatagagagtgaaaactatgaggaatctgcgaatcatctcctctcacttctcacgagttttgaaatccaccgagacacgctcaagttccgttcaattattcacgatccaatctcggagctactcatctccggcgacgcaatcggagaacgtgtccaaaatcgtcaatgagctatcgaatctcactcttttggaaacaatggatcttactgagatccttaggcagaagctaaacatcagtgaattgcctgtgatggcggcgatgatgccagggatgtcattaccgggatctggagctagtaaatccgccggcggagaagggaaagagaagaagaaggaagcaaagactgcgtttgatgtgatgcttcaagcgtacgatgcagtgtcgaagataaaggtgattaaagaagtgagaacgattacggcattggggttgaaggaagcgaaagatttggtggagaaagctccaacattgttgaagaaaggagttagtaaggaagaagcagagaagatcattgagaagttgaaggctgttggagctaaagttgctatggagtgaccatttttaggtacctctatactttcgattgctcctaagcagatggattagctagctttagtttgtttgattatgggaataaacaagctttgagattgtgtgagcttggtgttgaattgttagtgcttattaggtttgagaattggaaatgaacattaatttgattctggaattgcataaagttgcttgctttgtttttgtaaggggagtaaagttctgagcttgacgttgagtttcatgaagggcctttgaagtttcttgtcgaaatgtacagagcaagagcaattagaatagcttttgtagtctattgggaaacatgtgaaattgcttggtctataaacacttttagtaggtattctagcatctgtatgattcgtgtttgcttcatatgcttaagctttaggttttgacattgcaggtgttattaaaatggagcatgagcaagaacaaatgaagcttctgctgagtagtccttcctagtgtttattacaaatgtaagatgtgatggaaagtcatcagcagctcttttctttagagatagaaacagatttttgtcttctatcaaatatacacgaaggcttgttagaagcaaagttctctcttctttggatcaatcattctctcagttcttggtttgtactaacagttgatgatttctttcatataataatgaatcatgttatttccaaattttcaagttttatgctcaagcttttcgtatggttaaactgtagaaagaagctgttcttgttttaaagatagcaacagatcaagaactcgacctgagatcttacaattcgtttgtaatcacaatattataggagatgttatactttatcgtcatggaaacgccacctagtttctttgggagatcttccatgtttgcagtttttcaagtaatggtcattgtctttcggcttttgctgtaaggagagaacaataaacatcataagaagaagattattctgtgaaagcctttgaaatatgagaagaagataaaacacacaaaccttcacggatgagctggagagcattgagagaatgctgagacagatggaacttagtctcatcgccggtgaccacgaatcatacaagacatctgcataatcaaaagaacacatagaagggtcttgtcattggactttgaaacagagtgagtcattgtgtttgtatgtacttacctaaacaaatgtgaccgttgctgtaaatatgaggatgaagtggagctggatgctgaaagataacctgttttatatgtggaaccatcgggttatgagattgatgcgatgattaagtatcgttaagtattaacaaaaggagttagaggacgaacctgtggagcttccataggataatgctcagggaactcaacttgaagttggtaagtttcattggcgtaaagagttcctggaactccatgcacttcaatgatccatctgtttacaccaacaattcaacattacatcaccgattatcaatattcgaaggaaagacaataaaatgattatgtaccgttggagattatcagagactctgtgcttgaaaccagaaggaggattggtttgccactccatgaactctttctgcaaccggttcgtggcgattttggtcagaccctaacatagtaagaacaagagagagatgatcaaaccaaagacaacaatggaattataaccaaaaaggtactgttatatttagttaaagaaacaattaaccaaccttgcgagttgattcagaagaactcgtcatttgtgtttattacagtgagtgtgagagagagagattgtgtgtgttttgtctccttagccatatccagtgagctttttatagtgtcttatcatctttgcaatgtgtctaaagcgtttgggtctatgtccagtcatcaatccgacgtcgtttttattgtgtcggctctctttaatccgggactttccacttgtgttggagaagcgaatcttacacgcttttgctactctcgcgatcatgatcaaaccagttaggaatattatcataaaacattccaatatctatttcggaaaaccaaatttcttaaattaaaaatctcataccattatgaatatctgagttatgtaaattttaggataaccaaactgatgcatgcatattattgatattaaccaaaaataagaattgatacatgcatcaggtaaaagttggcttgtaacattattttaatttatttccggtttatggatccatcattcaacgatgccttggatttttagcgatgatatattgctttcattgtcttattgcccttgtccttctgattattttgaatggatcgatggttacaaaagttgtaagcaacttgattatatatcaaaactgactagtcataattacaattatgatgcatgatgttgttgtatgcattggcttcaccttaaaccaaaacttgtacacatttgttccatggaaactatggtctatgaactatggtaatacggatcttatattcctatctagttaggtccaacttaggtctcagaagaatatatacttggtagaacttagaacaaatatgttaaaatctatagcttatctcttaaattagagaagttagttagacttatacaaatcaatcggaccagatattattccggtttatctgaccgatctggtttctcctagtaagacattaaagaaaggtaatacatgaagtaaaaacagaactatggggaaaaataaaaataaagtctttttgtgaacaaaataagaaaatccattacaacagaaattccaagaatagaaagatattatgtgaagattcttgaaaatactattattatagattatcttttcgagttttggtctacatacactgcaaattttaactttaaatacacgtaagatcaataggtttagattctttcttatcctttactaaaaagatattaaaacaaggtaacaacaacaacaacaacaaagaagaagaagcgaagcatatacacttttgagtttaaagactttttaatcagcacttgtatttttgttcctttgcatcaatcatatcgctcaaacttggctgctcatgttccaaattcctgtttgaagaatcatctcatcaccacccttgcattcgccgaaaaaagaatgtcaatgattccaaagtaaaagatgatgattcttcacttttgacgttggaagagcattcatagatagaaagatagatgctttcaataatttcggtgcgtaatcataaagcataataatcttttaccttagttggagaagagagagtgaggaagaactttgtaagggttgagaattccctttgggtccagcaactttttaatggaagccattaatgcaacctgcataatattatattccggtaagaatagagtgacacgatagttctatacatagtttccatacgttgtttgttgttaacttacagtttcgggtgatttgctgtagaagatttcattagctttcattacacctaatccatgttccgcactgatgcttccacggtgctttgatgtccactcatagacataaggctctatcaaacctaaaagctgcaagaaaagagtgaatgaatgatcacttgaacatcttggaatgtttcatatggatatcagaattttaccttatcgttatattccgcggctgagatgtttaaatgtagatttccgtctccaaggtgaccatatcccataacatttgctaagtcacctgaagcattgcatatttggttgcagttttcattgaatctttcggtttcaagtaattaggagacaatgtattgatatatatcttacctaatctccctcgaagatcgttaacaatattgtaaatttcttcaaccggtaaggataagtcatacttgtaaacagctcctgctttctgtaacgcctctgttataccctgcagggttatgattatgactttattcgtcgtgtaccatcaagctttttcagaggaaataactctcaagtgttttacctctcgtatgcgccaaaatgaggatgcctggttaatgtcttgagcgattacaccatcagaaactaaacctttttccagtgacttcaacaggaaagcttcaagcttctccctgcattagtttttgaatcagacaaaaactctctcaagggatctgaaatacttagaattcatttaaatggtactggaaaattgtgaaagtcacagaaagaccagaaaattctcaatacctgtcattagtttcatcactccctgttgtctcgatcagaatataaaagttctccgaagaggaaactggattacgtacaccgtctaggtggttcagtacctgttgaatgaattaaaaacagaaagggtttagcaaaatcaaagccttgtgcacaagataaagtgtcaggaatgcaaacagttcctattagtaacttcctaaaagcttaccaaatccatggaattgttatcaagaaactcgaaagccgagagtatctctccaagatttctctttgcttcaacaagaagtttctgcaaacaaaggaaacacaatgagagataacagttcacgcactatctcctctgtagatagaattcaattacaggagtacaaaagaaattgtattaaacctggcagctgagataatctttgcaagcaatgaaggctaaatttacagaagacaattttggttgtgtgagaatagaaactttagttacaataccaagtgatccttcactacctgtggaaaccagtaaagagaaaaaatcaagatgatttagtctattttgctgatgaagtgatacttgaaatcattgtacaagcacaagccaatataatacctaccaataaacaaatgttttaagtcgtacccagtattgtctttgcgtaaagttccaagcatgtcaagcacgttgccatttgctgtgacagcttctagacctgagatgaagaaaataaaaatgatgagaacatgaaatccaaatgttttcagatggatcgaaagtaactaaaactgtaagtcattacccaatacagttccatgaagtgagccataacggattagacgcaaaccaccagcattagttgaaacatttccaccgatatgacagcttccttttgcacctaagtctagaggcataataaaactgaggaagcataaatttatgttgctacatctgacaaaacaaccgagctagttgagtaataatgaaacactcttctattaattttcagttcattgttgctaaaagaaggtacgaagacatggttctattacccttttgtgtcaaggaaagttgccagattttctaatatgcatcctgcttcacacaccaagacgccactaacctgaagatagagcatcgtatcatcatcaagtatataattatattgctcaaagtaacaatgaagcagcagttgatctaaatataagattgccaattacctcatcaaaagataagattttgttcatcagaccaacattgacgatcacctgaaaagatgccacaaattagtcacgtttatgatttcatttctttcggtatatctctcacattcctgaaaattttctttgctcgcttttctacactacctatccaagatttttgacagtcaccaatcaacatgagtagagaaacagtatagaacctcatcaaagacaggcacacttccaccaacaagaccagtgtttcctccttgaggaacaactgctaaacgcctcgaatcacagtactcaagtatctgagacacctgcattaaaaataatctatgtttaacacaaatagtcatcgcaatccaaacaaagtaatacggtagagactagagagaaataaaacacctcttgtgtattcttgggcaagagcatcagcttactagatcctttgtacttatgcatccaatctgtattagcagtctcaagcctttctttatcttcaaccacgtttttttcacctaatatctccttaaagtagctaacatctttcgaatccaacgacgaaaacaaagggtttctctgaattaaagaagctgctgatgatccaaaacacttatactgctgaagaagcatccccacatttctactaatacatggatgatgaagctctgtcttatagttcccatcacttagctcaaaaagcttgccttttgatttgtagtgattcacaaagcctaaacccataattcaaccaataagatacacatatccaaaataaaaataatcttatcctaaaatgtcaagtttctaaagaaaagatcaatatttttttatctaattacaaaagcaaagttcaatttttttcatctctcattctaattacaaaagcaaagtcaatttttttccatctctgatctctcaatctaattacaaaagtcaaattggagatcaaacctgacacagaacgtgacactgagtccttgtttggtcggctactaattagagatttgcatccaaatcttatgaactcccccgatcttctcaatttctgcatcatcattcttctacttctccacgtcttcttcgttcttaccaacaaaatgttcgttaaaagcgataaagcagaagctgagagcgaatgtcaatattacccctgagtttggataactaaacgctgcgttttattgtggagtagattttgtaaaatccctaagcttgagagagccttccgttgttgtggtggagactttggagctcctcaatctctccaatggcgtcttcttctctctcgtctctctcctcaatcctcagtaaccctcatggttgctctctctgtttcaaagcctctacacaacgttgtttcgctcttagattcctctcctcaaaagcaacccatgcttcttcatcttcttcctctgctcttctccctcgttgccgtagcagcacccatcgtctcacacagaaaccgatcaataggaagaagggattttccttaaatctttctagaagcttctctatttctcaaattgctagttccggtaagtttgatggtccaagcctccaccagttcgtctccaacgctcaagcacacgcttctcttaccactcccgaaactgaatctgagtaagtcctctgtttttcaaaccccattgttctttttataacttaattggtgttggccattggttagagaacctaaagtttagaaatttaaggaatcagagtgctaattaagttccaggaaccattaaagtcaatctctttgctcatcaatccatagattgtagaagattatgttagtcacagttctatcttttacaagcgattactctcaaattgtggattgtgctgtatagcttatatagatgctaatacttttcttttcggattcattcttgctcttagaagcacactagattctgacattgcatcaaaaggtcggatttatcacgaaacatatggatgtcagatgaacataaacgacatggagatagtccttgcgataatgaaaaactctggttataaagaagtagtgacggatcctgagagcgcagaagtcattttcgtaaacacttgtgctatcagagaaaatgcagagcaaagagtatggcaaagacttaactacttttggttcttaaaacgagaatggaaagtaaatgctgctacaggaagagcaaaatctctcaaacctcctaaagttgttgttttgggatgtatggctgaaagattaaaggacaagattctagattctgataaaatggttgatgttgtttgtggtcctgatgcttatagagatctcccgaggctattggaagaagtagactatggtcaaaaaggaatcaacactcttctttctctagaagagacttatgctgacatatcccctgtccgaatctctgaaaactcaattaccgcttttgtttctgttatgagaggctgcaacaacatgtgtgctttctgcattgttccgtttaccagaggcagagagcgatcacgtcctgtagaatctataatccgcgaggttggggagttgtgggaatcgggtgtgaaagaagttacgcttttagggcaaaatgtgaacagctataacgatgattcagctgatcgtgagtcaggtgctaactgggaatacagtgagggattctcgagccggtgtaaagttaaaaacatgggtttgcgatttgctgatctcttggaccgactctctgtagagtttccagagatgcggtttaggtttacatcgcctcatcctaaagattaccctgacgagttgctgtatttgatgagagatagacataatatctgcaatctcatccatcttcctgcacaatctggtaatagcagaatactagaacaaatgcgtagaggttacaccagagaagcttatttggatcttgttaaaaagattcggagtattataccagatgtggctataaccagcgactttataactggtaagcctactcaaaatctttatgtaacttgtcttagaatcggtttacttagaatcttgatgtaacttgtctgatacaaaagaggcaattgtgtatcttgataggcttctgtggagaaactgaagaagagcatcaagaaaccctaagcttggtgagagcagttggatacgatatggcgtatatgtttgcatacagcatgagagaaaagacacatgctcatcgcaactacacagacgacgttccagaggaggtgaaacagagacgtttaacagaactcatcgacgcattccgcgaaacaacaggtccgtgttatgactctcaggtaggatcaactcagttagttctcgtcgaaggaccaaacaagagagcgcctgagacagaactcattggaaaaactgataaaggacacagagtttcgtttgtcacgaagcctctgtttgataaagcgtgtcttcttgatggtgatgatctgaagaggaatcctggaattggggattttgttgaggttcagatagagaaatcaacgagggcatcgttgtttggggaagctctcgcgattagtaaaatgtccttgtttcacgatgttggtgtcgtcgatgctgttgttgcgtcttgtgcaagttaagttgaacttccgttttctttgtttcgaaagcctttatactttttcttctgtatactttcttcatagttaaaccaaataagttatttacagatgaattttattacttttttgaaaacacaaattgtaactgaaatggatagagaaacatttttgggcatacatgtattcctcccctggttcaacgacatgtttcttcgataaagttgacaaaaaaaaggtagagaaacagtgttgaaaatgtcagcgatgaacagaaagagagatcgtcgtcaatggcgatggttagtgatgatttgactatgacaagtcaataaacactatgctctatgcgatggtaattttatatatatctgttagaaagaaaaaaaaggttcatagctcgaggcatttattaaaaaaaaaaaaaaggtgtaacggcagaaagtagtataaattgaattatttcagtttattttgatggtaatataaatctataaattcaaacaatgttttgttaaatatgtttatacatatatgttaggcagaaagcattccaattaattagttgtggaccgaccttttaattaacatttgtactacctccgctttttatcagagacatatattcgattaattaatttggatattaagtctaaagtttaaagaagggaaagaaaaaaactccaatcacatgtcgtaggaatcacactccccaataataaagttggattagtatttctcaagaacaaagttggtattcacatatctaaatttgtaagatgaaatatacgagtacaaccagaacctaatataatatataggttttggattagtactgtatttctactgatatcgataatcatagtttaataatttagtgtcattggcaaataaaatatttaatacactgattatcataatttatgtgactgacatgtttattataataagatcatggattaatcagtgaacttatgttcatcattgtttccaagtctaaaagcagatctcgatatatatttatatttttcaatgcgcttgatgatatttaattcgacctatagtatcaatcttgggttttactttgtttttaatcatatgctttaccaataagcaatgtttgttcagggaagtggatcctattattgagatttaaacatattgaggcatgcacaagtataataattattcgttattggtgttaagtaactcattttatctgtcaatctataacgaaattatactcatttttttcttctataaatggataaaccaaaaatgaatagaaaataaattaataaataaaaattggttgggggtgagaagtagctatctaatatctaaaaatgagacgagacaaaacggcctaagcgtggcgcaatagccgctcccaatttctgtcccctcatttattcctcactattgttttgaaaattctgttttgttgcaatcttagaattaaatactattaacgtcgacttgaagctacaaattttggaaatttggatccgatgtttataactcatggatcaaataaatgaaagatgcatatgaatctgattttctaatgattttgaaatatgaataatcaaatatttatatatatacatctaataagtaggaaaataatttcataataataatcattgtctaaataatcagacctatataaaaatagaatattatcaagtaaatttatacaaaaatataccattaaaatactctgtatatagaaatatgtgaaactgtatttgatcactgtctatcgttagtcgttccaaaagatcctattgatttaggagtatttagtagtaaatacctttataatgatggacaacttaattaccgtgtgatacagtcaatgaataattaaataagagagcactaaaattaattatgtgtttctattaaaagagaatgttacaataataatcttatttaacaaaaaaaaaaaatattacaagagaatatcattttctattctaaaattagcttatgagaggaattagatatttaattccataaaaattgattttgtagctatatcaaatttcttataaagatggaatgggtaatcagaaaaatatcaatacattgatacatatgtcattatgctgttgaccaaaaaatgtcattatgcttattaagttgttgacatactaaaaattcaagattatactagtaattaactacttaagatgaatttaacgaaaataaaactattttagattttttagcttggtaattaagttgtttttagtgggtttttaagtttaagtatatatgcaatacatatttggattgtatatagtgagatacgggtaaaagtggattttatatcattaattcctctgtttctcccccattgaaaatgacatcaccatggctttaagctctacaaatacaaatatttattctctcactttctctgcctgcatggtttttgagaattgagaaaacccttttaaaattctctatcgatctcatcacaaattttgctatatccacaattcatgtgcttaggcatatagttattcccaagaaaccggtttaactgtttacgtatgcaacctccggcaagcgcaggacttttccggtcgccggaaaatctcccttggccttataattacatggattatttggtcgctggtttcttggttttgacggccggaatacttctccgtccatggctctggttacgtctacgaaactcgaaaacgaaagatggagatgaagaagaagataatgaggagaagaagaagggaatgattccaaacggaagcttaggctggccggtgatcggagaaaccctaaacttcatcgcttgtggttattcttctcggcctgttaccttcatggacaaacgaaagtctttgtaagtcattttctattaattcctattaactagaaaagtcattttctatcaaattcttatatatttccgccattttattcgaagtccatctttttaataaccctagattaaataattttatttttcgtttatcccaaaataagttagtaacaaaatacctaacaccatggaattagccaaaaaaaaaaaaaaaaaaaaaaaactattgtaaccattagtattaggggttataacaaactgatctcctttttaggtaaagaagaaagtacagtggttatgtagtagtgataatttatacaaataaaaattttggggatgcaaatagttaaactaaaactcttggacataacatcatttcaattaaaaagaagagactgacaaaaccaacctgtcttcatgttcttggccatatacaacggcaaaatagtttaagcggatgatcttgtttttttttttttttgggatgattgaattcacttcatttcatgtgtcatctttatcccttttgttttctatattattttctaatgttattattattattttaatatacactaaacgtccttgatgtgaattcttctgctattcattattattttttgtatactaataaatttttcaaaatgggtcctcttgaatacccactgatttatcgtttacctatattatttattttctcttagaacggacaccttcacgtttttgttttcaccatatataattttataataaatgtgcagtggtaatgatatataatcgtccatggatccttagcttctttattgctcgtcttagatttacaaaaactagcaacgaccaaaacaaaaattacaaaaactagcatatgtataataaggattatatcatgttattccgagtatgattaatattagtaaattgtagtgagtaaaggaagaaggcaatacctataacctcgggatattcgaggcagagagattataaaaaggcagcaaatagacagggacgaaatatttctttttgtagccatacaccactagcctacttctccatagacttcagctttccatttaattcatcatctcatttaagccaaagaagttatataagatgtgaatattagaatataccaactcatactcacacacacaaaaaatatatatatatatatatatatatacgaattctaggttaatacactatctttcaaaatcattaaatgggaattttttttgctatcattgtatcagttatatatctcttaccgagtttttttacatgttaacaatatagatacgggaaagtgttcaaaacgaacataatagggacaccaatcataatatcaaccgatgcagaggtgaataaagtggtgctccaaaaccatgggaacacatttgtccctgcataccctaaatcaattacggaactacttggagaaaactctattctcagcatcaatggacctcatcaaaaaaggcttcacacgctcattggcgcgttcctcagatctcctcacctcaaagaccggatcactcgagacattgaggcctcggttgttctcactttggcgtcttgggctcaacttccattggttcatgttcaggatgagatcaaaaaggtattgtcttagaaaatatattagtagcaaactcacacgtacgtactaggtcacatgctataacacattttttaattggtagaatgtttgttgttgttgttgtagatgacgtttgagatattagtaaaagtgttgatgagcacatctcctggtgaagatatgaacattctcaaacttgagttcgaagaattcatcaaaggtttgatttgtatcccaatcaaattccctggcactagactctacaaatccttaaaggtaaaatatttccttataatacatgagcatatcaatatctgatttcattttgttagtgtgtaaatactagggtttaatacttcaatcatgcaggcgaaagagaggttaataaagatggtaaaaaaggttgtggaggagagacaagtggcgatgacaacgacgtctccggcaaatgacgtggtggacgtacttctaagagacggtggtgattcagagaagcaatctcaaccgtcagatttcgtcagcggaaagatcgtagagatgatgatacccggagaggaaacaatgccaacggcgatgaccttggctgtcaaattcttaagtgacaaccccgtcgctctagccaaactcgtggtacgtattgatgtgcacgacttacttacacaacagcacacgtgtgcgttttaatgcatattgccgacgtctgtggaccgttagattagatgtttgtcttgtgaggagattttaacggttaagatttagttatttttcgaagtggtggacctagtttgacttttgcatccgtgtcgagtcaagtcgctgtcgaaagtctttcgacgggacacacgagtacacgcacgtgtgggaagggaagagacacgtgagagtatattagccgtaggattaagaaaacagagtggacggctgtcagagcaggacgatttgtattaacgcctttgtctgtacgagcgaccacaccgcctgtcaaaactcaaaaatagcgtttcgcgtcacagaaacgctttgttttcaacgcgttattgtttcaatcaaaacgcattatagtagagatttttttttttttttttcaaataataatttttatatttatttatctacaggaggagaatatggagatgaagaggcgtaaattggaattgggagaagaatacaagtggaccgattatatgtctctctcttttactcaaaatgtaagtcgtagttatgtaatttaaacctaccaattgctttatatatatatatatatatatatatatatactagctagttattgaaagggattagttacaatatactagctaatttatttttgtttttgtaatcacacaacaggtgataaacgaaacgcttagaatggctaacattattaacggggtgtggaggaaagctctcaaggatgtagaaattaaaggtaaatttcttaactataaattgattttccttgtgatgaaactatataattttttggtgggtgaatgagcaggttacttaataccgaaaggatggtgtgtattggcatcattcatatcggttcacatggatgaagacatttatgataatccctatcaattcgatccgtggagatgggacgtacgtcaccatttccttttagtataattattttgcttcagagttaacttcatgatcattagtttagcttcttcttatcaaatttcatctactaatacttgtcttaatttattatgtaacagagaattaatggatcggcaaacagcagtatttgcttcacaccctttggtggtgggcaaaggctatgtcctggtttagagctgtcgaagctcgaaatatccatctttcttcaccaccttgtaacccggtacaggtagaaacccatgatttaatattgaaaatgttttttcatcaactaagtataacttgtgttagtccatattgatatcttgagttggccaagggccatacataattcattccaataacgtatcaagggatactgtaatggactagataagtccaggtctgattttaacaggctggtcttaaatagactgatccatatgaaatggtctacaaaagtttaaggtcttttttggtctacagttcgcaaacatatactaccgaatttgagcctaaccatctctatgttgcgactttcaactgcattttgttatactttgtgattatatatatatgatactaattgttatgtactaatgtacatgtagttggacggctgaggaagacgagatagtgtcatttccgactgtgaagatgaagcggaggctcccgatccgagtggctactgtagatgatagtgcttctccgatctcacttgaagatcattaatagatcatttcaaagaacaaaactgtttgtgcaaagaggaagcagagaagtaaacaaatgatcttattaacaaatagtagagaagagaagcaaacaagattggtgggtaagacagaaagagccatacgtacagctagtgatggctcaaagatgagagattctaattataattttttttgtttgtcatgtcaaattataagcgttggttaggttgtccctttctcttttatttatcgtaccaaacgcaagttgagatatgattccatatatatggatgatagatatgtatattaatatataccttcttctttttttggcagctattaacattatgcctatctcgtctctatctagcttttgttttatgctcgagaaaatttagacgaaaatatatcgaaaaatcgacgactagtctcgatcgataatatgatgatcacttcatttacttcgaccgacgggcgatgacgtgatatcataatatatacgttcaactatatgataacatgttatattaaaagagtataatttggtgggtaatgatgagaatagattggaaatttatggcggccatagtaaggacaatgccatgcacgaaagacgaaacaggtccatggggaatacacgtgcatgttgtttacgtcgacccaccttataattatttccattattatcaaatttgtggagcctttctatgtcatcatcgacaccgccgatattcagcattatttttttttgttttttttaacttaacgatgggttttattcgtctactttattattgttcttaataaatatatattattgttcttaattcaatgtacaagcaaattaatgattaaataactgtatttctgaagaggtatatgccaggacttcagtttttatgtatataattgcaaatcataaattggagtatcaatgcaaaaaaatttatatttccacatgcatgactgtaattgttttagatagtgtggagttatactaagaacttgttttgtccatattatccaaaaaataaaatgttttagttgtatcacattcacatgtgttgacattgaaggttttaaagaagagataaatcaaactaaactgttttattgtgatgttagaattcattaataagtacaacattttgggccgatatatttgatattaagcccttacttagcttattttggcccatggttgcccacgtttatttctaaccaattgttcaccctcgagctaattctgatggatcaagataaaaatttatttattatttcactccgtaaataaaaagaaattattatatatgttggttcacatatagaaaactaggtgataattcttagttcccaaactgactccaagtctcgaaagcttatatgattcagtaaaaactgcatcttacattggcattatgtttttttttaataaaaaattctgaatttagctttggcttgagtatctgttccagctcctctgtttctgtttcaacaacgtcttatattgtgaagctcatgctttaacaaaatcaataatagttctgcgaaagccaacatcccctgcctacttttatttattttttgtactgtcgttcagcaatgtatgatttttgtttgaaatggcacatgaatcatgcatccattattctagaagtactactaaggcccaaacaaacaaaaaatgataaaaaaaaattacagttacaacgaagtactaaccatatgcatggttgaaaacttgtaatacaatcaatagttcacagtatactatagtcagtcgacactttacggcgggccgggcctgactataagtctataaccttgtaatttgagtgatatagagaattgaatttcgaacattgatttaagtctaaaatcggaaaagttcctaagttcgtttaatatataaatattttattggcacacaaaaaaaaagataaaaatatctgatcgcgggtctcgaccaaatgggcaacgaatgattaacaataagaatgtttaaggttctgaatgattaaatatatgttaagcaagcaagtaattatggtgaacattaatgtatatgtccactgtaaataataactatatctttgtaagtatatgtatatattaaaaaagctattattgctacgtgcttatatatgtctctttgtatggtcaattcaaccatcgatctcgatgactatgttcaacggcatggtccgtccgtatcatgtttttttctttcatgaccaacaacaaattctagagataatattaaatatttatgttatgtttgttcacggatcatgggagaaagaaaacaatataatggtttgcaataattctttaaaattatgtacgctttaataatgactccatgaaggtcattaacataagtctcgttaatgaccgttattatattcatttcatgcgaagcctttgtctaacaaaaattgaaccaaattatagatgttattatagcatatcattaattatgttctattatcccgaaagaatgttttgtgcgagggattgataaattaagttgcaggcgtcgctatttgatttagtttgatactaattaaatacaatttaagttttatttaagcttaattttttctttatactttctacaaatacctttttttgttatgatattatgtattcatatatagttcaattagttcaaatcggtacgatcatataatcatattataaatatagtttagtttcgattaggttacagaaacatttctgtatagtagatatttttgcatccccatatttgaggtaatacagtcatggcactatcaacatttaatgtaatgttttccttgaaacgcaaatgactcctttggtgtggggatctatattatttatgattgactcaaccatcgaacatgtgaagtactagatgatgaattcttatttacgaagtaaggtgtggtaacattgtaattttaatacaaaaagatctccatcaattatacagatcagtttccttatttgcatgtactagctagtggtccgtaaaaattgttaaaatagtattaataacgaagatatatacagttaatgcgacatcgaaaaggtattcagtcgacagtttcgttgtaaaagtttatcaacagtcaacagaaattaatcatttgatgagatgatgagctcaacggtaagcttataacaaaaaaaggtggatcctttgataacggcaattagaaattgtaatttgatcgacatgtctcatttcatttggtaagcaataattatgtttataaaacatgattataaactcctgtacttccataatgttgtattgttgtaaagggtttggttaaaggtttttttctttaatggaaaaagttgtaaaaaagaaacaaaaatgtttaaagcaaaaacaaaaaaagttacaaaggaaaaaaagcgacatgaaaaggatcgctacgaagagtcaaaggcgcgaaagttaactgacgactaacgtggcgctaaatcaagcctcaggatccgaccgagattcctttttagttttaccaagtggtaagaaaaagttacagttacagttactttggcgtcagtgaatcttgtattctgattacgtccagacccgtgagtgcgtgacgttcagcttgcaatttaaagagttttttttttcttctaaatatgatcaaattctctctcttttttttctttccaaatggtaataatcactaatctaatttttttggtatcaaaataaataatcaatactattcattttatacaaatatgtggtcttgtgatagataagtaataagttgatggattttggaaaaatttgccatattcataagaaaatctgatgcttctcaagatatgctgaatttagatctagcgttacacataggtcgatatagctagcacaagaatgaaaactaactttatttgtcttgggaacaagcgaaagatcgaaactccgacagacgtaatcttaattcgctgagaggcgtgtgagaattgcctttttccttgaatataaaatgcactcccataatgtaatcaaacaaaagatataaatagaataagaaaaataacaactcagcgtaacggagtccgattaacggagtgagaaatcatctggtttctcgagagttctaagccaatgataatcgaaggaaacgaacggtgttgtgtgtgtgtggttaagaaaagaacaaactcatacgagacacgtgcaccgaagctttttcccacgtgccaaagagtttcgtcttcgttcacacagaaccaagatgggtggtaacgaaggtaggaccctaaagcaccagcctacaacacatagatgaaatagtatatgcgtttacatggatttgatgaattgttgtgtttagtatataagtatattgtttagaattatcaaaaagtatactttataaaaagagtggtggtaacatatttagtttctgcaccaatataaaaagaaatatggtgatgtctaaagaaaaaagagagaaaacttagccaccaacaaaatattagaagaagatttcaccatgtgaatggaagggtaatgttttttttctttctttattttgaaatgaagggaaggaagttgttataaacaaattttcgaaaaggttaatgatttaaatctactataacctttttgatcctttagtttggaacaaaagaaagtttcagagttagcgatattttagtggaaactagttgttgattctccaactaaaattcaaccaccattagcataaaacatggttattttggcgaagtagtttactttgcaacatctatctgtattttactatataaaataatacttaacatatacaaataaatagaaattaacattagaaccaatagttatatagtttagctgtttaggtaaagcttagtaagagtggatgcaatcctttcccgttttctctccgcatttcacgccgtcgaagccttattagggtttaatacaaatccataatctctcgtttccttattattaaaacatcccatgtggacaccaggactaaaaatcttgacaatcagctttatttgatgactgaagtatcaaatttaaataaattaactagttaactagttatataatgagacttattttgaccacttaggtccactaatagacaaattaaattatcttatattggttattgtcccatcgtatgaaaatcaaggatggtgttttctaccagggaaatagttacatatatagtacatgatcaaacttgaataaactacacgataatgatcattatttgttgaaatcaaataactttaacaaacaaacaaaaaaactaaaatcaaataagaatattagtagcatagtactttcattataacctttatgaaattttagtaaatagtataagaatttctcaatatgcatcgattttgatttaataatgagtaaatgaaacgaatagaaacaacattttgatttgattaaacaaatagataaaaacaagactcataaattaaaatttggaagtttccgacaattagaaaagctgattgatatcgcatctgattgcaaatctgaccagaactcgaaaatattgaaaacatattttaggaataataaaagagatgatagcttaagtggaagttgaatgtcggaccgtacgtaccgggatagttctaatagacacttctcatttattctttttccttcaattatcccaactgttacacagttatattccataaatacccctagtcaaaatgtgaattcacgagtcaaacccataaatgcagactactgtcggtgtcggtgggtgaaactagcgtaaaatgatttagggtaaaactggaatttcactatatgcaacaaaagagcattcattcacatgtttatgtcttttgtgtgatttatatcttctttcttttgacagttacaaacttacagctaatcctttgattaaggaagcatctcttaattaatctcaagtgggctgataaatttgaactttcatcagatccaagaacccaaaattatatccaaccgatcttcaaagaaacttaccaaataaattgtaaaatagtagtatatgacatatccaccaaatctacaaagttcaaaggctactaaaaccaaattccaccgaagaagaccatataataactataggccaaacaaaactacaaaatcaatttctggaacaatgtgaatttaataagtatggtaaagtctgtacacatatctaaatgacaggtacactgtgattttggaagtggaagacacttgtacaatgtgaatccattttgacgactgtccacaagactcctcactaataaaccaaagtacttcacgtactctatctttttatatcagtttaaatgaccaaatcaaatttcaacatctactaatcactaactcaaacccataacaatattcagccataaacacataatatgttttaagttagtgactagactgacgcactaaatcaatcaaccaaacaaaaaaaagaaaacgaaactgaaataaaatatagcgtgattagctgctttaattcaatcaacgtgccacttttttcaccctaatatcataatcaactcttactttattttatttctttacatcttcccgtttttttatatttccgttatatgatataaaaacaataaataaaaatgcgtaaaaattggtgggaaagcgtcggtagctcacggccacgcagtgatgatgcgagtaagagacacttgtgaagtgcaataaaacccccttcttcttcctctctttctccttcgtcttcttcttcttcttcttccttccttctctctccttattaagaaagaccaacacagacacggaagaagtagcttggttcttctctttgtgaaggtgaatgcgggagatggggactggagattctgcttcgagactgattctctggttctgcttagggtttttgattctaggtgttggatttgtgcaatgtggagttacttatgaccggaaagcacttctcattaatggacagagacgaatcctcttctctggctccatacattaccctcgaagcactcctgatgtaagatttaacaaaagccctaaacttttctcttttttcttcttttgggtttaacaaaaagaccctatgtttctttcctttatgttctgttttatacaatttatcaaaaaggttttagctttattaattttaactgttgttcttgttgttagatgtgggaagatttgattcagaaggcgaaagatggaggcattgatgtgattgagacgtatgtgttctggaatcttcatgagccttctcctggaaaagtatactttttcttacttgttttcttcagttatgttccaattttatacattatgttctttgaatattgatgattcctttcttcctctcagtacgattttgaagggagaaatgatttggtgagattcgtgaagacgattcacaaagctggtttatatgctcatcttcgaattggaccttatgtttgcgccgagtggaattttgggtaattaccaaatttcctttcttgtctcttcagcttcagacgcctctagatttggctacttatgtgtgtatgaattcagtttctgtttctgctcactaaagtttttgtttttgtttttggaatgaccagaggattccctgtttggctcaagtatgttcctggaatcagcttcagaacagataatgagccttttaaggtctcttttcttccactttgagtttccattatctaatttttcctcttagaacatttactttattagaagcttaaaacttgtgatatgaatgttgttgtgataatgtttgcagagagctatgaaaggattcacagagagaatagttgagctgatgaagagtgagaacttgttcgagtcccagggtggtcccattatcctttctcaggtaaaaactttaatggaaaagattagtgctcggattggagatcatgcagatttatggttttagggatctatgtgagttaatagaaaggtgtcatctttcatttgactgtagattgagaatgagtatggaagacaagggcagttattgggcgctgaaggtcacaactacatgacatgggcagctaaaatggctatagcaactgagactggtgtcccgtgggtcatgtgcaaagaagacgatgcccctgaccctgtggtgagtttcttttgattgcataagcattgtaataacttaattaatgagtctagagtgggtgaatgtctttgactttgaagaatgaactctaactcattggttttggttgacagataaacacatgtaacggtttctactgtgattcatttgctccgaacaagccatacaagcctttgatatggacagaggcatggagcggctggtagagattctcatttgctttccctttatatctgtacatggatttgttctcttcaaatcggtaaccttttttattctgtaaattggaaatgcattaccaggttcactgagttcggtgggccaatgcaccatagaccagttcaggatctggcgtttggtgttgcacgtttcatacaaaaaggaggatcttttgttaactactacatggtatgtacactttagcattttggttaatcatctagctccttacacactgtaagctttggttatcatcgagcatctttaaaatataagatccattgtcttttcttgagaacagtatcatggaggaactaactttggaagaacagccggaggtccatttgtcaccaccagctatgattatgatgctccgatcgacgaatatggtaaggacaagcagcgaacaaaactttctacacattcattgaaatataagttgatgcaatgctttatgtactaagtgagtcgttgttaaatgttaaacaggtttaatcagacaacctaaatatggtcacctaaaggaactccacagagctatcaagatgtgtgagaaggctctggtgtcagctgatcccgttgttacatcaataggaaacaagcaacaagtatggatttattatgagagatttgttttggtttacttgtagaaactttctgtagcttttactaaattatatcctcttttctactttattttcccaggctcatgtatactctgcagaatcaggagattgttcggctttcctagctaactatgatacagaatcggcagcaagagttttgtttaacaacgttcattataacttacctccttggtcaatcagtattcttccagactgtagaaatgcagtcttcaatactgcaaaggtaagtgtatatggttgaaactcagaattatggttcctcaaattctctgtgttttttctgattcttgtggatttctcttgtttaatttaaggttggagttcaaacatcccagatggaaatgttgcctacagacacaaagaatttccagtgggagagttatttggaagatctttcttctctagatgacagctccacattcaccactcacggactcttggagcagataaatgtcacgcgtgacacaagcgattatctttggtacatgacgaggtaaaagaaaaacccgtctgctaccttatacaatgtaaactttccctagcttcaaagtgattctcgacacgtgctaacaaacatgtggaattggtatgtagtgttgatatcggtgacagtgaatcattcttgcatggaggagagctaccaactctcattattcaatctacaggccatgccgtgcatatatttgtcaatggacagctttcaggtatgatacttccactagtttggcctgttaatttgttctattagagaatttctgatgcaaacttataatatatgaattgcaggttctgcctttggaacaaggcaaaacaggagatttacttatcagggaaagatcaatctgcattctggaactaacagaattgcgttgctgagtgttgctgttggattaccagttagtagtcttttctctcttccgtgtaaacgatgtttttcgtttttctcttatcctgacccctttcctctttttcgtttttgaagaatgtgggtggacactttgagtcatggaatactggaatcttgggtccggtggcattgcatgggttgagtcaagggaaaatggatttgtcatggcagaaatggacataccaggtgttttatctatcctattttctcgtgatttctctcttttgatcccttttttctgtattaagttgtttaactctgttttcatcaggtgggactgaaaggtgaagctatgaatcttgcatttccaaccaacactccctctattggatggatggatgcgtccttaactgtacaaaagcctcagcctttgacatggcacaaggtttgattgaatccaacacaactcaacaaagctttttttctaattaagaatctgaactaacgagtatattttgttttatttcagacttattttgatgcgcccgaaggaaatgagccgcttgctttggacatggaaggaatgggaaaaggtcagatttgggtgaacggtgagagcatcggaagatactggacagcatttgcgactggtgactgcagtcattgtagctacactggaacatataaaccgaacaaatgccaaaccggctgtggtcaacctacacaaaggtggtaccatgtgccgagagcttggttaaagccgagccaaaatctgttggtcatattcgaggagcttggtggaaacccatcaactgtctctttggtcaaaagatcagtatcaggagtttgtgctgaagtttctgaataccacccgaatatcaagaactggcaaatcgaaagctacggaaagggacagacatttcatagacccaaggttcatttgaaatgtagtccaggtcaagcaattgcatccatcaaatttgcaagctttggaactcctttaggaacctgcgggagttaccaacaaggagagtgtcacgcagctacctcatacgctatcttagagagggtaaaagatataatctttacacagctaaaactggaatcagactcttcttctttttttttctaaccacggtgtgttttgatatatgcagaagtgtgtagggaaagcgagatgcgcagtgacgatatccaacagcaatttcgggaaagacccgtgtccaaatgtgctgaaacggttgactgttgaagcagtttgtgccccagagacatctgtaagcacttggagaccttaaagacaaccattgagccctttgtctacaaaatgtataaccaaacaatacagagagagttgaagaaaagaaattgtaagctgtgtttaaaatatgtgtgtgtgtgtgttagtttgaacagagacatttgtgggttagagtagtttcagatagataagagagaagagtctgtagagttgtgatgagtctcgggcaattccgtggctcattaaaaacgttcaggccaccggtcaccaccgaccattttaaccggttatggagaccgggattggtgggtctgaatgaagtcagtttaaggtttggttttgatttgtctttgtaatcaactaaagagggttcaggtttaggagaaaggagatcctatggtgacccatttctttcaaacctattgtcgtttcactttctaatttagttctattttccctttttctttttatctaacaaaatatttatgtttcataaactattttttcttcgtaaattataaaagctttttctccgaagttaaattggagaaaatctttaatattaaaaaaatcgagagaaataccctagaatagctattttttttttgtcggcagaatagctatttttccaatatatattttacaataaagtaaaaaataactgaattattccccttaaactaaattatgaaacctttatgacttgaaaccaaattttgacttttaagaagcgataaaattatgctatacgaggttaattatgcaacattatcccaaaaagtttgtttcgaaaatacgaccatgataatctcaataaccgtttaatatctataactaggctataagaatcctatttctattcgaatattctttaaaatccaactttatctcttcttttgcaaaaaaaaaaaaaacttcaatttaagttctatataaaacgttgtcacccatacgtttaatcagaaaacagaaagaaacatactcaaaactttttaagcagcgacgatcatagatcaaatatgaggatgaacaaaattttacttgtttttgtgtttctaagcattgccactgtaatcaatagtggaacaacaagcaactttgtccgcacagctcaaccatcaactgagatgtctctcgaaacttttccatctccggctggtcataatgctccggaacaggttttgatttcttagttctactttttgattttctggttcttagatcataaatttgtgtttggtaatttagggtttaagtttctgaatttaaaagtatcaatatcagtaaggtctgcacatgggaataattagtaacgattaattatgttttacgtacagaggccacacgttgttttttctattattatttttgtcttttttgttgaagtccctgattgtatattttgtatcttaacaaaacaattaatccatcttgatttcttgtatctttggctaggttcatatcgtccaaggagattacaatggacgtggtataatcatatcgtgggtgacccccttaaacctagctggttcaaacgtggttacttattggaaggcagttgatggtgatgtgaaaccgaaaaagaagagaggtcatgcctctacctcgtcttaccgattttatgactatacttctggttttcttcatcacgccacaattaaaggactcgaggtttgtaatttgtataatttaacttgttatataagtaacaacatcactttcttgtttcaaaagtttttataaaagtttctttcttatatcttttcggcagtatgataccaaatacatctatgaggttggaactgatggatccgttagacaattttccttcactagtcctccaaaggttggacctgacgttccatacactttcggcattattggtaattaaattttcttttacctatcttttgaaactagatataactaatacttccaactcgatctaataattacattgtgttttgtaggtgatcttggacaaactttagcttctaacgagacattatatcattacatgtcaaaccctaaaggccaagctgttctcttccctggagacttatcttacgcagatgaccatccaaaccatgatcagagaaagtgggattcgtggggaagattcgtggagccttgtgctgcttaccaaaccttcatctatgctgccgggaatcacgaaattgattttgtcccaaacattgtaagttcacattataattctctcaatttattgctttttttctgatcagtagtttcaactttaataaccatatgaatcttaattagggggagcctcatgccttcaagccctacattcaccgttatcataacgcctacaaggcctcgaagagcatatctcctctttggtactctattagacgtgcatctgctcacatcatcgtcctctcctcttattctgcctacggtaattagtaaacacgtaacatctttaagattattgtttcttgttttttttttgaataacgtgttattcatatttcaggaaaatacacacctcaatacgtgtggctcgagcaagagttgaagaaggtgaacagagaagagactccatggcttattgtcatggttcactcgccgtggtacaacagtaataactaccattacatggaaggtgagagcatgagagcaatgtttgagtcgtggttcgttaacagcaaggttgatttggttttgtctggtcacgtccattcctatgagagatccgaacgtgtctccaatattaaatacaacatcaccaatggcttgagctatcctgtgaaagacccttctgctccaatctacatcactatcggagatggaggaaacattgaaggaatcgcaaataggtaaaaaagaaaaacattttatttgattgctttgttgtcatattgttgatatgatactaagatcttgttgtggctttgatctaattttgcagttttactgatccgcaaccgagctattcggcgtatagagaagctagttttggtcatgcagttttggagatttacaatagaactcacgcatactacacatggcataggaaccaagacaatgaacctgttgccgctgattcaattatgttgcataacagatatttctttccagtagaggaattagaatctggcaacactagggcctaaacttctttagtcgttggtttcatttagaactttatttttttttgttttctttttagattacgtattttgttttctgcttggatttttgctgttcttttatttatttacttttagactttaataaagtttgtgtttgatttttccaactctcaaaatatctcggatcagcttaaacaatttttgtgaagtactatcatactatcattaacacttttggattcagtaattaatttatgttcgatacataatctccagacattatatatctaatgggttatagccttataggcttttagcatagttgggcttgggcttttgacccaactaggatttagtgatctgcaccgtaagagcaaagcctttttttttttttttttttcgccataagagcaaagctatatacagtatcggagattaaaattttcttactattagttaaactgactcttaaagcaaaagctctagtgatctgcacacaacgcgttgttttagtttcaaatagggaaacatcacgctgttttgttcgaattcgttttgtcgccgtcggtaatggcgaaaaattacacagtcgccgatgtcgtaaatatcgacagtgacagtgacagtgacgacgacaacggaggagtaataggaatggttccgagcttggcatctctaatagagaatcagaaagtttcgatcgctgatgctgcgacggtggctcctcgagaaaccctagagtgccgaagtttctggaaagccggcgaaaactttgtgatcccttcaagtgttactctaactgccataggttctttcttcgaatctctctctcactcacgctccacaattatgggttttggagtacttattaatgagatgaaatttgacaggtatggttgagcatgctcgtgttcatccaaagtttcttcactcgaatgctacttcacataaatgggcttttggaggtaaagctatgaatatactctgttttagctatcagttggtagaacgaatcagttttgtgatgatcatgtttgtattgaatcgcagcaatcgccgagctacttgacaatgcggttgatgaggtatgtgtaaggagtgaaatgcttatcttaggttctgtttttgtttttgctcattgccaatggaattgtgtagtgtttggttatgtttgtttaattcttcctcagatacaaaacggtgctaccgttgtcaagattgataagatcaatattgttaaagataatacacctgccttagttttccaaggtacactgcctttgaatgtattggtggtgcttttgcgtaaaggagtttttgaatcttgtgcatgacattatccttcttttgtttttttcacttgaagataatggtggtgggatggatcctaatgggatcagaaaatgcatgagcttaggctactcgtcaaagaagtctaatacgacaattggacaatgtaattgttatattttgttgatcggacatcaatcttctttctagtttgctacaaaaggcaggtctgtaactatagttccacctttgtgtgtagatggaaatggtttcaagacaagtacaatgagacttggagctgatgccatggtttttagtcgctcaactcgtggagggtattgatatatctggaacatttactgtctggatttggcggatgctcttgtttttaacttaaacatacttttatcttctctgttttagcaaatctacacagagcattggtcttctgtcctatacattccttaggaaaactggtcaggatgatgtgatcgttcctatggtaaaatcctcagcttatgtagctttttgtttggaaactcatgaatctgcaacgattattttgtcttgatgttatcatatctgcaatgcagattgatttcgatatatccagtgatagcccccaaccaattatttatgggtctcccggagattggtctaccaaccttaacattcttctcaaatggtccccgttttcaacaatggtcgaacttttgcagcaggttgtttcctttaaaaaactctggttccgagtgttatattaacgtggcttgtttattcattcatttatttccattcttcatctaccagttcgaggatattggaacacatggaacaaaagtaattatatacaacttgtggcttaatgatgaaggaatctatgagctgagttttgacgacgatgatgtggtacttacacttccttaaagggtttatgatgaagttttttgcaaaagttgggttttaaagtatttcaattattttccttaatattggtataggatatacggctccgagatgaaaatgcccaggacgggaaacggttgcacgctaaaacattggaagtaagatctcatatttcgtaccgctatcgacattctctaagggtaatccttctgaatatcttctttctaattagttttttttactgttgcaaggatgtgcaaaggctgacatagtttctttatccttaggcttacatttccatgttatatctcaaaaagttcaaaaacttcaaaattattcttcggggagtctctgtggcgcaattcaacattgctgatgaattcagacatcctgagacaataatgtacaaaccccaagcagctgcagtggattatgtaatacaaactaagacttcctctttttctttcgttttactcgctggttttattttaatgttt

SEQ ID NO: 678 - DNA, 206420 bp, Arabidopsis thaliana
caagcttgttgaacaatcctgaggtgctgaacaaggccagagacgagatcgacagaatgatcggtgtagacaggcttttggaggaatcagacatcccaaatcttccttatctacagaacattgtatctgaaacgttacgtctgtaccctgcagcccctatgctgcttcctcacgtagcctcgaaagattgtaaagttgggggatacgatatgccgcgtgggacgatgctattgactaatgcatgggctatacacagggatcccctgctatgggatgatccaacgagcttcaagccagagaggttcgagaaagaaggagaggctaagaagctaatgccgttcgggctaggaagaagggcatgtcctggatccggtttggctcagcggctagtgaccttgagtctcgggtctttgattcaatgttttgaatgggagaggattggagaagaagaggtcgatatgactgaaggtccaggactcacaatgccgaaagctagaccgttggaagctatgtgcagagcacgtgactttgttggtaaaatcttacccgactcctcttgagtttttgtatgtaaaatgctaatacgttgcttagcaacggtaacgaattaaatgaaacgtattagcataataaaaatcagagacaaaaatcatattctaatttccaataacccattgttaattatgttacagtcttacaaatatgaatgttcagtgttatcaatcaaacaaaattctaggtgtgaaaaaaaaataaaaaaatctaggtgtggcattgctatgctaaatgtcatataattagctaaaataaataaataataatgattaggtatctaaacgactaatgggcacatgtgatttggccgaaataagattctgttttcgaagtcaacgtctatggagtagttcaagcagattttgcaccacatcatcctctgttacaacccctgaagatccttgaggaagaagaagtcaaatatggaaggtcaaaccctaattttcacattccttttcatatctctttctctcacgtttatcatcggaagaatcaagcgaagacctaaccttcctccgagtccgtcgtgggcgttaccggtgatcggtcacctccgccttctcaagccgccactccaccgagtttttctatccgtctctgagtccctaggcgatgctccgataatctccctccgtctcggcaaccgactcgttttcgttgtctcttcacactcactcgccgaggaatgcttcacaaagaacgacgtcgtactcgcgaaccgcttcaactcccttgcttcaaaacacatctcatatggctgcacaacggttgttacagcttcgtacggcgaccattggagaaatctccgccgtattggcgctgttgagatattctcggctcaccgtctcaatagcttttcatctatccgccgagacgagatccaccggcttatagcttgtctctcacggaactcttcactcgtaagtttgttctttgttctttgttccaattttatgctaattagcaaaatttattataatcagaatccttagtccctagtcaatctctgcttataggtgaatttcagtgaattgtagcaaatatttaacatatgatatacaataaattttgcaggaatttacaaaggttgagatgaaatcaatgttttctaacttaacattcaacaacattataagaatgttggctggaaaatgttactacggagatggtgcagaggatgacccggaggctaaacgcgtgcgggagcttatagcagagggaatgggttgttttggtgctggaaacactgctgattatttaccgatcctgacttggatcacaggttccgagaaacggataaagaagatcgctagtaggcttgatgagttcttgcagggattggtcgatgaaagacgagaagggaaggagaaaaggcagaacacaatggttgatcacttgctttgtctgcaagaaacccaacccgagtactacacggacaacattatcaaaggaatcatgctcgtgagtaacattttaagttcattagtctattgtcacatttggtatgggattaattagttatgtttgtttttttgtgtatgcgtccattgtgttgaagtctcttatactagcggggactgatacatccgcagtaacattggaatggacattgtcagctttgttgaaccatccacagatactaagcaaggcgagagatgaaatcgataataaggttggcctcaacaggcttgtagaggaatcagacctctcacatcttccttatcttcaaaacattgtgtccgagtcgttgcgcttataccctgcgagtcccttgttggttcctcacgtagcatcagaagactgtaaagtagggggttaccatatgccacgtggaacgatgctattgactaatgcatgggcaatacatagggatcctaagatatgggatgatccaacgagcttcaaaccagagaggttcgagaaagaaggggaggctcagaagctattggggtttgggctaggaagaagggcgtgtcctgggtccggtctggctcaacggctagcgagcttgactatcgggtctttgattcaatgttttgagtgggagaggataggagaagaagaggtggatatgactgaaggtggaggaggagtcataatgcccaaagctataccgttggtagccatgtgcaaagcacgccccgttgttggtaagatcctcaacgagtccgcttgagcttagacttttgtactaaatgctaatttgtgttttttgagtaacggttacttttgtactacttttgttattatgtaaaaagaggaaataatttcgaggtgatacatccaaataatatattaatacacttatattttacttttaagaaagaaaatcttgagaagaaatctagaattataatttcgtctgcttttttaaaaggtttttcttaattagagtccaacgttcgaatttgaacttgtgacaatagtacattatcttttatagagcataatttttaaaaataatatatttccttgaccacatgtatatatctccaaaacaatagtaaaaaaaagagagacgaaaagaaagaaagagagagagccccacaaacaaacaaaatggatttgaaccaaatcttgatcctctcatttctctctctttttaccttagccatattcttgctcacaagatccaaacggaaactaaaccttcctccgtcgccggcgatctccttgccggtgatcggacacctccatctcctcaagccaccgcttcaccgtaccttcctttccctttccaaatccatcggaaatgctccggtcttccatctccgactcggaaatcgcctcgtttatgtcatctcttcacgttccatcgctgaagaatgtttcacaaagaacgatgtcgttctcgcgaaccgccccaagttcaccataagtaagcacctcggctacaacgccacctacttactctcggcatcttacggcgatcattggaggaacctccgccgcatagccgccgtcgagatattctccactcatagactcaattcgtttctgtatattcgtaaggacgagatccgacggctcatttcacatctctctcgtgattccttacacgtatgatctccttcaattctttttatttattatttgttctgtattcattactttatctttggtttgtcaactaacaaatttattatttattcattactcgtgacgactactttcatatagtacatacttttatatttattgtggtgataaattgtccatgtgactagtttatttttttgaagcattgcgtgtatattacgatactagctatttattcacgaaagtctgatcactatattcataaatattacatagtttattcacaaattacaaatgtacagaaaagcttaattttaaatttatagaaaaagatgcagtgtaggttttaattgtcttaagttggttgaataattatttggttcaaaataaacacattgttctaatatgttaaggtggcgaatatggaaatgcacaaatttttacatacttaccaaaactcttatctgtttactaatattgtattcgtactctcagggatttgtggaggtagagatgaaaacattgttaaccaatttggcatccaacaccaccatcagaatgttggccgggaagagatatttcggtgaggacaacgatgacgctaaactcgtgaagaaccttgtgtcggaggcggtgaccagcgccggtgcaggaaaccccattgattatctttccattttacgttgggtctcgagttatgaaaaacgaatcaagaatttgggaaataggtttgatacgtttttgcagaaattagtcgacgaaaaacgtgcggagaaggaaaaaggtgaaactatgatcgatcacttgcttgctctccaagacattcaacctgattactatacggatgtcatcatcaaaggaatcatacttgtaagtatcaatcaataagaaagtttttatatatatatagagagagtttaatgattgaaattttgtttagaccctgataattgcagggacagatacgtcatcagtaacactagaatgggcaatgtcaaatctgttgaaccatccagaaatacttaagaaagcgagaatggaaatcgatgaaaaagtcggtttagaccgattagtagacgaatcggacattgtaaatctctcttatctccaaagcattgtattggaaacactacgtatgtacccggcagtcccactactactacctcatttgtcatcagaagattgtaaagttggaggctacgatataccaagtggaacaatggtattgaccaacgcatgggccatgcatagagatccagaggtatgggaagatcctgagatattcaaaccagaaagatttgaaaaagaaggagaggctgagaagctaatctcatttgggatgggacgaagagcttgtcctggagccgggctagctcatcggctaataaaccaggctcttggaagtttggttcaatgttttgagtgggaaagagttggtgaggattttgtggacatgaccgaagacaaaggagccacattgcccaaagctataccattaagagccatgtgcaaagcacgttctattgttgataaactgatataaatgttttacgttgaaaaatgtattctatttaatgacatgtttttaattatgtgttttggtcttcaattcgtccttcaatcttttgttgtatctttgaatcttgcttaatatcatcgggtcaatgaagctgggcttgctcaccgggttagtgggctggctcttgcgttgttggtccaatgttttattgattgatatattttttaatgtgattgcattatagttaggttaaatatagtgtttttaatgaagttgtaaaatcaataggtcacgttgagtcgttgacccgtattttatacttgacccgtattctccagtaaaacgtgaagaatcgtaaaaaaagaactatcatatagtataaaattcacatcacataaagtcactacagattcgataataaatgcattgagtcttgtgattctatattttctattcatcgcccccaattaagctacgtaataacagggacataaattgtctttttaatagattttttaagtcggcaagtactgtcttttagatatttcggttgtcctatgtagaaggtagatatgtaaagggtagattaaaaaaggaaatttaccttctacatcctatttagtatatttactatactaaaaaaggaaatttacctaactttctcattgaaaattagttattaccttctctttcaaaaagcagatcaaaatctctatccaaccatttccaaaaattcaagtctctttagttttcagtcaattaattttcgtgttttaaaggccacaaagtacccatctggtccatctcgatcccacacacgacacaactttacacaaaaagaaagaaaaacccaaaaacaaaagaagcaatcaacaagaaaatggacctcacccaaatcctactcctctcctttctctttctcactatctccatcaaactcttgctcacaaaatctaaccggaaacctaatcttcctccttctccggcttaccctttaccggttatcggccacctccacctcctcaagcaaccggtccaccgaacattccactccatctctaagtcccttggaaatgctccaatcttccacctccgcctgggaaaccgcctcgtttacgtcatctcctcacactccatagccgaagaatgtttcaccaaaaacgacgtcgttcttgcgaaccgtcctgatatcatcatggccaaacacgtcggctataactttaccaatatgattgcagcatcttacggcgaccactggaggaatctccgccgcatcgccgccgtcgagatattttcttctcatagaatcagtaccttttcttctatccgtaaagacgagatccgacggctcataacacatctctctagagactccttgcacgtacgtaaccaccttcttatttaactcattatttatcttttatttactttggcattactaaaatttaccaaaaaacaaaatatcaaaaatcaaaatttttatttatcgactattgcggttgaatttgtccatgtgagtaggattttccactttcaagccgcccttctttattatattaacacgcatatttaattatttgtcgcttattggctggaaaataatatatttatcagttaggttacttgtatgcatcaaatttgtcacgacagaaaataaaataaaagctctcagtcgtcatagatggaactgaactatacacctttgatatagatctattaaaaattacacaatgtaataaacttgactagtaatcgtcccactgcagggatttgttgaagtggagttgaaatcgttattaaccaacttggcattcaacaacatcatcatgatggtagccggaaaacgatattacggtaccggtacagaagacaatgatgaagccaagctcgtgagggaacttatagcggagataatggccggcgccggttctggaaatttggctgattatcttccgtccataaattgggtcacaaactttgagaaccagaccaaaatcttggggaatcgactcgatagagtcctgcaaaaactggttgatgagaaacgtgcagagaaagaaaagggtcaaactttgatcgatcatttgctttctttccaagaaaccgaacccgagtactatactgatgtcatcatcaaaggaatcatactggtaagttcttattaactaatattatcctccttatatgtggagtgggtttacttattagagatatatatatacacaggctttggttcttgcggggacagatacatcttcagtgacgttggaatgggcaatgtcaaatttgctgaaccatccagagatacttgagaaagcgagagcggagatcgatgataaaatcggttcagaccggttagttgaagaatcagatattgtaaatctccattatctccaaaacattgtgtcagaaacattacgtttgtatcctgcggttccactactactccctcatttctcatcggatgaatgtaaagtggcgggctacgatatgccacgtcgcacgttgttattaacaaacgtatgggcgatgcatagagatccaggtttatgggaagagccagagaggttcaagccggagaggttcgagaaagaaggagaggctcgaaagctaatgccgtttgggatgggacgacgagcttgtcctggagctgagcttgggaagcggttagtgagccttgctcttgggtgcttgattcagtctttcgagtgggagagagttggtgcagaacttgtggacatgactgaaggcgaagggatcactatgcctaaagctactccgttgcgagctatgtgcaaggcacgtgccattgttggtaaaacgatataattgacgtatgtaggatctattgtgtagaaacctatatagtttcttacattccacgtgttcatggaaaataaaagtattctgtggtcaattagttggatgcagagcaatgtcacggcttctatagaaagttcaacagaaccaaaatttcactgtttccatctctccaatgttggtttcttgaaatttagaattggtttggtgacttggtcatgtagtgggcatgtgttgggcctcgtcaaaatgttgtctttctctgcattttaaattaaatacccattaacaaatctgtatacatatgttcttcactgtctgaactagtaattcagcataagctaaaagtataatattttttttttaataaaaggactgttgttaaaaacgaaaagtttggatttcatgttagtgttggtaccgaatctgccacgttttgatgattatagttgtagaaaatgtcaaccaagcaatattattgtaaagacaataatggatggaaatctaagaatttcgattgaatttttatcttatcgagaactttcaacaaaaccttttggattgatcaaatgaaagagacataagtggttatacattagacttgttcacgacactccaatgtagtatgatttttctgtttgtttgtcaaattcattgtttacttgtcttataggaattttccttattttacaaaaacaaaagaaataaaagaaaagaaaattggtgcttgtttttccaaattagtacgctaattttatcactattgtatgcactattttgttatttgactttgtaaatgcatgaattaaagagtgtttaaaaatcagtatcttatactatattatttaatagcgcacggaggagaaaccaaaatatacacaaagttagagaaaaaaagaagagaaaaggagttatatatggattgtattttacttattctgactactcttgttgccattttcatcgtcaagattgttctcctagtcactaaacctaacaaaaaccttccaccgtcgccaaatatatgttttccgatcatcggacaccttcacctcctcaaaaagccactgctacaccggactctcagccatctctcccactccctcggccccgtcttttctctacgcctcggctctcgccttgccgttatcatctcatctccaacggcagccgaagaatgcttcttgacgaaaaacgacatcgttttagcaaatcggcctcgtttcatcatgggcaagtatgtggcttatgactacacctccatggttacggctccttacggtgaccactggcgaaacctccgtcgtatcaccgctttagaagtcttctccacaaatcgactcaacgcttcagcggaaatccgacatgacgaagttaagatgcttctccaaaagcttcacgatttatctgtcgaacgcccggctaaagtaggttcatcataccttaaaatcttatattatatttaattcattgaaatgtttaaaccacacaatatgtatatgatattttatacttatataggtatgagaaaattaactggaaaacaaattcaactgccgttatataatcatatgttttcacgttgcattttttgtttatatttttttatagattgtcaaatttaagacaataaatagcttacactacgaataaaattttgagaaaacatgaaattcaggtaattaataatattttaagaaaaaaataactacatagaatccatgaattgataaacaatgattttttatttttttattttaaaagctttaaccttgttaaaaatcgttgattacatatggatacatgatagaactaaatttgctcgatttagtaagtggatcaaacagttcatcttctttccgttgctatcaatatcaaattatagaaactagaaagtactatctatccttaaacgtctcttagtttttttttttttttttaatgtatcttaggttacataataacaaaatgtgataatggctcgtaaaccagttaatatcaaatcataacaaaataagaacttcattttaattttttgttatctaggtggagttacgacagttactaacgggtcttaccctaaatgtgataatgagaatgatgaccggaaagagattcttcgaggaagatgatggcggaaaggcggggataagtttggagttccgggaactagtggcggagattctagagctctctgcggcggacaatccagctgattttttgccggctctacggtggtttgactacaaaggtttggtcaagagagcaaagaggattggagaaaggatggatagtttattacaagggtttttggatgagcatagagctaacaaagacagattggagtttaagaacaccatgattgctcatttacttgattctcaagaaaaagagcctcataactacagtgatcaaaccatcaaaggtcttatactggtatgtttttccatattcaatcttattttccggtataaaatctcatatcggagatgataatgcagaaattttagtgatggatgttgcgactaaaccacctaccaatcttgatttgaccactccaactaccgctaaaaataattgaacaacgacaaacacgaaaaaaagaaaaagttaatattggtcccattttatgtcagtaaaggcccattttaattactcggtttttatggaatagttgaaagataaattaaaagaataaaaaatagattgagcaaataaaggatataaaccattttgcttatactttgggtcaaaattttaagttttataggttaggtttatgatttacgaatgttagtgtttaggtttatgtttataatgtttatattgtggaatttaaggtttatatctaaactttatgtttattaaaaaaaactagacgaccgtgttttatttttgatataaataaaaactttcataatattttttatttcttttgttagatgatggtagtaggaggcacagatacatcggccttaaccgtggaatgggcaatgtcaaatttattgaatcatccacaaatactagagaccacgagacaaaacattgatactcaaatggaaacatcaagtagtcgtcgtttgttgaaagaagaagatttggtaaacatgaactacttgaaaaatgttgtgtcggagacactaagactttaccctgtggcaccacttatggttcctcatgtgccatcttctgactgtgtaatcggtggattcaacgttccacgtgatacgatcgtgttggttaacttgtgggctatacatcgagatccaagcgtgtgggatgatccaacgtcatttaagccggagagatttgaagggagtgatcagtttggacattacaatggtaaaatgatgccgtttgggttaggaagacgggcttgtcctgggttgagtttggctaaccgggttgttgggttattattgggttcgatgattcagtgctttgagtgggaaagcggctcaggaggtcaggttgatatgactgaaggtccaggacttagtttgcctaaggctgaaccattggttgtcacgtgcagaacacgtgagatggcttccgagttgttgttcttcggatcagagccaagcaataagaatgtctagatttgattttataaatttgtaagttaatacattattacatgcatatatgattcagtgatttattaagcagcaaaatgtttggagacactttttttttttttttggcagccaagcaatatgggactgctttttatatcactttattgtaatcatgtaatgtcatatgcaatgttggttgagaaaaaaacagtgtccacataaatttgttcttatcatggatattttgaaagttagaaagttgttcttatcacaattaaattattgtcaacagattttttttttttttttttatcgactgcatttgtattgataaattcagtgattacaatgcaaggcttttgttatgtaagaaggtacatagtaatgaaaataaaaatcatcttgagatggtaaactgtgttttgctagaaggtctgctggttggttatttgttcttggaatccagttgaaactagtctcctcgaagcgtttctgccaagtccttccttctctgatccaattgtatctcccgaaactttgttttttgttgttcatgaggtctgcaacttgtttgttgtctccttcgaaaatttatttatttaatattttattgccataatatcaagaaacagaacatctgaaacaagaagataaaacattttcgaaagatcagttcaagaactctcgctccggtttggtttagacgaagattccgaatcaaaatcttcctccgtcgcaggaatccattcgttcgtcgccggattgcttctgtaaaccgctttttctcctccgtctccgattgcggcggcggttacggcctcggattcttcaccgttgtcttccttcaccacatttataaacccacttccggtctaatctcagaaacagagcacgttaaaacaaaattagatttcttctgatgaaattttataagcaagagtgagaaagagagggaattggaaccgtgtgatgttgcttatcaatggcggtgagatttgagtaatactctgtttccaggaactcatcttgaactgcagatgaatctccctcacctagaactttaccctgaaaaaccaaaatctcaaatttaacgaaagatgttggtttatgtgaagagaaaagagcgagttttagagataaccgaacatgagtttgtgactggagagattggaatttgtcagcttcaggatggtcggtgattttgtcggaagcagagaaagatccaggaaatcccggttcgcttcgagtgggtttagtgggtcgtttgggagccaaggaatcgaaatcagctctgatctggttcgcgttcttgatctgctgttccgggtcggatatttcgtcgctccggcttggcttcatcgtactcatcgtcgtctctgtccactgctttacaacacacacatgcaaaaagagaaaggatttgctcactggtttttagttgtgtttaaaagaaaatgtatatgggcttttagtgggcctttttagtcctttaattttctcattacaaatttcataacgtgaaactgcaatatactcactaaacatggtataaaactataaatactcgacattattaccaaaaaaaacaacttttatcttcttcatttaaaaaaagattgtcgaaattgggtccactcaaaacatagtgtgcatgaagattgaagcttttccatttccggctcctatggaaagacaataaattatttttgaaatgtccttttaattccccaaaggccaacatttcgaacaaataagaaaagaattaaaaggtacagctgaaaaaacgtttgcatctcatcgaaattcgatttgcgaccacgtttgattataatttgcgaccacttttaattccaattatgtggtaaaacatgaactaatcaatgtcttctttataattaatcatgtggtatcaaccttaccaaaaaggaaaagagataatcatgtggctgtatatcatttaagttgcaccagaatggccgataacatatctcctcaatctatattattgactcatatacaatttgcatggttgatggcttaacgtagatctcaaaattgaaatttgttaaactaaaataaatatcgattaatgggcacgtactataaattggtgtttatgagaaggaaaccgactattgtatgatcaaagaatatcacccttctaaactttacatggatctttagcgactgaataaatataataatctataaaaaatgaaaaatatgattctatgacctgagctaaacaaatatcgaagtataatgttttgtttgggttcgtattttagtgaccagcacctctcctgctcggtcctgaagccattgtatgcatcctctccccggccgatgagagccaccttagcttcttataaccatgtatcacgacccctaataagtcttcacttcgtaaatcgaccccatgaattttagattgatcgatttcctccgtcgaaccaccaaggagaactctgcaatccgcggttcttgattccgaaaaggccgagaccaagaacatgaccgtaaagatcaagccaaccggtctcattttttggtgtggttgttcggttcttgaggtttagggtttaagacaatgaatgtgttttggtgattgatagaaaaggagtaacaaaggaggaagtaaagctttatatacaagtgtcaaaagattcaaaggtagatgaaaaaggatggagaggaaggaagataggagttttcattagaattaaagtaatataaaaaaaaaaactaaaaaaattgttagggaatataaaatggaataaggtgtagaattagaccctcgatacaaggggatggtgcaggcgaattagtaaaaaaggacggtctctagcttccttggaaatggacctttcgaaaagtgttaattgttttttttgactagctaaatgtttttcttaatagctttaaatctaaagtattatagtttgattgagaatatatatatgtattttgtttttgtttttactgcttaaaatatgaatacaaaattctggcacactattaaattatgggatttgtttatggcttaagatacacaatattccaatgaatcaatcttccaaatgacaattcaagttgtagttggtaatttaaaaatcctgactttttgttagtggagttaggcaggactatatataccaatattttcggtatatggtttcatgatcaaaaacatttataccgacaaggagtttagtaatcaccacgtaaactttgcaattgccaaatgagccaaatgaaagtactagactacaagtctacaactatttgatttcatatttctatcatttgaagttttatgtcaaactaatattgtagaattttttttgagcggaggctttcttattacaatgacttaagttgattacttgatttaactctacggtcgtggatcatcgactcggttttaacctttagaaactggaagagtactgatgaaggtagggcacgaatgcgtagaagtgacgtaggaggaggtaagagaaataaagtacgtatttgtttctcacactttcgcgaataatttgatcggaataaatttgaccatacgaatcctcgagacttgttctgcatagtgcataggagaacgttttcattgtattgatcgatttttttttttctttttctaattaagttttgaagatttgtgaatggtaagaactaatgcatgatttttagtactgtgcaaagaaataaataagaaacacaaagatcaaacaatgagtcctaagaagtggaatttttaaaccaaaatcatactaaatcataactcaacgataattaataaatgaaaactctagaatttttcaaaaaacgaacaaaacataattgtcatgttggttcgtgggcatgagaaaaagaagggagataacatagacagacaaattcggtggtactcacacaaaatacttgtatggacggacggactctaactctgcttcatagttgtcatgataacaatattggcatctatcttcttcctctttttcctttttgtttttaaacgtcacttcccccacatgtatgatgtaccctcaattttatttcattatcaatcttgcatcttcgaatcttttttaaaaaaaatcgagtttgcagaactaaatccataattatttctaatttcgattttttaatgtgaaatatttagtggtcaaatatgaatataagtactgtttatggacgaaccatgtgaacatatcatgttttcgatatacaaattatgatattgcattgtgcagtcacaatttggttcttttgagatgttatagttgtatactaccttaatccctagagatacatatctgctatttgaatggattaaagatttgcttttatatagatttaagtaaataattgaaattcttttgtccaaagatatttgttcaagaattatattaatttcatgtaattggaaggaatacaaaagactggaatcttgataatgaatttattaatgcagaatttgattccattattaatggactaccacgtccgaactatacatagttaaacattttttcttcttgtattattctggcgtggtcttacgccacttataaactatattattttggccaaaccaatatttataaaatcgaaataaaacattaaaccgggttttaagtactttgtttgtattattcaataattggttattaaactaagttaataatttcaaaatagtgatttcaccttaaaatatgggaaagagtttcctgatgctctggaatttggtttctttgtcttatactctaactgcggataaaaaggagcgattttgctataaaaaggaacagtttgagatgatattacactttattccggtaaattatttggctaccatcaataatatattcttcaaaactatcaatcttcctttttttttagaaaataaataaatttcatcacaactctgtttgaaaaatcgtttatgaacttgagacggaaaaattatcataattcaacgtcatatagcagcaagagttgaaataaaaattaatggttttgtcttttcataggatagatttcttatttctacctaacaaaaactaaaatttggatgttgaattttgagtagtataaagtttggttgttcaatgttttttgcaagaaaaatcacgtgagaaggaactatttttggtcgtgcaagaaaaataacaccaaagtgtttgaacttttgaagcattgatgattaggtttggtgtatctaacaatattataaaacaaacacatgagatccgactcatagtcaatttagcttatgtcactccttaaatcagctggtttaaccgaaccagaaaccctaaccaaatttttaaaaaaaattcaagttatctgattttaaatttattttctatatataaaaaatttggctgaaagttgaaacgaaaccaaagctagagatgtacattttctagtaaagtaaaataaagtaaacaaattcaatctgaaaccaacaatataccataatatacttacgaaaaccaaatctaaaccggctaacgatatatgtgagtgtgactttatatacgttgcgagtttgaaattcaagcattatttttggtctacacaactacaaatctaccttaatatttagctgccgtctgctccaaacaatgaaacttcatgtttggtctacgatattaaattctttatttctaatattcaattccttatccttttcttcattgatggctttcactattttgtgttcaataaatacacacaaaattgaatgctcaagaaacaagttggtattttcccaggaagcagcatactaactaatttcaatgatcacattcttttcaattcaaacttagtcaagaataaaaattcaaactttgcatctccacgaacactactatatagtcacattctcaactcacaaaacactcacaacaaaattcattatctgccaaagagaaagaaaaccatattttttataaacagagttaaattgttcttaaacatgatgatgaacaaaaacgttctgagttcgattctgttcttcatgttgattggttcggttcttgtcgagagtcgtccgcttggtctaacaaagaccgaggagaagttcgtggctagtttattcgatggcttatcacttggttcgatcaaagactcaggtccaagtccaggcgagggtcataaggtcgtggacaggaaggatacgtttcgatttgttaagcactcaggtccaagcccaagcggaccgggccactaatgtttcaatctttagttcaaaccgggccggttaaagtgcccatacccatctaggtcgagaaaattatttcatttttttgttccagtttcattagtggaaaatattatacatgtctcatgtttctgatcgatacataggaagaagaatggcaaaaacaataattattgtctcatttttctatatttaggattattgttttgttagtgaaataaagttacttgaaaagtatacaaataaaatgtattaatcaatttttttatatttatttgaatgtaataatagttaataaacatcagtgtccaaagtgaaatatgagtccaactgctcaacgaccaataaaggcataaatttttttaaaaagacaatgctttataaatgggcgacgagtatatttaaaaggtttaagagatttaatcgaactattgtgaaagttaagggactcaattgaaaaactattcgcaacgattcagtcattcagcagttgtcgtagattcatttatctagacggttaaaggggtgccttgtgatgtgaagatctttgcctctcgctctcgctttcggtgacaatgggaagctcgtcgaaggaagagacggcgagtgacggagatacggcgagcggtggcgcctcaccgtccaacgacggcagactcttctcggagggcgagcgtgttctcgcttaccatggtcctcgcgtctacggagccaaggcaaataaaaaacctctctctctctctctctttctctgtgcatcgtcagatgttcgcataatttgaattctagagattatcttgttcgtgttaatttagcaattcttgtatttcacgtgggttttggttgtatccgactacggaattaactggtttcattgaattgagatctctctgctagatttggcttaggggtttcttggtagatttcggtttcaagttacgacgatccgaaagatgaacccattgagattggattcgagttttctttttttggtaatggattcatgtagcattagagctttttagattggaatgatcataaatgcttagtcgtaatagatgcaaaagaataattcacttgccgttggagcaaggaattcaataaattactcggaaaatagggcaagctaatctacttgcatgtttattttttcaatcatatattatataggtcactggattgagtctcattcatatcaaatgtgtgtcgttgttatgctaaatcttcatagttttgaaaaaaatctgttattgcatagtgttttcagtgtgtgggcagacctgatagattattgacattccattacaggttcaaaaggtcgagcttcggaaaaaggagtggaaatactttgtgcactatcttgtgaggcctccttcttctgagctattatagtttcattatcctgtttcatgtactagctattttcattttggtttgcagtaataagtgatacagcgatctttgtctgcagggttggaacaaaaagtgagtatctctctctgctctcatgtcgattctggtttatgtagcaaaatcagtagattgggacccatgacatgattgtcttgccaacagttgggatgaatgggttagtgcggatagattgttgaaacataccgaggagaatcttgtcaaacagaaagctctagacaaaaagcaaggagttgaaaaaggtaccaagtctggccgttccgctcagacaaaaactagaagctctgcaggtgagttgttgcctccacattgaccatgctgagagtacatgatacatattttggtcatccaggctaagaaactaactatttctttctgatcttgcacttgcagacacaaaggctgataaagatgacaccaagaccaatggtaggcaacatattaatttacgctccctttgtagttcagggttctcccaacaatttccaaggaaatgatttggtagactgggtgcaacttaaattatttaagctggtgtatagatgattacattttctgttgcagctgcaaaagggaagaaacgaaagcacgagtcaggcaatgaggtcaggcttgcaaaaacttagagatgtatttggttcatacctgttaggtctttgttaagattatattttacagtacaatagatggctgatgtgttgttatgcatatacacacatacgaaaagggtcaatttttcaggtcttctaatatcgataaggtttttgttttcatttgtaatctatagaaggataatgtaacggcggagaagctaatgaagatccaaattcccgcatcacttaaaaagcaactcactgacgactgggagtatattgcgcagaaggacaaggtatcatcaattttctctattttgtgcacatacttttagcactattagaattgttattgaatcagctagacttgaaagttaagagacataagtgtgtatttgtagtcgaatgaattgtgtataccaaagtgaagggaaattgatgtttggtaatctgtcttcaaatgattatataggttgtgaaacttcctcgttcacctaacgtcgatgagatattgtccaagtaccttgaattcaaaaccaagaaggatggaatgtgagtcttttactcgaacacagagtttgatatatttgaatcttttccgaaatccaacgatacaaaattttgtgtttctgtttttgtgcagggtaactgattcggtcgctgaaatattgaaaggcataaggagttatttcgacaaggcattgccagtgatgctcctatataagaaagagaggcgacaataccaagaatcaatcgtggatgatacttcaccttcaactgtttatggcgccgagcatttgctccgtctctttggtaaaatctcattaagttcttatttggacagtaaaattcgatgttctgaaattttatttttgctttttttaaaaatctgcagtcaagttgccagatcttttttcatatgtaaacatggaagaagaaacatggagtcgcatgcaacaaacattatcagacttcctcaagtatatatctaatctctctgtttcatcactaccattttgatttctcggttttaacggttaaattcacaatttctggaaaaaaatctttacaggtttattcagaagaatcagagcactttcttgctaccatcagcatatgattctgataaggtttcagatggtaaaggcaaaggaaaagacgactgacatctccaggaaaaaaatattgttgtaatttagaattccttcatttttctgatgaattcataattgtaagatttgcagctgaatatgaaatattttacaggcctttgaagttaactatttggttcatgtaaatttctttaagtggtcaataaaacatccggaacaatggaaccttggttggtagaaggcaacaaaaaaaatggaaaaaataaaaaagtgtatgagatgagattatttatgtggctaatgtcatcggaataattacattggttctccttctctgttattattctttcatctttttcaccaagacgaacgactcttacacgcagagttcgcgagatcagaatcaatggtggcatgaaaaacgacgcttgagctcaaattcgtcgaccatggaacctgcaactcttactcgttcttcctctcttactagattcccttatcgtcgtggtttatccactctccgactcgctcgagtcaactcgttctcaattcttccacctaaaactcttctccgtcaaaaaccgcttcgtatctctgcttcccttaatcttccaccacggtcgattcgtctacgtgctgtcgaagatcaccatcacgatcatcatcacgatgacgagcaagatcatcacaaccaccatcatcatcaccatcaacacggatgctgttctgtggaattgaaagcggagagtaagcctcagaagatgttgttcggattcgctaaagctatcggatgggttagattggccaattacctcagagagcatcttcatctttgctgctccgccgctgcaatgttcctcgctgccgccgtctgtccttaccttgctcctgaaccttacattaagtctcttcagaacgcattcatgattgttggttttcctcttgttggagtaaggttttctatagccttctctataaagctccttgctagttttataatttagccagatgatttagtaatttagctttatggtcatcgatgttgttaggtttcagcatctctcgacgcacttatggatatagctggaggaaaagtgaacatccatgtcttgatggcacttgcggcttttgcatctgtgtttatgggaaatgctttggaaggaggattgcttctagctatgttcaatcttgctcatattggttagaacttgaccttaataaggattagggatatgtcattgttaatgtttatcatgacggagaggtttgagcttttgtcttgtcatttttctgcagctgaggagttctttactagtcgatcaatggtggatgtcaaagaattgaaagagagtaatccagattctgcattgttgatcgaagtacacaatggcaatgttccaaatatatctgatttgtcatacaaaagcgttcctgtgcacagcgtagaagttggatcctatgttttggttggaactggtgaggtctgtgaaacttttctatttgctttcattacttgaatttcttaaacatgtgaccctgtatgtcattagtttagttttagcagggttacaattgcagctgttaagtaatggaatttttttttccatttagattgtgcctgtagattgcgaagtctatcaaggtagtgctacaattacaattgagcacttgactggggaagtcaagccgttggaggcaaaagctggagatagagtgcctggtggtgcaagaaatttggatggcagaatgattgtaaaggtattttttatcctattctcattgctttggcttgtctctttatttgaaatcctcatgcttatctcaatccatggaatttctaaatcaggctacaaaggcatggaatgattcgacgcttaacaagattgtacagctgaccgaggaagcacattctaataaacccaaacttcagagatggctggatgagtttggcgagaattacagcaaggttgtcgttgttttgtcacttgcaattgccttcctaggtccatttttgttcaagtggccttttctcagcaccgcaggtaagatgtcaggatcaagttctcccttcttaacattaccataaatcattgttgatgtgacaaactattcttgttgtttaataagatatatcaccatttggacaattgataagagtggaaaattgattggcttactttcattgcttgttaatgatgcagcatgtagaggatctgtttacagagcattgggacttatggtggccgcatcaccatgtgctctggccgtagctccattggcttatgctactgctattagttcctgtgcaagaaaggtattgttcaagtactctacgtgatcaccaagtgtatgttagctttcttggcgttgtgatgttttgcagaattgcacttttgagcattggtttgtatatgttctcttgtagcaaattaagctttataagctaaataatcttatgtgcatcaaatgtcaatggtgaggaatgaatggtgcatatgcaacaacatcgtcttatctatgaagaccaccatatttcaactaactatttgatatcattttccttttgtccaaatccagttgaaaacatggtttattttctttttcctttttttttgctatgtaaaggtagtatcttcacgtgtaagtgtgtaaccccaccgtgtgtaactattatagggaatattgctgaaaggtgcacaggttctagatgctcttgcgtcttgccatactattgcttttgacaaaactggtaccttaacaaccggcggccttacttgtaaagcaattgaacccatttatgggcaccaaggaggaactaattcaagtgtaataacttgctgcattccaaattgtgaaaaagaagctcttgcagttgcggctgccatggagaagggcaccacgcatcctattggaaggtattgcttgtttagcatcaattactagtataaaacttaattaccacaaactctaaaaccatgcaagttgtgacctatgtgcatcccatcatcacatagttagtactgtggcgcgtctataactcatgggaaataagttatcttgttggatggtacattcatttcaggagatatgttgacgtaaagaattttagtcctacatctagaacttattcttatttctagttcattaccacaatcggatgaaaggaaggggaaaaagcaaatttgaacgctatgaagctctctatctctggtttttacactggtttttacactggtttattagtttaaatgatgcttggtctggtaagagattgagactgaagagtactataggtcttttctgctgtttctgacacatttcatcttgctgcagagctgttgtagatcacagtgtgggtaaggatcttccttctatttttgttgaaagcttcgaatattttcctggtagaggccttactgctactgtcaacggtgttaaggtgagactcagttatttactagattcttatatatatccatttatctaccagattttatagtgtatagctgtgggtgatgtgtgtacatctctggctttcattcttaatatatatgatgttgtctctcaccacattttttggttttgtaatagacagtagctgaagagagtagattacgaaaagcatcacttggttctatagagttcattacctcacttttcaaatctgaagatgaatctaaacagatcaaggatgctgtaaacgcgtcttcgtacggaaaggacttcgttcatgctgctctttctgttgatcaaaaggtatactacgactacttctttagctggtctaaaaacctctttcctacttcacagtctgtgattttcatctctcatctgaccatttattagtccataaaaacctctgtaacactgaaatttatgagccttgcaactaaattttgtcaggtaacattgattcacctcgaagatcagcctcgtccaggggtgtcaggagttatagcagaacttaaaagctgggccagactccgagtaatgatgttaactggggaccatgattcaagtgcttggagagttgcaaacgcagtgggtattaccgaagtctactgcaacctaaagccagaggataagttaaatcatgtaaagaacattgctcgggaagcaggtgatcattcattactctcgccatagttcccaatcaaaaacatctatcaagagactgagaatttagagttgtgatttttgctaggtggaggtttaattatggtaggagaagggattaatgatgctccagctctagcagctgcaacagtggggattgttcttgctcaacgagcgagtgccactgcgattgccgttgctgacatcttactgcttcgagacaacatcaccggtgttccgttctgtgtcgctaaatcccgccagacaacatcattggtagataaaacataaaagtctttgttcttaaccagtttcagatgttagattgcctgatttaacaagaatgtatcatgttgcaggtcaagcaaaacgtagctcttgcattaacatcgatattcttggccgctcttccttcagttttagggtttgtcccattgtggttgacggtacgtaagctaatacccactacaagcttttgttatccatcatttacccgagagacaaaaccgctaacctgcatttttgtgatcataggtacttctacatgaaggcgggactcttctggtgtgtctaaactcagtacgtggtctaaacgatccatcatggtcgtggaaacaagacatagttcatctaatcaacaagttacgctcacaagaaccaaccagtagcagcagcaacagtttaagctctgcacattagggggtaacttgctgttctttgtctaattctgcaaaagcaagacactgtgaattgtatgatcgcttatgaaacatcaaaatcgtatatatgtttcgtttcgactggtttcttcaggtcatatattatgtcacgtgagattatatttactacttttagtttatgtttgtttcctcgtaacaaacccatagaataaaagtttgagaagtgtttttgacttttcttcttcaagtttgtgtaaattgttaataaatgatcttgctttgcttttaattgaatcacgaaagaagatcatatgatgatgataacaaaacattttttgatttcgcttcctcctttcgtcgtctctactactggctctatacatgaaaagcctgaaacttttattttcccgagaaacagagggaaaacttgttcttatcactctactccatcttcccaattccgatttggttcactataaactctctaaacccaacacgacggctgtttacactttgtggcatacacgaaccgccacctccgccgccagaactactaccaccgacgtttcctcgctgtaaatccgccatgtaactcctcacctccgtccttatcatctcctgaaccaccgtcatgaactcaccaccgaatccaccagatatccccttcgcttcttcttcttctacttccacttgctcttcctttctaaccggaaacagctccgccgtataaccaccgtccataaccgtattctggttaagttgaaccggctcgttgactcgaaccgtctcgtcagtccaaggaagagacaaactaagataagttggaggatcttcaccagacgatgacgctgtaacctcagatctaaccgttggtttaaacacgtgtgcaccaccactagattgctcgctgacgtcagatcccgatggacttccgggactcatatacaagccagtcgagacaccaccaccaccactcgccgtacgtttcaacggttgctcttctcctaaattaccatcataccctccattaccaccaaaatcacaactttgcccttcgacgctgcattttcgcttcagcgtcgagttccaatgattcttgatagcgttatcggttcgtccattgagaagacgagagatcgtagcccacttgttaccaaaccgagcgtgagctcgaataatcgtctcgtcttcttcctgcgaaaaagcacggtgctctacctccggagatagctggttacaccaccggagacgacaagatttgccggaacgtccagggattgatttgctaatcaaagaccagttcctcggaccatgtttctgaacaagcctctgcaacagatcatcttcttctggactccatggacctttaatcctctccatattcttacgggtcgggtttgacatcgccggatctttttatcggattgttctttttttttcttctaacgcgtcctctttttttttggtcgttacagtttttttttttgtgtgtgttgggaagaaaagctttttggttgaagaggataagagcaagaagagagagtatttatacgagaaaggagtgggcaaaagggtcaccggttcaaccggtaattttttcttatcgatttaacagaaacgatattaaactagttaaactttacagtgtaatattatccttaactgcataaaaatatctaacgtattattaaaaacaaattttatagaaggaaacaaataaaaccgttttctctattaataaagagatttgctcagtgttaaacggataactatggtagttcaaacaataaaaaataaaaactgataattatggtcgttactcgttaaacaattttgactcattcagtcaaaaaaatattggtgaatttaattaatttaaacgtatgattaaccattgtttatatgttcataattatgtgtccataaatgggctacgtacaaacctcgttaacgtttgggtataaaaaaattgacaacatttacgtgtttgtatgattggaacagatatttattttaaaccaaaaataaaacacgttggcgattggaaaaggcgttttgggagataagcgtttgtgtgaggttaacatcgagcgtggagagcagagaatcttccaggaaaaacggttggggacttgggatacagctgtatattaacacgtgtcaagtaagtatatgtactttgagtttgagatttgctttttttttttcaattgttctttcttttttttgagagatttgttttcttttgaagagagagtacgctcgtacacaggagcgtttcttccactctctgttttacaggtggagcgtttttacccaatcatttcattttccatctaaagtgacactcacaaaaaaaaatcgttaacttctacgttttattctctctatatttatatcctttttaaaatcattctctttttgaatatttgttaactttttcgtatgttttttgaagttttattttgtaaaattttgatactattgtagaagaaaatgaaatcaagaatggcaatgtatatcaaaaaaaatattaaaggcaaaattttgtaaaaactaagaatctgctggaaacatacatattgcttttaaaaatagtaagtgcaacaaaaagactacatagaagtcaataaaaaatagccgaaagtttttgtgttatgaactaaagttttttgataagttattttcaatattttacactgtttgttacatgtcattgtcttctgtgtgttgattgatacgtgtggttattatataaacgaacgattggtccaatatccaaattttggttaagatgtaaattgtgtcggtgaaaataatgtagacattgtagtcgttgacagcgagttctaggcttctagcttacatgcaacaagtgaatgtaatagttttgcaatgtttggtcattgaatttctaacaaatatgtacgtgtaagatactagattaaatatgaatgttgcaagtaatagatcgtttatatttgtcaagtgataaattgtcgtatagaagaacaactaaaccgaagaattactaatccggttcaacttagttaaccagaaattgaaagggtaaacgccggtgaagcgcgtgtaggatgatgatatatatacagtgaagcaaacttttcaggatatatatgtaacttttatttatgttctttgtaaaacaaaagtgtgtgtaattggcagaaagagagaacaaaacctaacaaactgaaatacaacaaatatctagatattcataaatatctaaaaccaagttccacttcatgcaactttgcatatatacacacgaagttcatagattaattacacaaaataatgaaaatgaataacttaaataccctccaaattttgttttcatatagtttataaaaaaactaaaccctaatgctcaaaacaatttatatcttatgcattaaaattagggatgtaaacaataattgaagattattgtaaaagaatgtatgatataattaaaaatgaaaattgaaaatacaacaaatatctaaaccaagttcacttcatatgactttgcatatacacatgagattcatagattatttacaccaagataatgaaaaatgaacaatttcagtaccctccaaattttgttttcgtttagtttatataaaaactcaaccctttgcgcaaaacagttgatatcgtatgcactaaaacatattaaacttatgaaggtaaaccaacaataattgaagtaatatggtaaaagaatgtatgatataatagaaaaatgaaaaaagagcaccaacaaaaagaaataaggaaaacaagaagaagaagataaggatgaagttaacggttaggtatgaggttttggttcgattcggtgactttttgactgaggaagccagcctgtataccattattagtattttttttatttatttgaaaaattgttatcattattatgttttggatattttgccgatctcaaaaatgaaatactctaaaaagcaaagaagaaaaaaagcaaaacaaaaagaaaaagataggccaaaaagagacagttgctcacgtggcgcaaaacgacaaggatagatcggaaggctgatcgttaccactttaattttctgatattataaaaaaaacaaaaacaggctgtaaatctctgcctccctttaacggccactctcccacctgccggtcacccacccacccttttttatatattcttcactaattagtaatttaccattcttaactcctttataacttgtgtttggaaaactaaaaatactttggtttagtgtttagttaagaaatttagaatttttatcatttgtaaaaaacacaaatttgacttttgacttttttatttttttgagttatacacttagctttttgaaggaaattaaagagaacaaaaatatattttggtgtttttcaaaatatgtgagaaaataaaacttaaatattggagggtcgtattgtctgagtggaataaatcgtagtcaactatatgtatgtttttaagtaagcgaagaattgtattcgaataatatattaaatgcattgtccttatttttgtttctattaatggattatgtaaccaaccaacggttcagaagtcatttttaaccataaattcatttttttatgttgtggtcaatttgatatgcattcacacatatatcatcaactaccaacgttagaaaaaccgtagatactagtactaaaacactcccatagaattcatttagctaaagaagcttcttcgttcatgaatgcatatctatgcgtaaaccacttatgaattaggccattaggttatgatgatttcgagcctaatgatttatgtaaatatggacgcagcagttactttacgaccgctgtgagtgaatatatataaatttctactaaaatgtagattttaaaaactattaaaactgggatctgtcaagtgtacggcaccggtaaacaactaatccagccgtgtactgcagagcacgaggcacatgctccgatgctaagggaagtttcttgcgaccttcctactctttgtcactcgacttaaactaattagtttatatgctttgagcattgaaaagtattattaagtatccctgagaaaagggaaaaataaaaggataagattcggtcagattttgttttttatcttagtgttaaaccaaattgtatattagccgatataatttcatagagtgaacgaagggaggcagatggacaaaactgtgtaattaatggagatacggtaagagatcttccgttttaggtacatcgtacctattacctaatttattctctaatttttattggtttttgttgtttaattctactaatcaattcgttgaaaaactactaattttaatcgttactaatgggaatggagttaagttttaatctcgtccaaccaacccaattcattttctggattataataaccgacttttgtgagggttgtagttgataactgaaagcaattcttgtcgattttatatgtattgtgaatagtaagttataaaaaaaaggttaacgctgatagatgttaaaaattaactgcattttcaaaaaagaggtcattggcatatatagtggtaagaaactgatggttttagtttgtgggtttggctccaccgaaagagttaagtatttcgtgagctaatttaatcttaaagaatactatagaatcgtagcacggcaatttgtaaagagtattggaaatgatatagcttgaaagagttaagaggagtgcgtacaaagtatagagtattatcaaattataataacaattcgatctaaatattaacaggaagcaaattattcatattcaatggttatctataacgaaaacgtactattagataaatatgcgtgtgtatgtgtgattcccaaatactattttttaaaaaataacaactttttgtgtcgttctcttatagcataagttaaaattccaaacaaggtcactatttactagaccctgattgatctcatagatcatatatcttataaatatactgttccctccactgaaacgtagtgtctaattttcgaaaaatgcatgtgagtacatatgcatggtgccttggaatggaatttcctaaaatagcattacaatcttatataataataactttgttcaaggttcagcgtatgttttaagtcccaatcatatatatgaatgttcatgcatattagttccatgattattattcgaaaatctagtaatccaaaatcagagatttgttgtaacgatattgtctggaatatcttgtaattaggagctaaccaataccaatccacgagttcgtccaagaaatggaatattattaggtgaccgtttaattattatttaagaaattcagattcttgtgacttaatcattttaagaaaacgattctagtgattttaacccattaattttataaatgttgccactgaacgagaggacacaaatatttcgacgtgtacaagacttcaagaggtacaagttcatattaaaatagtgtaacattgaaatcaatgaatgtgtgtatatgcaagctaataacgaaaaatctttgtgttgtcttatgaaattattatctttgggtaattgggtttcgaaaacacttgtcagtatctcattcgttgaatctttttttgttcctagcaaattgttctgcaaaacaccaaacttatcaacaactttcaaccgcagacggcacgtgcgagaaacgatctatcacgtgacggtaaagacgcgttagaagcagacacacgtgtgatttgtttcccaccgctccgacaaatacactgcagaaataaaaaaaagaattatatattttgaggcggacaatttgaccatacgaaagtcgtatactttggcgtggtacggaagggtataaatgtaaattagagttatgaaaatcttggaactgtgaactaaagagatcttcccctttgatatggttgttgggtttattgatacgacacacgtgaaaactttgatgcccacccatatttttttcatttattctctctattggtacttcgttatatgatccaaacttatgatttttgtaaaattaatgtaacaaaaactagtcctatggttggttttatgatgaatcatgggataattaaaggaaagtttgatgcgaaattaaagacgtctacattcagaaaatatgtgtgttccttttgcttactctttaaatctcactctacctttagtatatttgctcaatttatgcgatcaaatgatgtccgtgtaaaaacacaaagatatcaatacaagtagatattagccaaaaatatttgaagttatcagaagagaagaattttttttttttttgtaagttgcgatttagcaacttttatatgatcaactgtctcacaaaaattaattttttaagaaaaatatttgttctataaaagtaaaagttttatattttcaaagcaaattttaaaactgtttatctgttttatccttattaaataattatataaatatttatttttatttttaaagtgtattaaaaggttaaaattgtcattatataatttttttaaagaatgtgaaatttctaaaaaattcatcgtaaaacataaggaataacttttagacattcaaaagtagaagatactaatagtctaatacaatatttacatacagtataaattagatctatacactttgaagattgctgtaattaagtttaaaaagtcgttttgtgcatttatatgcgttgatgatgaacttttacgttgaccacaataaggttgaccacagtattcaaacaatagttcaatttaaaacaaaaagtcaaacacaagtgtatgttgttcttgtggtcaataagacgttgatgctactaccgataagtgtgaagtgtcctatgaccaatcgccttttcaatttcaaggtcaaaggtttatgtagatgagttttaataaattgtgttgttgtagaaaattgacgcaattacgtctaacgtctttgatagtcgtacttcgaagtgtttttgatatttcatctgactttttttgttattattttagaatgatatttcataatttcggtgatgaaccactgatgatttcgtgttcaattcttctgatcacatatatcccataacataggttatgcattagaacaatagcagcagaaccaatttcattttatttcaatgcactatagtcaaagaaaacagaaagaaaatccacaccggccaccattttttttcccaaagtgagcgtttatgttgaattattggtcagttggcaaaaagggcacgtggaatacatgcccacgatgttccgtcattatcaaacacgtgtcgaatctttgtgttagatattagaccgttcacgattcatcatgattgattcatgggcaagaaggaagattcgtggaaaaaatcaaacagtgatcttgtttgtaaataaagatgccgtaaaatgaatgcttccactagtaacagaactcttttttttttttttgggcaaaaataacagaactctttatgtaacagaatgtatctaaagtttatgcactagaaacgaaaataagaaatgtttatgagagtggtgatatagtaatcgtaacccgcatgagcccgtcgtgctatcgcctccctttatttggtttgcacttttcgaaatttttttactaaaagaaaacaaaacgaagaatgcttcgggccgaagtagtttataaagaacctttaattatgtttattcgataaaacaaaggttagtcatccattgttttgtgacatgcacagagatagtggcctatcgttatttaattaattatacataaccactaaaccactatattgtatgggttggttgtactttaagtctttaagatacattatgcttaaaaatgacagttaaaatttggtttgtatactacttagacgaattctttgactgttaatattcaaatatatttgcattctctgttatttcattcatatccaataaatatatatattatttattatagtatgatataaactaacacataatatatacatagatatatttcgtttaaagatgtggtgtcaatcgtattttttatagagcaaaatttcgaggtaaattagttttttcaaacatctacagtttgtacatggcattggacttaaataaaataatgtcacgtagctatcgacaaaaagaaaagcatctgatgtagctatgaaatttacaaccactgctaaacaaattgtccacttaataaatagtttatagataatttgggaataaagctgacaatgactgtgtcggatatcgttattcgccgaagctaacattcatataaacgaataacgttttttgttttttttggtcgaaataaacgaataatgtataaaatgaaattttgtttacaccaaaaaaagatccaccggtaacaagaaaaaatcttagtgctctgaattagaagaataaattaattatcacaaaaaggaaaggccgtagagaagattgtaagctttaaaaagcccaatatttttggacaattttcgtttggttacctgtccccgttcgtcctttcaagtacatcttcttctctctcgatttagcttgaggtataaccagtcaaccgccacatttccttgtattacaatgaataattgggcctttaaagcccataaattggcctctaaacgtttcattcggttaagtcccttgcattttaagatttcatcttgtcatttcacctacaattacaaaacaaaattacaaatcatctctctgtttcagagtcaatggttgaaggaaaaaaaaaaaaaactcactgtacttttatttttatggatcaaaagtgagttgttctatgatttactttttgtttcacaaacagataccgttttgtttctttaatacaagtttaaaaaaaaaaatgtaatcgtcattatgatttaagtttattatttccataactgtatactgtatagtgtgttgagaaaaacatatgatataaattttagatgttttcttaaaacgagggaatttaaatcatttaatagcatatcgtaagtttaaagtcaactagaggagtgaatggcaggctaattattcttcttcttctcaacccaactcgaggaaatttagctgaattagcataaacaatacgtaaggaggaacatgatccattgattaggcaaaaagtttaggttacaaattcatacatttgcatcttacttaaaaggagcaatagaattcctagttccaaggtcaagagtcaatttacatttccattttttaaaaataattttgtttgatgttataagttataacttaagtaatagatacaaatcatggggacataaacatagatgagcttttcttatggttgaaagaaataaaaatccaaatggcgaaggatcaaatggccgactagcattgattgaattgctaaagcgagactttaccttttacattataaatcatttgatttgacctcatttgtgacttaagttatctaatagcgattttttctctatgtttttttttataataagtttttggttgaagattaagatgtagatcataattcagggaaaagatcatctaatgaaaattcatggtccaccacaagactaacaaggctgggtttgtggcttttactattggactcattatagttgatgaactttattgaatctttttcaacccaaattttgtattttataaagaagtgggtagagatcacctccaacctttacaaaagaaactgtttaacagttataaagaatgcaaaaagggaataataagagactaaaatgatgagttatggagtatggaccatgtgtgcactcgtatatctaattattgaaaacctttacacttttttttccagggatgccttaaatacaatttacccacctcatgaatcatgcttatccaaactcaaacatatccaaaaccatgtaactgatcttcaatttgttaccattttataacctcgaagtaaatgcgtatttttttgcttataatattgacaatttcaatttccttacatataatcattcatataaagaatgtgaagctcttttaaactcatggagtgttatattattttccctccaattaatcatatgtagcttgaagacaaattattatttcgtacagaattgaatgcagaatcttccggacgactgaaatagctctacttattacaaaaaaaattgtaatcaaacgaataaaaacaaatgataataagcagcacatggaaaccatttacagagtaaaatacttgtaaagcatccataaacaaaaaaaaaatccccaaaaaatggaaaacagcagagacattcgaaactatattctaaaaacaaaaaccaagaacatgcccttatttttctaaaattcaaaaacatccattatattcgatttagattccttcgagctatattggttgtgtgaaccaaaaacagaagaatatcatgtaaaagtcaaatttacaactttagctatagatgatataaatgtcttgtagcttactgattctaagaatctatctactcgtttcttcggctcactaaagaaagagagagagagagagaaaaaaagaaagtacaatttcataataataaatgaagaagaccgtaacaagaagtgtgtagtcgtattgattatagaattaaagaaactctgcaatatttttgcagagagacagagacacaaagaaagagagagagagagcatttagggagcaggaagtggagtgtttggttacgtgagctgttttctctttctctatctttaactcccttcacacctctccctctctcttcttcatatctctctctgtcacaatagtgtgatgatgcaatgagaatggagttgatttcagtgattttcttcttcttttgctctgttttgagttcctctgctttaaactctgatgggttggttttgatgaagtttaaatcctctgttcttgttgatcctctgtctttattacagacatggaattacaaacacgaaagtccatgttcttggagaggaatctcttgtaataacgattctaaagtcttaactttgtctcttcccaattctcagcttcttggttcgattccttctgatttgggttctctcttaacacttcaaagtctcgatctttccaataattccttcaatgggccattaccggtttctttcttcaacgctagagagcttcgtttccttgatctctctagtaacatgatctccggcgaaatcccttccgcaattggtgatcttcacaatcttctaaccctaaatctctctgataatgccttggcgggaaagttacctacaaatttggcgtcgttgagaaacttaacggtggtttctttggagaataattacttttccggcgagattcccggcggttggagagttgttgagttcttagacctgtcgtcgaatctgatcaatggctcgcttcctccggattttggcggatatagtctccagtacttaaatgtctcgtttaaccaaatctccggcgaaattccaccggagatcggagtcaatttcccaagaaacgtcaccgttgatctctccttcaacaatttaaccggtccaatccctgattctccggttttcttaaaccaggaatcaaatttcttttcaggaaacccgggtctatgcggtgaaccgacccgaaacccgtgtcttatcccttcctcgccgtctatcgtctccgaagccgacgtaccgacgtctacaccagcaatcgccgcaataccgaacacaatcggttcaaacccggttaccgatccaaattcacaacaaaccgacccaaatccccgaaccgggttacgacccggagttataatagggatcgtagtcggagatatcgctggaatcggaatcctcgccgtgattttcctctacatctacagatgcaagaagaacaagatagtggataacaacaacaacgacaagcaaagaacagaaacagacacaattacgttatcaacattttcatcttcttcttcttcaccagaagagtcaagaagattcaggaaatggtcgtgtctacgaaaagatcctgaaacgacaccgtctgaagaagaagatgaagatgatgaagacgaagaaagcggttacaatgcaaatcaacggtcaggagataacaagttagtgaccgttgatggagagaaggagatggagattgagactctgcttaaggcttcagcttatattttaggagccacaggttcgagtataatgtataaagccgttcttgaagacggtagggttttcgcggttcgtcgactcggtgaaaacggtttatctcagcgccggtttaaggattttgagccgcacattcgagccattgggaaattggttcacccgaatttggttagactttgtgggttctattggggtaccgacgagaaactagtcatttacgattttgtccctaacggcagcctcgtcaacccccgttaccgtgagtctctttaaccaggaggcgtgctataacattgtttgctatcttacacatgtgtgtatatgagtttgctgaattttgtgtgtccttgggcaggaaaaggaggagggtcttcttcaccgtatcacctaccgtgggaaactcggctcaagatagcaaagggcattgcacgtgggctggcttatctccacgagaagaagcatgtgcatggaaacttgaagcctagcaacatacttttgggccatgacatggaacccaaaataggcgatttcggactcgaaaggcttcttacaggcgaaacaagctacattcgagctggtggatcttctaggattttcagtagtaagcgttacacaacttcctcgcgagaattctcgtctatcgggcctacaccaagcccgagtccgagctcggtgggggcgatgtcaccctactgcgcaccagagtctttccgaagcctaaaaccgagtccgaaatgggacgtttacggctttggagtgatccttctcgagcttctcacgggaaagattgtgtctgttgaagagattgtgctaggaaacggacttacggttgaggacgggcaccgcgcagtgagaatggctgatgtggcgatccgcggcgagttagatggcaaacaagagtttttactcgattgtttcaagttaggctatagctgtgcgtctcctgttcctcaaaagaggccaacgatgaaagaatctttggctgttcttgaaagattccatcctaactcctctgttattaagtcttcatcgttccattacggacattaatatcagtttgatacaactagagtgaactagttagtcaatttgatttcattgctaacttgttttgttgtaaaaaaaaaattgtgtttgctgtttttgtttacaaaactcgatttcccaacattaataatctttttcattgaagaacagtccttatgggaatcggaatggttaaaaattgaaagaaaaaataaaccaacattgattgaattgctaaagcgatacctagcccttcaaattataaaacatttaatttaacctcatgatacgcattttttgtattgaatttataaattacaaaacaaacacagagaagaaagcttttacaaatccgagtagaaaatatcaaccaaggagagtctcgcacatgttcacgaggctacacaagaaacagtggcaggacgatctcttagaggctatgttaatgttgtctattagtacattaagcgatctcttagagtctatgttagaaatagaaaaatggctgtgcttgaaatattccataacaactcctctgttgctaaacctccttggttcaattacggtcattactagctcatgtcgattttagtcatagttggtcgatgtgatctcgttgctaacttgttttacttacagcacattagatttcccaacattagtaatccatttcaattaaagagaatttaataattacgaatcatgggaagattaacattccttatggttgaacttgaaagaaataaaaagctcccattgattggacttgctaaagaaagattttactattttagccttcaacttagttttggtcagcttcaaattaatgggttcttctggtggacttttgtagaaacaaatgggctgggccatttacatagttctttctcaagcaataaatagaaaatatttttagtcaaaaaataacggttggtcattctcagttagcaatatttacttttcttccaagataaataacctatccaaaatggaggaatgtttccaaagcatctctatatctaatccaaaccctaattaaaattcaatcaattcaaaccctacttcacgccatgaactcgttaaaaattaaaacttcaaaaaactagtttctcttttaaatcttgattggatggggtttctaaacaaccaacccaaattttaaaccactccacaaactacagctttttttttttatgattacactacttttcatcacaaaaaattcatcgcattttcatgttatagaagaaaaataacaatgaataaacaatatatgtgattgtataaacctttgattattcaccgccaaagtgttatcaattttaagtatacacttgtgttgatttttcgcaacaattttttttcttctatttttttattttttgttaggcatgaattttattttttcgagctagttcttagatattgggaaatcctttgagctaaagaatcttaaataacgaaaacgataaatgactaacatccagaaacaatactcgttcaaacagctgggcttttagaagcaagagtattatttttgttttgtcaacctaaaaagtatttatagttagtaataaatgttaaggacagtttcatttaactaacaagaacctttcatataaatcataaatggattggccaatggttacatcgttgatgactggaagcttgatcaaacagctggacttttagaacaaagagactcttaatactttcttggtgtaatttccgtaaaatctcttatatcaaggtcacctttaaaattgattactactagtatttacctatatagattgacaaataagttcaaactcatggcgtagtctttgttaaaggcttatggagtagtattaactgttcagttgtaagaactatccacatatatattactagttttagtagtatcaattattaaggggaggcaaaaatgcgaataaactggtcccaagttatattatgtcatgtgaacatttaaactccagtactccactttctagtcatgttttaaaatgatgctcttaaaagtatatctaaattttagtttattctattttgatattattttacaaacattatggttcttaactggtactaagctatctaataaatgttaggctaaagatatttaattgacaaatttatcaaaagctacaatattatttaaaaatcagctaagtataaataaaatgtgatagtaaagctaaaattaaaattgtaaataaaatgtgatagtattgctgaacatttaaacatgtgagtgcacattttctccaacgtaaaaaccatataatttaatgtaacgtcgcgtgtgtttttctatgttggtgtcaaatgtgtatgcatctatttatttgactatttttgcgtaaccttgtattttaatttatgatgcaatcaatccaaataccgcgttacgagatcgttggaacggaccagtcacatgttcctttcttatccttatatcaataatgaaataatactagttttagttaattttctgtaaatctaattctataggttaacgaaagaattttgtcggatgatggacattttaatctctttggggagaaaaaatgtagggatataatagtaattggacgagtcatttgagatatgatgctatgcgtactaaaatcccaaataagaactttttgccaatatgcaaattgcatcttcattaaatgactaataggccccaacataatttacactatccacaaattaaacccacaaatttaatcaaaattccaaaactacccttcactcatctatcgtactcaactccgccgcgtaacatttcctcctccggctactactaacactaccaccaccatcaccgttcctcactttcctcctcccggatcctgaacccaccgtatcatcaccggagccaactctcattcgaagcttatcagaaacgataggctcgacacatttccggcgacaacctcctccaccacctctcatgagcgcagagctagctttaacggccaatgcagccatctcctcagctttaagtggctgacgaagccaacaaagaggaagagcaaagtatatctgaccaagctgaagctcttcgtcagcgctaatagcggcaacggcgtcgtcaaagtccatatcgtcggagttgcagataaaacacatcggatacttgagcaaaacgtatccgactttaacgggattcgcaaactccatcatcctcccatcttgtaagatcagcttcgccgtcgcgacttgagtcgactcgctcgagctgcatatacccatatgtattcagtagtgttaaatgattcttggtaatggtaactcgctctgagttgactcagtttttccggtgaaatgaataaattatgggaagagaaatggaaggtttgtgtataaatagagagaatttgcagaagaagagaagaaaaaaaatggatgccacgtaggattttgtcgttttatgaaccaataggagtgatgacaggctgtagaagtgggtggggaagaagacagcttttgtgtttgcgtagatattttaaccctttattattagctataattaccatgtcagggactcaccttttatttatttatttcgaatttgttgttaccattttccctctttttcttttacgtttttttaaaaaaggtgatttgcatgataaaagtatacaaaatttcaggaatataacatatagtagttgttaaaataagacaaaaaaaaactatatactaatttacaagacatgtaattcgcctactctacaagttatgagttcattatgaagacattttggtttgtgagtattgttattatacattttgttttacgaacagataaattaatgagtgaataaattgatataatgctcttggggttggcgtggtgggtttacgaatttaagttaaaattgaattccccgatttacaaaaaaaaaactattgctgccctttatgcctaggttacaattttaaatgcaatactcgttcccatttttgtataatggaaatttatgaactttcttgtcacttttaaatctgtgatattgattggccaagaagctgtcggaatcctttaatgtacttttaattcattggttatttattcctttatttttgggtgtgtatatacatttatgtttattttctactgtacgtatctatttcttacgcctaatttatgatcaacggctcatattgttcacagtgtttatatttgatctaatttacttgttgccactatttgtttggttagtagacaagcaaaaggtttgttaatcacacatttattaaaatataccagtcggactcatggaaaaaagccagagtttgcttacgttgatgtcaacattatacatcctaaaatacaatgaatttgattggtgataaagaataaaaaggagtgatcatgattcatgacttaagctaaatagagtaagcatatttgttggcgaccatggttttacttcttctttgcaagtagattttattccggttttggtttaccaagttgcgtaaggactagctactactactttatctttctaatttcttatgtaaagacaatttacccaatctactgaggatagaattggcatatcttagtaattaagatagaaggaataatgtcaagtagttgtattcaaatgatttgattgttttgatgaatgtcactgatcggtttaaatgtgagtaatatatttgcgagaaacagtattaactcttccggtcgatcatgaatactatcactacgcaaaatctcatgtccttaggttacgttataatcaacgtccaaatatacagtgttcatagaaattcagtgataaactaatatgatatgaataaatatatgtgaccaatagacgtggccttagcgctgagagtccacggaacaaaacgaaagtgtaggaatagcaagagaagggagtggcaggggaatgacgtgggctaaactggagcagccacgcatcgtattttcgagccaggagacgccacgtacctttaaatgggtcctacaagaatccgacaatttctattggtgatggcttaaactcgttgagtcccttcttgcccggtgacatctcgttatttgttcttgcttcttcggatatattattttatatataactaagtgaaattaataatataaactgttctctgtggttcagaataatgtgttatagtcaaattttggaattggaatgatggtcaatatgtggttaattgtcaactatcacaacgatgacaaccagaaatgaagtggtgtttagctaatagtattattattattttcattgtcctttgatcaaacgaccgctctattagtacaaataattactgaaaattgatttatggaccaataatcgacccttacaagctgaaatcaataatctaaaccttgatgtataaaattatttatcgaacattaaattcatcaaatatgtgttattggacaagttgaagcagttatgtcatacgcttatcgtaacacattaattttacagtaagagaatccaccgaataccattctactatctcaccgtttcactatatattgacattgtattgtttaccctttataattgtagttttctattttggtgagctattatattttttattccaaaccgttaatggtggataataatatgagacattctgcttactgctttaaatgtaatagacacaaatttcttctacgacagaaggactcgattaataatagatgagtttgaaaaaatatgtttgcgattagggaattgtttaagctgtactgtcgaagtaatgcttgttagttgtaacacactcataatctgtgttttaattttgttgtacaaaataatgcctcttttctgttatagatacttgtgtcgtaataatgtgtgactatttggttaattagtgtttctttttgtttttgtaatttatcgtaaataaacatgagcttgcaaaaataactaacattattattagaaaagtttgtataaacgtagaacaagaaagcgaacgtcacatgctccatgcttttgtatgaagcttcatggatgctccccctcacggtctcagcccacaaatgagaagattgaaccaattattacctctttgacttaccaaaaataatgctttattattcgacttccaaaaacgtttttattttttaacaaaaaaaaaaaacgtttttatcttttaatattgtttcttatcaggaaattaaaacgaccgtttgagaaaagataaaaaaaattccccgaccataatacacattcctcaacaaataaacaatattctgtttaattagctgtaaatgttaccaatcagttttgaattgagatggtcttttttttttttttttttttgccaaaataacctagcttataatagtcacgtgcaaatatatgttataacattgtttagtgcaaatatatgtttataattattggttataattgatggtcttgttatgattgttttcttttgggtggtgagttgagatgatgaatcaagctcccgtttaacatgtgcattgtactcgtttggatgtatttgtgaagattacaaaatatttctccaacgtattcataccataatatttaatcttaggaaattagttaaaataagtaacatccatgcatctgtcttatacatatacattattttgatcactaacataactagttgcaaatcttagaagaatgatgttcgtaactttctctaaatgtgtaatttcttagttaaaaaagacgtcaagcgaccaaccatatggactaagtacttggagacaatatccatatgcaaaatttcaatggtttagagctaaaagatacgcttcattcgatattgaatattgatttttatggttttgtattattattattattatttttttttgtaaacaagttttgtattatcttatatgtttgtttttatgcgatagtgggactcctttttttgtccaataatttcttgttttgttctttatattcattggaaaaagctcacacttgtcattaccatgaaacttcccatcttttaaagtttatagaaatctagaatcaaaagtttcatcatcatgcaaggttgtcttgggtccctttatctttaattacttctgatcgattaagatttttttttaatcatggttcataaaagtatcaactattattatgttggtcttgattttgtggaactgtttatatacgcacattaacaaaccttaattatatacaattaagcagtacaatagtttttttaattgtttgaagaaaacgaatagcaataaaatattacttgacattttaaaaggaaaaataaatgtcaataaaaagtcaaaaagttaggttggaaatgtttttacatgtgtgatttgggcgtttggtttctatttataaaaatatataaaattttgtttatgtgattttatttgagtatctaagaaaatctatagaaagctatgcgtacggaacacatgaatttgtatgtgcatgcacttgaacaagccggtgccttaaatgaataacgacggacatttaaaatccataaatcgattctcatttataagcaatgaattcaaaatctgtcattaattaattaattaatttgattcatctgtatgtagtatgctaatacaaataaatacttatctaaattcaggtatttttcaaatgaaatgagatttgagattggacacttaggatatagtttagatcttcatgtcccatatattacatgaaaatatatcatttttcaacaatatgtaatttgatcttaaataatttccaatttccaataatttgaccccaactatatagataaaagacgttattaattagcaattttgctgtagaacacagtttaatcataaacttttgtatagacccatgtgcgatgctgcgacaagccttgcaaactacaagatgtactttattaaaggtcaatattgttactgttcaaagattacaaaagtttcctatatatacagtgttttctaatgggacattcgatatgacatttgctatttgaatttaacaattactaaaaaaaaattattctaaaatccgtcagaaaaatggcattggatcgaaacaaaggaaaaaatattctacaacaaatacaaaaggaagaatatataactatagactggtgaaatgaaatcctaattagtgagacattagagaaggaagaagacaaaaattaaagaaagttgaagcaaatgaaagaaacgaagacaaaaacgccattgtcgccgatagcttataccgatcacattgcttctctccggcgtccatcaaaagtacggccacgctcgccgtcgagcatgcacctcccaatgacaaaaacgacaaaaccttaacaaatccaaatgtttaaaggaaattataattagcaaacattttacattatttgttttgctaaaaataacaaatagcttgttccatttttgccaaaattttctctgtttattgtttattgtataattaataaaaattgaattgaagtccactatagagaaatcaaattttcagagtctaccacccaacaaaaaaacaacaaatatatacaagttgatgtactctagagatttctccatcttaattaaagcaagacaagtgatccatattcatctgcttgttgcagacagatattttcagatgatgattgtgttctattgatgtagggttggatgggtcatcagcttactctacttttgatatgactcgttctacatgagtcagttcaatataaatcattatcattatcagattcgacacgatctagtgtttttgcagtttaaattgtagttgaattatagtaaccggtccaaaacatggttcccctcagttgcaaagttttggcccactacaacttctatacataattacatattataactttattagtttgagattcactcgaccacacactcaattacgaaaagtaaagtaaaaagtggagtctaagttaaacaagaaacataaagaaccaacaatatttgcataataaagattggttgacccgaaattgataacaccggaaccattcattacattggatagcattattagataactaagttggtgcatagcctaaaagctttatcctttaatggctaatgtgatttggatatccatccatttatctttcttataggatatggtccactagagatattatagtgggaaaggatattgtagaaaacctaacagtataaagttgtggaatgtattacagtttgaattgttattggattgtattttgatatcaaccaatcaaattctaatctatacccactatgtcaatgtctataactagtcacaatcagttcatttggtaacaccttttcttaacaattggttcaatgtttgacacgaacacaaaataaattagatgaatatagctatgaaggttttaaacacaaagatgacttacaaaatctccagcgacgatgacagatataactgttgcttgcataggaagtttttttacgaggattgagtaagcttccattagggctaacgtcacgctccaaggtgtcactaaacccatgactgtgactagataactgttccataacattcatagttaagtctcttgtttcgacacttggtttctaatttttaaatgaatgatttgatttattaccagaaggtggtgtaagcgtagaaatcttcgtcatcgttaaagcacatgaaaagaagcgaagcagaggaaaacagagtttgtccgagacgaagaacaaagcttgagctggttccaaacgacgccgttgttcttaccatctccttgaacaagagcccttgttaacgtctctagttctcctcattttcacctgctttgatcttccattactgggtttcgcaaaagatttgaactttgagtaggagataaaacagggttaagaaacagagcaagggtcctctgttttttgagacagggaaggtgaaaagacaaagtggatgtgacaacaatggggtcataaggcaaatggtttgcttaattataaatctcttcttacttcttaaccagaaatcatctttgctgttacaagcaattatacagatctacaaatatgttatcttaatccgcaataattagtcttttaatcacaataattagtatctgattaaagccaaaagtgcaaagtgttaccaaatggagtaccacatgtactatgaactggaatcaatattccttaatcataacaacatttacagaaaaagaaaacaaacagattctctatgttttattcatcaagttggcaataccagattccttgaatcttgacatccttaggagtcgtagcacccaaatcagtgtctgaaggttgaatactctcgaaagcaccaatcacttcaccgctctcgggattactctttgttacactaagtgtgatcttgttgttctccttagctagctcctcattgtttcctctagcaggtaatgcaaccgcattgtcatagccttgatattctatagaggtaccttgtaatactcctcggatttgagcagatgggcttttggaggttggaatcaaaggaagcatcggatttgagggggtttacgaacattctcttggctatttcgagttgatttctcttccaagttgtgtcgtctccatttttgtggccgagctttttgttttcacagcgatgggtttacattggtttcgaaattcaaattgatctcggttcggtttaatttggtttagagaagaaaaccaaaacaaataagacacgcgatgggtttttaagaacgaggtgcgtggattcaaaaaggcataaattttgtggattaataacccctttagaaatcgtagacacgcgctcaacgcgacatgggtgagagtggctgtgaaatcgcacgattggtaaaagtggggtatgaagtggagctctctcattggctaaaaaactaaaaatagtagggaagctcctcctctcatatattgaaaacaataataaacagtgtatctctgtgagtgtagaagcacgaatatcatcagagaggagagaggagcaatcaatccactctcgtcttctcctttgttagcttcggaatcttcttcttcttcttcaatacagcttcgacactagaaattcaaaaggtcgttatgaatttaccttagattttctgcgttttcagagtgaattttattgatttctgaatttttattgataataatctgcagatgttgtgttttacgatcagatttatttccaacgtggccttgggtgaatgctgaagggatcgacttgggaccaaagtatcctctgcgatgccacgagctgcttgatcgtgaacaagaacggtacacgctccccaccaggaagttgtgtactgtcactgctgcgtaatcaacttcgaaagggccttcgatttcatcgagtgtgtaggtaaggctagtcatgagctttgtgctttggaaatctggtgtggtgctactaactacttgagctttgacggtgaatgattacaagaatatacacttttggatacgaacaacggcacgtagttcaatgctaggaggtgatagaaatttgtgttgctttattgtttggtgttaatgaaatgaaaaacaattttcaaaaaacaactattagtcatgatcaattaaaaagtctacaatattcaagattgattcaacaaatcaaccaatatgcaaatttatttatatatcttacaagtcacacatttacaagaaaaaaaaaacaatcttacaagtcagcagtgcacgattgaaacttcttttttatattcaagactttctcaaacacaaatgctccttataaaattcaaaccttgaaaacgaattgaagacacaaaatgttgaatgtgtctacaaaccaatgggtcggattgacttaaaagatgtgaaagaagatggtccaaaccgggtaaacgaggagggcaacgatcccaatggtattggagattccattcttttgagtaaaagagtttttgaatccacctgaagctttaatgtgttcatggaaaaggtaacatgctattactagacatatgactgctccaacccagctttctcttagtgtccaagctataaggctcggcgacaccaccacaataagaatcaatgctaccggaatctctagccactctacatttatatgcaaaaaagaaagaagattttcaagatcaaagtttcaaactaatgttaagtcatgaaaactgctggttctgacctggaaattctttagggaagaaaagcctgactatgatcgcgatgagagcaatccatttcccaaagtctccgctgtgaaattatatcgaatatggattatattttcaaaagaactccataacatcatgttaaagaacagtttttcttgattacctaaagaactggaagataaccgaaggaagtgtgaaaaagatgtatggtactaaaagggtggtcaacattttggttttccagttggtacgatccaatatcaacagataactgtcaaagcaaaacaataagaaccatcatatcaatatatgattcaaacaaaaaccagagaggttatatggttttgtcttttggctcacatagcgaagattgaagcggcccattggaggactgacgtgccaaaacctaccccgccgagcatccctacgtctttcacgagcttctttgcagcggcgacgaactcattcatatcggaattgatcaggttagccgcgttctcctcagtcttcatggccaaaaactcaccccttcccatttttaagttttagtttgtttgtgaatgtagtaaactctctcacatagcagagtatttataaccaatcacaaaacaccttggctgtttgtgacaactgttgaatcagaacgaaagaaaaaaaaatactgttgtgaatttggatattctaggagctgctcgccacgtaggcttcgctggtgacagagatagatttgacacgtggcttccccaagggtctcgttttcatagacagagcttatctatgatatctccagaatccagatatagcgtaatcttattatactaatcatattataagattccagtttttaattctacaagtagcctacattttttaataaaggatatccaattatcccttaattattacttataaaattccctaaaagatctccaaagaactatttctcatcagatgattatcaactgataatgtgataataagattctgcttttgtgcctaaactaaaaaacactttgaaaaaataagactgattaaacaagaataaaaagtaaaaaatatctcagcgatttaaaaaagtagcaagtacggactccattacaaaacatgaacctgaaaatctagtcttggaagattcatgaggaagataccaaatgtttttctcagttttcttaggttagatacttcactagtaacaggaatttttatacctttttccggtttcaagaggagttgccatctgctttgtctgaaaactctagagctggtttctttgatgcacttgattcaatcgaggttgtattcatcaaaactctcttcactcctcttccaacaacacccaagtgagtaacacctgatgctgctcctcctcctgctgcaccggtatgagcggttgagactgtaggcgactctaaatctttcccgaaattggtgttcacagttcccatcctagaagagctcatttcagcagcagcaggaacaaccttgtcactggcatttggcttagctgataccatgcccattagctcagcaagaacctgctttgggttctctgcttgttgttttaaatcctcaagctgcagaaaaaaaatgttggacattagtatgggtttagagatattttaatgaactgataggtttagtttacttgccttcttttctagatcttcagcgagaccagctaagtctccgatctcaacttctttgtctgaagcagatttatcaatgtaaggaacattggatgattgttggatgccttcatctatttcagagacggttgaggaagttgctgaaccagatgcacctttgatttcattactgagcctctccatccgagctttgcatattaacaaagctttttgacaatatggtattgcttccttaggctgacatccagtctcaagacaaatgcagatgcggaagtttctgaaacgttcaagttaagatataatccaacaactgaattgacagaaacgaaaatcaggtacaatttaagaaaccacaaggatacaattcagctgtgcgtcgactgtcgggctcaaccagtctctctaagatggataatgcattcttgtagtcagacagggaagactcaatgtcctctgcatagtaaacaacagaactcaaaaccaaccaatagctgacatgagaaaataagacaatgcaaaggtgaaaggaagaaaaaatacctctttccaaggacacttcagcaagcgaacagagtatatccactttttccattgtctcagtagactgtttgtcagtaataaccctagcaatgtccagcattttccaggccatatccaaatcagactcatcttcatcagcatcaccatcagcatcagataggtcatcatcttgacaatcttcaccatcctctccttggtctttaccaccagaacctatacatgagggagaaaagaagtcagcaaacaaagaagcagaagcatctatacccataagcttaacctaagacaattcccaataatccataccttcttgcccacttgaactcccttgtctctctgggtcacctgaaacaacagaaggagccagcgattcaccattgctggactcttgctgaacttcaccttctttcttaggcatgttcccaagtggatcagcttcagcttgagcctttgccaggagagctaatccatatcgatagtatgcgtttatacactcagcatcaagttcaccataatgtgcaaccctaaccataccattaaaacaagcaatgttttcattagatcctttgataaaaggaccagatactaaagaattcagtcgagagaacacacaattgaaactcaactaaaaattcagaaccatgattagatcattcgagcataaactagattcagaaacatctgaaaccctaaacccttgattgagaggttctcgactacaaattctcaaatgaatctcccaaaaagatacctgatttcgagagcacggctgaagcaatcgacggcttcagcgaaatcgttctctttcaaaaacacagagcctttctccgtcaattcctcagcgaactcaagcgtcttctcacgctcctcatcacaaacctcagtagcagcactgtcagcggcgttgttgttattagcgtcgttgttacaagtcgattcagtgcctccctgaacaaccgattcgacggtggcttcgattgaggctaggttaggttctagggtttgcgcaatctccgtcgccggctcggttagggtttgtatcaccgaagcttccgacgcagaagctgattcttcaaccatcgcggattgagattttttctgggtgaatttgaatttcgaagaacaaaaacgtcaaatttgttgagaagagtggaatcgtattaaaaccctctcttcgctttttttggcggacttgaaaatgaaaaccaaaattaaagaattaggggaaaaaatatttttatgttttaattaaaatattcacggtaaacactaaaatatacgaataaaaaatgcgtatgttatcccactaacggttagtctagctaaactgctccgcttttgttcaagctatttgactcatgacgcacataggccataggaaaattgttacgctgtaaaaaaatatatgaccgttgtaacggaaaagggtaattttgtcttaccgaagttgtcttaccgaaaagggaaaattgttagctaaaagtttttctattatataaaatatttttattacaaaaatgtttttaaacttaaatgttaaatttaaatactggaacggttagatttaacatcccgtcttttaggtatgtaactcgtgcgttatcataagttcaacatgttttctcatatttaaatttaattttaagattttttcaaaaataatctgttttgatattttaaagctaaaagtttattaacaaaatgttttcaaacttaaatgttgaaatttaaatacttgaaagcgtttagcatcctgttcttttagtctgtaactcctgcgtattataagttcaacatattttcacatatttaaatttagttttaaggcttttttaagaataatattgtaagtaatccgttgatttttttttttcgtcaagtaatccgttgattaaacgcaaattttaattatatatattctttttattcaaaacttaaatgttaaatttcaaagatgtacaaactaaacttgatattctgtccttagaaaaaattaccacttagctttataaatattaaagtttatcaaggtaaaaaaaaacactttaagtgtatgtggaatataaagagtgactcatttcatattattttgtaacaaagtttaaatctttgtaacaaaaagcgtgtggctctaatagcttggttagacgaagaagctactactccttcgataataacgatctgatgagtagcagttttgtcatctctctcactctctcccgacgatggctcgcttagtattttctttaaaccttccatctagtcatggattcaatctcagtcctcgaaatcttcaatctttcttcgttacccaaacaggagctccacgatttcgcgctgttcgttgcaaaccaaacccagaatcttccgaaaccaaacaggtgaaaatttcgattctttttgaaatgggtcgaaggcaaattagctaaagttttagcctttacctgattcaggagaaattggtaatagataatggtgaaacttcatctgcatcgaaggaagtggaatcatcatcatctgttgctgactcttcttcttcttcttcttcgggattccctgaatctcccaataaggatatcaatagaagagttgcggctgttactgtaatcgcggctttgtcgttatttgtatcgacaaggctcgattttgggatttctttgaaggatttaaccgcttctgcgttgccttacgaggaggtttgtttttggattcttcatctgtgtttctattctcatagaatgcttaatgagttttgtgaatggatatttaggcgttatcgaatgggaagccgactgttgttgagttctatgcagattggtgtgaagtttgtcgagaactagctcctgatgtttataaaatcgagcagcaatacaagtaatgaatcgtcttttatgtgatttttgatcaaaatcaatctcctttcaaaatgaagcctttatatatagatgaaagacaagctagagctttctagttgcagaacggattagggaacttgtctggagattaagatgagcattgctagagcttcgaaaaacatggattaaggaatcttgtcttggaatggatttagctaatgaactagctagagctttaaagattctagttgcagaagagttcttattttgtgttggtttaatggattagggaactatctttaggattggattgttggctatgtagatagacgctaatgaaaaaggtagagctttgagattttagttgcagaggcaaaccattaatctcatgttagtttaatggaacatggagctttttagacactaatttgacgttttgtaggctaaagttgatgtttacttgtggtgttgtgatttcgcagggacaaagttaactttgtgatgctaaatgtggacaacacgaaatgggagcaagagttggatgagtttggtgttgagggtattcctcatttcgccttcctcgatagagaagggaacgaagaaggtaatgtggtcgggaggctcccaagacagtatttagttgaaaatgtgaatgcgcttgcagccgggaaacaatcaattccttatgcccgagccgtgggacagtactcaagctcagagtctcgtaaggtgcatcaggttactgatcccttaagccatggataaagagagtggcatcactatcatgcttctggcagatgatagaagttgtttctaactctatagtgcacaaaaaaagtagacaggaaaggaaagtcggaaagtagcaatgtttcaaattgatcaaaagaatcccattggaactataaatgttgatatcggtttgttcttgtttgacaatgcttctctcctatgcctccaatatcaactctctcaagcgacttacacaaagaagataagtcaatcaacaacgggtttgaccataaagtttcaaaccaaaccagaaaaaatctttaaagatgatacaacatattcgttttaagacataactaatctgaatccgaagattcgaaaaactgaggattcagctcagataccatttttgacagattctccctcatttcctgcaattcttctctcccaaatccccaggccctaaccacatctgatcccatggctccccactggatcccaagtttctctaaattccccattctagtttccaaaaatggcaaaattgcgcttgaagatctccatcttgttgctactggtatggagtgaacatctagtgagcctctgtagagagaatccgagactggactgctcagtatctcacctttcctcccaacaaggtttccaaatatagaaggaaacggtaatggtaccggaagaggacaacgcgaaaccgatagattgcaaaacaacggtttccctttggtggttgcctgttcgtaagatgcatcaaccgcattcttcacttctgaaaccaatgcttctttatcttctgatctaagggctccaagtatacacattgactcaaccgcttgattgtcttctacatcttcagttacttccggcgttagtgcttgcaaactcgttaaaagagtattctctaattgcttccctgctaatgtaggagctggcattgcagaatctaaaatcgccactatgttttgtctaccacgacccgttaaaagctgtacaagtgtattaacatccatagaatttgacacttcacttgaatctgagctagtgggttgcattcggaaaggtattgtgcttgaatgtagagcagcggcgtacactgcactgcttcgataaggtttctcatcaccgagattaagaaattttgatgctttacctttaaaaatcaacaaaacagataaacaagacacatgaaatcgtcagttgcattgagagaaaatcaaaagagttatgtttcaatgagagttagaatgttgcgtacttcctgtcaaagatggtaaaccgattggagtgaagagtttacaaaaggatgagagtcgagaaaacgatatcgcatcgtgaagcttgtttgaaactgtctttttcgagctcatctgtgacattggagtccttacggaatatagcaatacaggtacattcgtgtactcatctgccatgttttcaaggaaatccgctgctacagcggaaaatcctcccgaatcatccactaggaacttaataccctgtaatcatcattaacgtatactatttgttagaaagtaaaagaagtttgaaaagaaaaggtaaaaatgtctcaagcttaacctgaatatgatcacactcttccacgaaaaaacggagtctgtcacatatttcctctccacgtgaagcctcagagaaaacgtctttaccaattccataattgttaaaagcctgagagtccatccataatccgttcaattcatataaactttgaggatgataatgggatttagagaagtcagtccaacattcaacttcctcatctaagcatccaacaatatctttgtcctcaatctctttcgccttttctttccccactacatgttcttcctcgtacaaactttgcagaaacaagttcctctttcgaggttcagatctctgagtatcaacatctccaaacctacaagacacaaaattaaagataagatcacattattcacatcacctgaattgaagaacaagctattactctaaaatcaagttttatatgcactaagattgaattaacctaaaaaccataaaaacttagcaaatctgaccaggttgctgaagaatctgatcttgatgaagaaccttcgttgtaaagtgtaccgcgtgagctcatggtccctagtgcccctgaaagacgaaacagtttcagatgtaaacatataaaccaccattatatatcaaatccagaatcttctaatcgaaagataaagctaagattattaccttttaagttgactgaaaccaaacgaggagtgtatgtagcaaccccctgtataaatttccgccacacaaatgttgagatttgcaaaaacaagtgagattgatcaaagtcaacgaaatatcaatcatctctcacctgctgggtctcaccggagcggtagagaacatccatgtcgagattatggtttctaaagattggatcgctttcagggtcactagccaatccgagcaattcatcctacatttcaagtaaaagttctcaactttagcaaacccaatcgatttatagcaaaaaagacaaacacttttgtaatgaaaaacagagacagacaaaacccagaatccattgttaaaagaatcggagcagagagttcaacaggaggttttgcttctctaacctggaaattccaaaagtgagagccaacaaagtttgcgaattctccaacttgaatcgtcacaatttctctcatggttgtttgattggagacttgaaagaaactaagcaaaaggtcggttcttagctcacagcgtaagagactaagagctccggtgattgcttaaaccctcgtcgagcctagatttgtaaaagagtttgagaatgttgatgaagacggagaggcggccccgtgaggcccagagaccacaaaaccacataaattgactcgaaataaccgggtgaataaaccggttgggtttagaaactgaatcgaccgaaccaatttgaacaaatattccattgccgcttaaatgtctttagtatatacactcattaattgtgaaaagcagagagtaactatttgaatttttgaataaaaataacaaatttgaagaaaattatgtcaaaagataaatatctaccctatactattggctaatgtatgttacatggtgcaagaagctttatccacaaaacatgcaaatctcgtggaagtaaactattcatcaaatcactaatcagtgagtagattttttctatatacattgtcaattccttcaatagtgaaaataaatcttgtcgtttttcagacgaaaaatcttatcttttcgtacgattttatgcaataaaagattcttattttttttccccttacttattctctcagattacgtagatttgtagaaaacgatgagttacagaaagagacaaagattgtgatgtttcttcatcctctgttttcgaaggtaaaaggtaattagtatgacgagctggtaaaactaaacaaatgactccttcattcacatggttgagactgtaataagtataaaaacaaaatctttgatatatgagtttatcttacttatgaagtaaaaaaaaaaaaaaaaaaaaaacacagaggatttcgaacactcttctctatctatttcctcttgcaaaaacaaaccctactttttgctcaaaatcctcttccttatttcaactctcatgtttacatctacaaaaactcccgaacaaactcaaagttttgagcatatataacataagttggtaaagattatatcattcactatgcagactttcaaagctcaagatccaacacttgtctcttcttctttgtttcatcatttctacagctactacgtccatcagacttctcctcctcttcatcctcctcctcctcatcttcctctgagctatgaccaacattactactgaacaaccctcttgcaacaagtgggctttgtggcgaatccgacctcgacaaacttattaagctctgcgattctctctctaacacacctggctgatccgacgatgacaaagtctttgtcggatgcagcggatgcttacggatatgcattctatatttctgcaataacaatttcatttcaccgcactgtcaaaatcattcattcatccacacatcaaagtttaagttactgtaaaagatgagaacttttacttgtaaatggctcttgacttcatcattggttaaaccatcaactttcatcaaatctctaatctgctttggtgtagcaactgtctcacaacaacaacaacaacaacaacaacaacaatacaaaacaatctcagtataatcaatcaatcaaatctaaagcaaagtttgatcctttactaaggttaaggactaaccttgtggccctccaagcctatgaagagcatcaacaaatttacggtgaagttcctgtgaccatctccttctctgctctttcttctgaatgtgatgactctgtgaagaaggtttattgaattgatgatgatgatgactctgctcaattctgctataatccatcatcatctctgatgttggagtcatgagagacagaggagctggtggtggaggaggtgggggacggttaaatggcataaatacccctccttgattagggtaattacatgtctgaaatgggttctgactcacacaccgatcttcttcttcttcatttgtctgtcaaaacatgatcataaggtcaacaagatcaatcacacaacatatgattcttcacaaaacataaaaagggttgctttttgatcgtaccgatcggaattgggaattagggttcgagatccataactgggcagagctcatccagctcttcttatcagtttccggttttgccctttcaacatcatcgaatttcccattagatgccatcagtgataacccttttctagcctcatccttcaacgccccaatcgctacacagagaaaaacaatctctttaaacaaaaacacgaatcgattagagaagataaaaaaaagaaaaggagagaattttaataaaagataccttcgttcaataagagcatgcataaagggagttctcgtttaaaaacatcgattttgttcctttcttcctctaattttccgacataaccatcgatttcagacagtttggaatgattgtctttgatcctcgacacttcatcgagaaattgagataagggttttggtaaagagtagatagacaaattcagattaagacccatcctttgatcggtttctgtttgaaccatcggacaagataaagacaaagagaagcaagcttaaagaggtatatatagaagaagatgatgaagatgctgaagaagataaatgagaacaaaaaaaaaatgagattagggaagaagaagaaggacgcggtgaaccgtagccgctgtaaataagtggagacttgagggtgtttttgtcaatattaaaattagatttatctttaaatggaagaaagaatctttttgtgatgcccgtacacacgcggcgaatcgttacactcacttatatatatttattcttctctttttttatatttttctttaaggatttttttccttttaattcggctattaattatattacaattttcagttttgggaaacttgttatttattttgtttttagtgctcttctcattcaagattctcatattcctgttatcctgtatttaatattttcccaaattagtcttaaaaagaggattctgaagaatctataatattttacaaacactattttctgcatatggagtggttcaggctgtgaaatatcccactaaaatatttattaaagataatataaaaagaatctgttgaaagactaaaaataaaataaagcaactcaattattggataaaaaattaaaaataaggaattaacaaaatcaaactataactaagaaagatcaaatttatttgtacaaaattaacaattttctacttttttaaagaaaaatcaaattttattttcctactttaacaattaaaagtagataagttacacttttttggagtaaaaaattacgtttgaaataaagaagatttagactacaacaaatattgactttttataacctaaatgttatgagcttgaaagttatacatttatagtcaacatgatatgagattaaatgttgaatataaaaaaggtatgtaccacatagtacatgtagcacatcgtcagaaataactttgctagaccaacaataccgaatgggcataaccgtgtatggcctatgggctatggattcatgtatttgttattgtatctcaaacacagagctatactgaaatctcggtttcatggaattcgaaccactcgtttaaaaaccgataaaacattcaaactatacaatcgggtttaattaaacgatgttcttagataggcaaaaccacatgtacgtttatgcaagtagtacgatacataaattcgtacttcagtttgtactactatcatataactagactaaattagtagagccgtataaataattaatctttactagtataggacatattcgctttagtttatcttttcgaatagaaaaattatactaaattttgctaaattttactaaaaaattatactaaacattttacccggaaaaaaattatactaaattttgctaacacaagctactagctgtattagaaatcgacacatacgtatgtgattttaaaagagtgaagtggtcaaaagatctctttgtcttttctttatttttaccacacgcaacgtccatttacattcacggtgagcattagtttcaagaaatcacgtaacctttgtgtttataagtgcccttttcatggtttagttggttttggttatcgtattatgaatatttttgttcatttcagtgttgatattcttttcaagaaactaggttgatcattcttatgtagcaccattatttcttgcaaattattccactactcatccattttttttactaatcaaaacttatatcgttcaaaaggtgaattatacttaatattattatatgaaataaaactcaagaattctctagcaaaatgagaaaaaaggatctttcgcataatccaatgtaaaagatcccagtacgcaaagctactttattccatgctttttcctgctagccaaatacaaatttctttcaattttaaaatagcattcaattttttcaaaataacatttgattcctctaacaaaaagatattccgaaacacagtagcatgtaaaatgcctaggacctataaacaataaagaccacaaggaatctaacggacggaccaaaagaaacggctcactgttagccaactataccaggacacgtgtccaactaatccagattctttatcatgagaatcgtttttttctttcaaggaggaactgaaacgtctcgactttgtttgtaataaagacgtcgagattttgatgccgttgattgattagattctcgatcgtgggttcgcgacacgtgtccctaactttttttgtattattgttcttaacaaacgatggcttttgctctgtctagctaatttgaggataaggttcttcttcgtttctatctgccagaatccaatgatgtctttggttaatctaagtaagaatcccatgggttgattatttggttttcgtttcagtcatataatttcgaaattttagaattttataatatttgtcatcaataatagaattttactagattttaatctgcggcgtactgcggaacaatttatttttaaagttagtatatataaatatttgtaaattgtatctatttataaaatatttttattttataatttacagttgttattaaataacgttatgccaaactcttcatgccaaacccgtctcgtaaaaaaacccattgattttattaatgttgatcttatttatgatatgtttacgaatcattgtctaaatattttagtcgatgcgggacgttgaacccacacattttttgccaattggttaatatatgtttatttttaaaatttcgaatcacaaaatataagggaaaaaatttgaattttttttaaactctatatattatataatgatgttaaaaaattgtgacatattaaactttttataagtttaaatattgataatgttttattaagtttaaatatataaataattatatttaaaaagttaatatttgttacctttaaggtaatgacacaataaatctaaaagtaaggatttagaagatttagaagatttagatctttaattaaatattttcattcctaaataattaatgtcagtaacatgacattgtaaataagttcaaatacatgatttatttatttaaacaaaaacttttagtaagaataatatttatttaaacaaaaaattttgttttaaatattgttaacaaatatgtttatgctaattttaagggattgatgtgaagtttgtttggattaaatttgattgataatgtgattgacaatttaaattaagaatgtaaagtaaaattaattagtttggaaaaaagatttaatgctaatggcattgagttgtaaataagttcaagtctaggatttatttgctaaaatagctccaaaaatatatatgtagatagttcaacttttacttgaaaatgagtcacttatatttcaacagaaatttcgaactaaactcttggatcaatttttttgaaaaaaccaatcaaaattgtgaatgattatctatacatatatattctaatcgaataatgtatctgtagatatttattggtgatttggcaaacaatggatgtttatagtttcaaagattctttcattctctacaactaaaaggttgaatgtttggatggtcttagttttatcttgtaaaaagatgaataatgaaataagatgctgttttctagtgacaaacaaggaacaaagcgtgattccattttaaaataaaataatgattcagcaaaaaattaaatataatgttgggtacgacaaaaacaaaatctatataatgttggatttatatttctcttaatgagagatagaacaacaaatccgatgtcgtccagcggttaggatatctggctttcacccaggagacccgggttcgattcccggcatcggagcttttttgtttttacttttgattttttacaaagattgtggaaccttcgaagtcaggtagagggtttcttaagagtaaagcaatcggtggatttcttatgttgccgccgacgagatctttgaatttgaactctttttgttttggtgaagaagatgaatcattcaaatgcgagaaagttaactactctccatggatttatattaaagagaaatctatcatcttttcacgcctcactgaagcggttttcagataaaaagttcttcaatccgaaccatgaggacggtggtgttgtggtggagcgattatgtagagctaatagatttggtgaagccattgatgtattatgtggacagaagctcttaagagaagctgttcaacttctgggtcgggctaagaagccacctgcttctacttattgcaatctcattcaagtttgtagccaaacacgtgctcttgaagaaggtaagaaggtccatgaacacattaggacttctgggtttgtacctgggattgttatatggaaccgtcttttgagaatgtatgcgaaatgtggtagcttggttgatgcacggaaggtgttcgacgaaatgccgaatagagatttgtgttcgtggaatgtaatggttaatgggtatgcggaggttgggttgcttgaggaagcgaggaagttgtttgatgaaatgactgaaaaagatagttattcgtggacggctatggttacgggttatgttaagaaggatcagcctgaagaggcattggtgttgtatagtttgatgcaacgggtaccgaattcaagaccaaacatttttacagtttctattgcagtagctgctgctgctgcggttaaatgtatccgtagagggaaagagattcatgggcatatcgttcgagctggtttggattcagatgaagtgctttggagttcattgatggatatgtatggaaaatgtggctgtatcgatgaagcaagaaacatatttgataagattgttgagaaagatgttgtctcgtggacatcaatgatagatagatatttcaagtctagtagatggcgggaagggttttctttgttttccgagttggtaggttcttgtgaacggcccaatgaatacacttttgctggagtcttgaatgcttgtgctgatctcacaacagaagagctagggaagcaagttcatggatatatgacaagagttgggtttgatccttactcttttgcatcaagctctcttgtagatatgtacaccaaatgtggaaatattgaaagtgcaaaacacgttgtcgatggatgtcctaaacccgatttagtttcttggacttctttgatcggagggtgtgctcagaatgggcaacctgatgaagccttgaaatatttcgacttgctcctcaaatccggcactaaacctgaccatgttacctttgtaaacgtcctctccgcttgtactcatgccggattggtcgaaaaaggactcgaattcttctattctataactgagaaacacaggttatctcatacttctgatcattacacttgtcttgttgatcttttagctcggtctggaagattcgaacagttaaagagcgtcattagtgaaatgccgatgaaaccgagtaagtttctgtgggcttctgtgctcggtgggtgtagcacttacggaaacattgacctagcagaggaagcggctcaagaactgttcaagatagaacccgaaaatcctgttacttatgttacaatggctaacatctatgctgcagcaggtaaatgggaggaagaagggaaaatgagaaagagaatgcaagaaatcggagtcaccaaaaggcctggttcaagctggaccgagataaaacggaagcgtcatgtattcatagcagcggatacttcgcatccaatgtataaccaaatagttgagttcttgagggaattgaggaagaagatgaaagaagaagggtatgttccggctacgagtcttgtattgcacgatgtagaagatgaacaaaaagaagagaatcttgtgtatcatagcgagaaacttgctgttgcatttgcaattctatcgacagaagaaggaacggcgattaaggtgtttaagaacttgaggtcttgtgtggattgtcacggtgctattaagttcatatcgaacatcacaaagaggaagataaccgtaagggactctactcggtttcattgctttgagaatggacaatgttcttgtggagattattggtaacgataaaaactatttgtgatacatccactttaagccactatgatttatttctactacaattgcaaattagtcactgagtcataggaattgtacattgtttaaagagttttgttttgtagaaccttaatgtacataaaatcaacatttgagagattaaggaataaaggcatgaaacttcttaaactccaaattaaaaggatgaatccattaatggctctgaaatcgatttgctagtttcaagacaagcttcgtaagatgaggacggaggaagcatacatacacatgcatgttagtacacattttacgtataaatacattttatgtcatataaatacattaggatatacagattcacatgatacaagcgagcttaattagtgataaagaattcatgtgtgattaatttgagtttctttctgttcccaatatgtgatctcttctagggatgcatcaccttgtttctcatggtttggagtaaatatcatttggtttgacttcacttacttttaactttagtttacaaaaactagttaatgctaattggaatcttgtgaggtataacttagaagcacactccttatgttttagttagtttaagaaatcaattatgtgctcgtgattgttggttttcttaattatagattctattgccatacaccaaattttaaagtcaacctatatatttatactattttacgtatgagggaacaaagaatttaatcatagatcaagatctacttttctatactgatttattttattttaatgtattttggaacttccatagtcaaatctgaaaaaattgtgtgcactactaccaagtcatttgctaccttactaatactaagtcaccctatcaacctagttctgatttttaaaaaatctaaacttgaattgcatatataagctattagtgtatagatcaactactggatcaataacacttctacaacacacattattgtatttaagaatataaattttgtattgcatgggtttatttttctcttcttttgactaattaaacgtttggttataatagtgaccgacactacttagtagggccaaatataactaatactcttgccgacaaagaaaaacttggtaatttgagaaattatagtagtacacacacatatataattacaaatctcatcatgtctactaaatcgcgtaaaatttaaattaaaaagttgtcaaggcaagcattttgcatgaagtacgccgcaaaagagcaattgaggcttttttgtgatgcatggggattcacgtcgtcctcgctgacaaaacttaataatatactaaaacacttacttagtcccatctctagcttcgtacatgtatataagatcgtcctgaggtggaacccataacacatacaaacaagtctaattcttgatcttgaatcttgtattaagagagatcaagattatatattctattcgtcttacaaaaatgaaacagaccaatctcctggtatgtaaattattcataggagccctgttttggttaggctctgttttggttaatgcagaagacccatatatgttctacacttggactgttacttatggtacaagatctcctttaggtgttcctcaacaggtatgaatacatacactctttgctctttttaagtatgttaattgtcgttatgaaatttttgatattatatactttggtacgaacgatgtaggtcattcttatcaatggacagttccctggtccagcgattgaagcggtcacaaacaacaacattgttgttaatctcattaacaagctggacgagccattcctcatcacctggtatgtaactatataactgattgtatttgtgcgcttagacaaatatgaaaaaaaacctttaacacggttttgtaatatatgtgtaggaatggagtgaagcagaggaggacatcgtggcaagatggagtattgggaacaaactgtccgatccaaccaaactcgaactggacttaccagtttcaacttaaagatcaaatcggtacttacacttacttcgcttccacgtcactgcaccgagccagtggtgcttttggtgctctcaacattaaccagagatctgttattacgactccttatccaacacccgatggagatttcaccctcctcgtctctgactggttctcaaatatgacccacaaggtacataccagtacaaagcctagatatacactcaagatcgtttcaaaagtcctatgtgaatgaataaaaagcaaatttgatgtttttaaaaaagtaaggatttggtttatatgttttcaaatgtttttctttaactattcttgtgatctctaggacttgcgaaaatcgctcgacgcaggctctgctcttcctcttcctgatgctcttctcatcaatggagtctctaaaggtttaatctttaccggtcaacaaggtaatgtcatcataacaaatctttaatattacatcgtgcatggtcttgttctagtctttgatatgtctttaatttcattgtctatcttcaggtaaaacatacaagttccgggtatccaatgtcggtatagctacatcgataaattttaggattcaaaatcacacaatgagcctcattgaagtagaaggcgctcacactcttcaggagagttatgagtcgcttgacgtccacgttggtcagtccatgaccgtcctggtcactttaaaagcttctgtgagggactatttcatcgtggcctcaacccggtttacaaaaccggtactaaccacaaccgcgagtctccgttaccaaggctccaaaaacgctgcatatgggcctctccccattggtcctacttaccatatccattggtccatgaaacaagcaagaaccattaggtattaataccaaaccgaacataaccgaactaaatcgaaccgtacaagtctagattggttctgcttaatttgactttaactttttctgattcttaggatgaatttgacggcaaatgctgcaaggccaaacccacaaggatcatttcattacgggaccataccaataaaccgaactctagtcctagccaatgcagccacattgatctacgggaagcttcggtacacagtaaaccgaatatcatacatcaacccaacaacaccattgaaactcgctgattggtacaacatctcgggcgtgttcgatttcaagacaatcattagcactccaacaaccggaccggctcatattggtacatcggttatcgacgttgaacttcatgagttcgtcgaaatcgttttccaaaacgacgaaagatcaattcaatcttggcacatggacggtactagcgcctatgctgtcgggtaagcaaacacattgccctctgttatctaaaccggttccggttattcataacttaaaccgtacgtaattgattaccttttacagatacgggtcagggacatggaacgtgaccatgaggaaacgttacaacttggttgatgctgttccaagacacacttttcaggtaataatcttatttagaaacaatatgattgaatctaaatatctaataagtaatcaacgatgattgtgtgtatgaaggtgtatccgttatcgtggacaaccatattggtgtcgttggataacaaaggaatgtggaatctaaggtcacaaatatggtcgaggaggtatttaggacaagagctctatgttcgtgtttggaacgatgagaagtctctctacactgaagctgagcctcctcttaacgttctttattgcggcaaagccaaacgtcccctttagatttatcattgttatcttttctactgaattaggtcacaattacgtggagtggaacaaaaaatacaaacgtagtccaaacggaaagctaattgatttttcaataaagagacaaaataaaaatgaaggaaaaaactttcttttgtcttatgatttgattctgtttttttttttttgctctcttaaattcagattgtgttcatgtatctaaagcagaattggaaaccaaaatttggatactagaattgtcagtttgacataaaattttatgtaaatgaattgaaaccaatcctaagcagtcatcacttatcaatatgctttttcaaataattttgcaaaatgtcatagatttttatgtgtgtaattcaaaccatagaaatttatttgaaaatataatattaaaatctttatctttatctcaagttattttcccaatctcatcaatcaaatcacccacttcagtggacaataatctttaatatttcattaatcattgatatctttctcattttcacatttgagaaaaacgttttgtcggtaaaagaaaatgtatcattgaaaattctaaaaatagatataatggagagagagatccacctcaagattatcgccacaaaacagagtagttgactgatatcgattgtgagatttcaaagcgataacgtggagaccccctcaccattataataaatcatcatatcgtcactttagccacatcacataccaaaaaaaggcaaaacactcacgaaagaagaaacggagaggatgaagcattatgtgctagttcacggaggctgccacggtgcgtggtgttggtacaaggtgaagccgatgcttgaacattccggccaccgtgtcacggtttttgatcttacggcgcatggtgtgaacatgagcagagtagaagatattcagactttggaggatttcgctaagccgttgcttgaggttcttgagtcttttggctcggatgataaagtagtcctcgtcgcgcatagcctcggtggaataccggctgctcttgcagccgacatgtttcctagtaaaatctctgttgctgtcttcgttacttcttttatgcccgacacaacgaatccaccttcttacgtgttcgaaaaggtacatcaagttattagggttcctttccttagttataaacatgatgattaatttgaaatgtgttgatcaaaaacgaattttgagagtcttttttaagttatttacctcatgtttttggttttgtacatgaaatcaaagatcataaggagacgtatgatacaatattgtttttaattctgagtcattttgatctttaagatgtgattgaaaacgcagtttctcggaagcattacagaagaagaacgtatggacttcgagttagggagctatggaacagatgaccatccactaaagactgcttttcttggacctaactacttgaagaatatgtatctactttctcctatcgaagtaagactcaagaaaatgctctgtttcttacaaaacctaattggggactttgtttttgatgaattgtttgttttgctgattgttaggattatgaattggccaaaatgttgatgagagtcacaccggctattactagtaatctgacggggactaaaagcttaacggcacaaggatatggatcgattagtcgtgtgtatatcgtatgcggagaagataagggtatacgtgtagatttccaacgatggatgattgagaactctccggttaaagaagtgatggagatcaaagatgcagatcatatgcctatgttttccaagcctcatgaactctgtgatcgtcttctaaagattgctgataaatatccctaagcaagaatatctatgacaatatcaataattttcatgggaataagtttttttattgttctgttcacaaaatatgtggaaaaaaaaaaagacaacaatagaatttacgcacgaggtaatatctaatggtccaaaataattggagagtgacactgacagttcaatgagaaactgtctcaccataaatgaaaaacaacaaaacaaccacaacattagaagaaagcaaaaagacaaatatcaatcaattgagaaagagaacatgaaacattatgttcttgttcacggcggttgccacggcgcatggtgctggtacaaggtcaaaccggtgctggaagcttcaggccaccgtgtaaccgttgttgatcttacggcttctggtgtgaacatgagcaaagtggaagagattcagactttggcggattacgctaagccgttgcttgaagttctcgagtcgtttggttcagaggataaggttatcctcgttgcacatagcctcggagggatatcagttggtcttgcagctgacatgtttcctagtaagatctctgttgctgtcttcataacctctttcatgcctgatacaacgaatccacacctttttatgttttcgaaaaggtacatcaaaaactgattatttggctattacacggattatccaattaagattctgacttgcgagtttaatggcagtttcgtgggagcgttgtggagtttgagacatatgggacacatgatcgtcctctaaccactattcttcttggaactagtgtacttagccaagaagatgtatcaactttctccagtcgaagaattagtagtagcaaacttcagctttcaactaccatgataggcaaagatgtttcatcggggtgactattttttatatgaataagattcctgtaaaaaaaacactcatttctacaacaatagcattgtcaagatgagataattttttttttttttttttttttttttgtcaagggtcaagatgagataataagatagtgcttttaagaacattcaatcatcaattcaatgaataacgccacaaatacaaactggtgcataagagaatacggatctgcttcgaacttgcaccgaagtcgacttcaccaactgaagacgatgaactcaagccatgtacacgatgcgatgttgcaggctgagggatgacacttgacaggctgagggatgaaacttgagatatcccatgtctaacggcgtgtagttcgagattttggccttgaagatttctgcaatgggagagaaaaaagaagttcaggtttagacaatattccaaggacataactgaaggatgcacgcattgaatgcaattgttagattggggcgtaatgatctaccaaaatatatctgatgaaaatgagagttttaaaccgaaaaaggtacttactgtcatagaaccaaagctggctcctgatcctggtgtagcacctaaggggtcacatataacagaacttaattatgacaagaacaaattaacaaatagcagaactcaagattgcgccaagaacaaatcctgatatcaactctacctatatcaaatgagaattagggaaacagacaatgaatatgtacctccaaactgtgaaggcatagtaagtgatggagttgtctggccaaacaaagattgagtagaaccaaatgtagaagccggggaagacccaaaaagtggcgtctgtgtgggagtcggggatggtccaaacaaagacgaggtaggagcagtagaagatggtgtagcaaagagagaagacgaaggtccagaagcaggtgtgttgagaaacgaaaaaccagctcctgaagaagggtttgatgttggaacagatgtctgtggaggatttgaacccccaggagtagctgagctggcaatcaacccagcaacctgtgttgagggttgtgtacttgtagtagaagcaggaagatgcagagttgggtggacccttttagcagctgcttcctgctttgctgtctcccttcgatcagcctcaagaaacggatcatggcattctcctcttcggcgctggtcagcaagatacgatgttctcattgattcaatatattggtgaatactctctacctgaacaaaacaaattgaaaccaatataaggttacacagagttcaaaaagggtttccacattgaatgctagtagaaagaatcattatgcggtataccttagcagccacatgaacaaagaagtcatgaacattagacatgactttcggaagagattctaaaagagaagcatgtcgactatacttgtcagaatccaaggcgagcaattgctccagctcttcaacccattgacgacactcgttaagatacttctcaaaccttacaactgtctgcagtagaaaagctgttggtttcttcggaatcccacggtaaaaatcagaaacttgaactgttgtagtaacagcttgttgttgaccagaagaagctggagctggattagttccttgcccctgagatggttgagaaccaacactaacaactcctcctccttgtttccaatgaggaaatcttggctgtagcatcataaaagaccgaactgcaatctccgcattacgcagcatatctttggcaacaatcataagctcatgcaaaacagctttttgtcggtccatggcagtattaattccaccaagctcctacacaagttaacaaacaaagctctttatacaaacttgagctaaccagaacattcctctaggaaacaataaaacgatatactccacaaacctgaacaatgcggctagcatcaaactcaaacccttcactggatacagaagaatcataaagtcgactacactgatctaatctctgactttcacttctatgctccaatatcttctctctacagataacacaaagaatcaataaccatcaacggcatcaaaaagattctaaatttattgattctttaagatttcaaaatctgaacaagaacaattcaacaaaataacagtaagcactaaagcaaagcctatggagaaaaaggaaacgaatttaggcgtttaagtaaaagcatactcaatctgaagcaagagtttctgagaatcgggatgaagatcggcccacttagtactgtaattcgccggagctttatcgttggtgaacaaatacaactgttgttgtacttgctgctgctgttgctgatttagctgttgctgctgctgctggaactgttgcggctgaaacaacgacgtttgctgttgttgctgcggttgcgagaagatggaattggtttgctgtggttgcgattgcgagaagatggaattggtttgctgcggctgcgattgcgagaagatggaattggtttgctgcggctgaaacaacgacgtttgctgagtttgaaacagcggctgaggcgtctgttgttgctgtgggggaaaaaacgacattgctggatataaccgacggagaatcaaatctagggtttctatcgccggcgacgatttggaagttgagcaaaaaaattcaaaagccccctctcgttaaaactttaaacacagataaattgatatttaattagctttctttcacattttaacaaatttggagggctcttttgcaaacaatacattatcagttttgtcttaataaaggatttcggtttgattggaccaaaattcatataaagcttggtcgtggtttatatacaacatggttaatttgatttggctaagaaaatttattctagtttcatacgttatataatgaatctttgggtggacatgaagacagtaacaaataatgacatgaataacaagggtcttatttaaagacatgaaacttaaaaacaaggtttcttcagcttaatatggtgaaagggaaaagacatttatcagccggggaaatttctcattgggtcctcgtggtgaactctcttcattctgtaagcttccatctcctcggaggtcacatcgttggtgtaattgacattgtatttgcgtttcctctcatctttttcttccctcctacttagatcctcctgcacacaaacaacaacacgtcagataaaccttgcagggcagagaaacaagagtcttggcaagagaaaatatgaactgaaactgtggcgtctttcttacctttttaagagcatttgcaagtgcctcctcgttcaattccaaatcttcaggaatatcagttccccatgtcgccattttcttctcttcaaccttcttcggactctctgatcaccaaaatacaaaccaatgttacaaaacatattccgaaatgttacaatacaatgagaacaaataagagactagaagaacaaacagagtcaacaacacaaacctttagaagcttctttgcgagcaatattagccttcatcagatcaatggacgcctctgcagcttcaattccagcagaacctgtgcaatagctgttgcgaattgtctgctggcaacatttatatccccattggtgatctttccaccatgatccccaaacacttgtgtgattgttagcatgaacatcttcttcatatttgctctttggaattatcacctcctgtacacaataaacaacacgtattaagcaaacttatctcaagctgttcatatcgcaacagctatcactcgactcaagaaagaaccatcaaaaactatacctgtcccttcataatcctccctgccctgtcatactcaatttgtctttcactttggccaagcaaaagctccatcggaatttcaccttctgtagctgcattcccatacttttccataatggtgtcctttgtctgagttttcagtttttcctttgcaactttaaagttcttatagagcaattcagcttgggatggagccgcttgcatatgcatgtcatgtcccttgtcaaatgcttcacatgaatggatgtttatctgtttgaactccagagcttggccactgtttctatattgattatctccctggatagatgataagaagaaaaaaaaagttagtattctcatatcatcaaaatataagatacaactacatgattcacgatgatcacaaactaaccaaatagaatttttcatttggatctgcatctggaagtggatcttcacgcatggaccgagttttagggtcataatgagctgagtttacatcaagattcaacaggtatttagcagtgtcttctctgatacgcagattcctgaaattaagaaaaggtaacaccattagtgcatcaagtagaaacaccaatttaaacttatgttatcatgtttgatgaagagtagtccatacctaacagttcctgtgctaccaccaccagttgttcgaacacgtttctcaacctttgcaaaatccatttgcctactctcatcaaccttagcttcatcgaccctcaagtcgtcaaggtcttcctccccatcactggttgcatcatcaccgttttcattattgttcttctcctctagtttcttaagttgctgctccttgagatacttctttcgtgcctcctctttagcatcataacgatctaccacatgacggtaggttgaagtatcataaccgttccatctgtccctcttcccatcatagtcaagttcaaaactctcgattttctcatcagcagcaatgttcatgtttgtgtatttagctccaatcttacgaggtctatccatacatgctttagaactgtgagtcattgcaccacagtttatacacgctcccttgcggtattgttcagcttgatagatctttttacctctatcataccatatctttttgggttcgggttcaattttccaatttttttgatgcttcaaactctgtacaaaaaaaaatcacagagtatgagtgtgaatgttctcaaccaagacaatgcagagaagcaagagaaagaagaattttcgcatataccggctgttcagacttgagataccatggagcttttgacatatactcaggtatgtgaggattgatttctttgccatcttcgtctacctcagcaggagcgagaccagctttacgagcttcctctaattctaatttcttcctgtgatcttccctagacttaaaagcaactgcagatcccatagaaaacatatatcagaacaacattcaaacattaaaaataaaatcaattttgccagaatttagccaaaatgaatctagccaatagcaaaactagtaaaaaccctaatttactaatatatagatttaaagaaagaagaagatatcagaagcgagattcttaatcatcaacgggaattaacagagaaatcgagaattaggttaaagtattagaagaagaaattgaaggaatcatggtacctgaagccgtcgccatgattgttacgatcgttaagcttcgagtagaggaaaaaaaaaagtgcgaataaagaagctaataagacctaagatctaaatatattaatgcgtaatctccaggaaggaatggaaagataaagaatggcggcttattcttcttcgtagtacaatttgggattttttatgggccgttattaaagcctaaaggccctttaagaaaaataaatttacagatgtatgatagataataaatatgatttccatttgacaaaccaatcaacgttttcattagttggcaaattaagcacatttacctaaaaaggtgaaaaatgttttgaattttaaaaagagtaaaaaaaccagaccgttgctgttccgcttcactcacttaaaaagttaaaaaaaaatctttcatttcttcttcttatccagagatccaaagagagaaagagggaaagattggaactttgaatccaaaatcagttcatcaatctctcacaatgcctgtggtgagaacgagagcgaaatgttcgattcccgtcacaaaccctaatccaacagtcggaggaggaaactcaaacgtctcgatctacgagaaatgcagagaagacaggatcaaggagaatcttcagaggatgaagaatctcggaatcatggatctctctctcaaactcaaatccgagatccgacccgccaaaaggcgttacggtaactctaatgccaatccgggtcgagaaacatctcctattcagctttccgtctcctctagacgatcctcaaggtaatctcttcgttttcagtcactgacttctctcgattttgttcacattgcttcaatcttccaaaattaggggttttagagaaatctagggtttttagagaaatcatttcgctgttttataatcagattgaagcaggagccgccagtttctcggagatcctcgaggtaatctcttcgtattcaatctctgtggttctcgtttcgttctttggattctgttcaaaatcaagggtttaacaggaagctaggatttttaatagaaagtaatgatttttattgccttctctgttgtggtctttagattgaagaacgctacaccagtttcctacgcagaggaacctgaactgaagaagggtaaagtgtctaaagaagagattgttttgtgggtaggagaaggcgtaaggccagagatttacactgaggagcatgagaaactgttaggtaacacagaacgaacttgggagctttttgttgatggttgtgacaaaaatgggaaacggatttatgaccctgttagaggaaagtgttgccaccagtgcaggtttgtacacttggctttatctctgaagatgtagtttgattcggttaggattgaggctaatgtgtttaatggttactgtggattttacaggcagaagacgctaggttatcatacccaatgcagccagtgtaaccattctgttcgaggtcaattctgtggagattgtttatacatgaggtacattagcctccaaccttctttgtttctgtgtttttgagtaattccttttgtgagaatcaactgggaattgagtagcttgctttgctcagcaaaatgaggattggaactgaatgttttaggttatgttttggtgattgaacagatatggagaacatgttcttgaagctctggaaaatccggactggatttgtccagtctgtcgcgatatctgcaactgcagtttctgtcgtacaaaaaaagggtggctcccaactggtgcagcttacaggaaggtagctatttcgattagtatgatccatggtgaaaattctgattttgagtccttggatagattcaaaagttaatggctttccctttgaatttcttttgttctcagatacataaactcgggtataagtctgttgcacattatctgattcaaaccaaccaacagtcagaaacaagtgaggatgatgaaactgatgctcctgcagatagtcaagcttcagaaggagatcatctccttctcataactgatgggattcaggacaatcaaattgacgaaaatctcgatgatgatgatggctcaaacaagaatccggattcagctagaaagtcattatgcttcttgtcgtctgggaacaaccaaacttcagtgactgatggtgatctcaagccattagatgtgaaagaggtggatccagcaactcctgtgatcatcgatcttgaggctcagtgcagtgaaactgagaggatggctaactctgcaaacaaagagaaccgagaaacaagaagcaagcgaaagatgtctgctgaaccaaacccaaatagtattggtggaagactgagacagcgtcgtaagattcaagcttgagtgagagaagaagtttcagaagagaaactatgcttttgctgcatgtacgtactctaaggctaaacaaatggaagatcttttttttcttttccatttttctatcggagtaggcatggatcatgtaagaacttgacggcttttcaaattttgtgttttgttgctgttggtgatctgatgtaatggattccagttgaacggttaaagaatttgcctaaaccaaaaccaaaccgatctgaaaatcgagtcaatctttctacacctcaagattatttggttttatcttttcaatatccaaaaagcctaatcgagaaagaaatttgtggatgaaattagtcaatttctttgaattagttttacactttaatgtatgcaaaatttgtgttacatgactacatcaaccttcaggtacaaagtaactaaagtactttttgtttccgtcatttaatttaaaatccctctttacacttttaactatattctggaatctctaatgcttaacttcaaactaatacaactttgcaatttgcattgtattcgattatacttaaaccacaattcaaatttgaaattttaggagctatacctttactactcgtacggtaccactgtaccacaatgatatgactcgagtaattctcaagttatatgaaaatatgtatatttaaaatcttaaaagtaaattattcgttgagacatatgagtacctttaatacaccagaataataattctagtttgtcgtccaataaacacaaaaaaggagaatgaaagcattacacatactttgactcattgaaaaggacaaagaatttaaaaccatacaaatacttgagtaactaaactaaaactattattcgattttaagtttcttctataagaaaagacagacagcattttattttaccaataacacattgtgttccatgcatattaaacaataccctctatcgatgaacttactatactactgcattaataaagatctctatcgtagttagtctgcatttcttttttttttaagtcaagactatccccaccaatgttgtggttggtcattgagtctaatggtgtgtaccaactaccaacctgtttttttttttttttttttttttttttttttttttttttaagttggccatattgtttccttaatgctgcaaaattgttatttatatatatattttttgttaatgctaccaaaataataatgttattgtgttttgtatatggactatggactatggagtccaaagtaggcaaaagtatccccacaacccaacattacatttatgtaggcatatatatttcgtctgtttcaaccaactgtctgatttagtattatttttactttattcatatagtaaacataaaatattaataaatatacaattgtatagtaaattattaaattagtgaaaagttttgaattatcatcttcctgtggacatcatttttttcttctcatcatttgttggactttggagaagagttaaagagaaatggtctttgatatatccttaaaaattccgcaatagcaagagttgactagttaatgcgtttctttcgggggacgataaaagaagacaaacattgtgttttcctctgccattttttttttgtcttgtattcagaataaaataaaataaatgtcaaatagtatatgctatgttaatattcccccttaatatgtctttttatgttatttgacttatttccaagttttttttcttctgtgttatttgacttaaaaaccttagccatataatagaatatgattagaggaattgaataattgataaccaccattaccatacattattgtattagctcatgaagaaccaccactttgcttctttctggatattgttgttaaagtcaatgcctttttcttcaacagtgtctaaagaagaagagagagaagccattgtagtagtaaatgaaatgagagattggtggtgaaaggggtcacctttgcttttttattcaaagacacttcctttaataaaattgattaaattgattgctcttatacataacttaagagagtggtttcttaatttctatgcaaaattttgggatctgtttttttttttcccttttgctttatttctttattaatttattttatttttcctttctctcctgagagagactctagactggtcctagggtttgagctccttttgactcttcttggattccttcttccttgtgtgtttttcttctttctcgtacttttgtttgttgaatttctgctccttttactttcttctccttcttcttccgtcaatttcgtttcttcactctcttgcctaaagctctaaactttttttttgttttctctcaaagtttccatttttgagctctctcttctttgatctgcttcaagttcttccctagttcgttacttctagggttttataatgagcttaaaaacaaacccttttcgccgaatctcctaaatcttttgttttttttgaaatgcatttctctctgtggaagcaaattcatcactgtgcttctctgatcttagacaagagtaagagcagcaggagaagaagagatgggtctgattcgtctctcaatgtcaagaaaaaagctgcactgattcggaaattgtatgaagataagctcagggaagctttagaagaagcttctgagaatggctcactcttcaaatcccaagacattgaccaagataatggagatggaagcttgggtcgttccagatccttagctagacttcacgcgcagcgtgagtttctacgcgccactgctttagcagctgaacgtattatcgaatcagaagactcaattcctgagctccgtgaagctttgaccaagtttctgagcatgtacccaaagtatcaagcttctgagaagattgatcagttaagatctgatgagtatagtcacttatcatcatcagcttctaaggtatgtcttgattactgtggatttggtctcttctcttatgttcagactctgcactattgggatacttgtacgtttagtctctctgagataactgccaatttgagtaaccatgcgctttacggtggagctgagagtggaactgtggaacatgatattaaaactaggattatggactatttgaacatccctgagaatgagtatggtcttgttttcacagttagtagaggctctgcttttagattgttagcggaatcttatccttttcagtcgaataagcggcttttgacaatgtttgatcacgagagccagtctgtgaattggatggcgcagacagcgagggagaaaggcgcaaaggcttataatgcttggtttaaatggcctactttgaagctttgttcgactgatttgaagaaacggttgtcttataagaagaggaagaagaaggattccgcggttgggttgtttgtgtttcctgctcagtctcgtgttacgggtactaagtattcttaccagtggatggctttagctcagcagaaccattggcatgtgttgcttgatgctggttctttaggtcccaaagatatggattcgcttggtttgtcattgttccggcctgagtttatcattacctcgttctaccgtgtatttggtcatgacccgacaggatttggttgcctgttgattaaaaaatcagttatgggaagccttcagagtcaatcagggaaaactggatcaggtatagtgaagatcacgcctgaatatccgttatatctcagtgattcagtagatggtcttgacggattggttggttttgaagatcacaatgacgataaaaccaaagaagctcatcgtccaggaactcagatgccagctttctcaggtgcatacacttcagcacaagtgagggatgtgtttgaaacagagctcctagaagataacatatcttctgatagagatggaactactagcaccacaatttttgaagaaacagaaagtgtttcggttggagaactcatgaaaagtccggtttttagtgaagatgagtcatccgacaattcgttttggattgatttgggtcaaagtcctcttggttctgatcagcataataagattgcatctccactgccaccaatttggttaaccaacaagagaaaacagaaacaacgacagtcgcctaaaccaataccgaagagttacagcagtccattgtatgatggtaacgacgtcctctcgtttgatgctgccgttatgtcagttacagagcacgggacaaactcgactccatcgcggaataggaggagctctagtaaccatctccatgttcaagagatacaggaagaaaactgtggtcatagctttgcaaatggcttgaaatcttccaacatttcatcagaaatcaaagagagtgctattagacgagaaacagaaggagaattcaggttattgggaggaagagatggtggtagaagcaggttgttgggtgtagaggatgaacatccgagcaaaggaagacgggtttcatttaacatggaacgtgttagtcatagcatagtagagcctggtgaagcttctctagctagcgtttatgatgaagattacattaacacgagtgatgttgaaaatggagatgatgagggtgcggatgatgaatgggataggagagacaccgaaaccgagattgtttgcagacatattgatcatgtgaatatgttaggtcttaataaaaccacaacaagactcaggtttctgattaactggcttgtgatatcgttactgcaactacaagtgcctgaatcaggaggcagacacatgaaccttgtgcagatttatgggccgaagatcaaatacgaaagaggtgccgcggttgcattcaatgtgagagataaaagcaaaggctttgttagtccagaaattgttcagagactcggtgatagagaaggtgtatctctcggcattggtatattgagtcacatacgtatagtggatgaaaaaccaagaaaccatagagctcggactaaagaagatagtgctttgcacttgcagaatgaagccgggaaaaatgggtttataagatttgaggttgttactgcttctcttagcttcttgacaaactttgaagatgtttacaagctttgggtattcgtcgccaagttcctaaaccctggtttcagcagagaaggttcgcttcctactgttgaagaagaagaagaagaagcagagaattcagagacgtgagttggtagtaaaaaagcacaaagctgtaatttttagagggtgacttggagaggctgacataacccatggcccatgatgcatcatcaagaatcaatgtggttcacacgcctgaacctttatacagtttggatcgctcccccggagatggaaaggggtatagaactgtgaattcagagatttggtatggcttgtaatctaaaagcagaacttattgatccaaagattcacaccttttggttaattctgattttgtttgtgtttttgttgttgtgagaaaacagtttctgaaattgtcagaaacttgtagcatttgttctttgtccctacaaaactgattcagatcaatatatacacttagattctatatacacatagtctactgtagcaagagataaactcagattcttcatgaacattctcctattgtttcttaatgatattggccttcacgttgatgtatttcataaagagttttgtgttgagagcgtttgaacaatattagtaataaataaatatctgatacatgtaggtagcagcagaagtagccaaaaaggctaactaaaacaaaaatgttatggaattgagcccacatgaaaattttacatcttaattttcactttctctgtcgctgtttcttggctaaagcagcaccggtggcaagtcggagagcttggccggagttcttgatgactgaagacgatctggggacttgcgctctcctcatcttcaagaaatctaacccggttttcaagcattctggtggtggaatctccttgtaaataaccgtttcgatcctgcacccaccagagagacttcagtaaagcaaatctgagagtgatcctaaaatatgtaagccaagaatagacgatcataccctgagcttttttgctttttctttcttgggagttcgtctatgatctcttcttcttcagaatctgactcagctttttgtctgtgaaatgtaacatatcaaccaatcttagacatactttctcgcttaaaagtgtttatgtatcaagaaataaggatataaagtatttaatacttttctcgctccgcaagaaagtctatgatgtctttggaaaggaatcccttgtttgcaagagcttcagagttttcctcaggttcttcttcttctactacatcctcaattatttcaatctttcgagattttcggagagttacttgctctgccataagcttgcgcctctctttcttctcacgggaaaccctacataagagaaaccaatctcattaaaaaaaaaccacacattccaaacttagagaccttctaaggaagctcatagatcaacaagtccacaaacaaaccttaggatcaaacaatagaacataatggcaacaaataaggttaatgttggagtgaagaatcgacaaaaaccaccactttgaaccaaggattacacatagctaacaacccttgcatagtttactaagttcaaagtaatcagatatacaaaatcaaagagagaatagtttatcttccttgataaactcctaattaacaaagctttaaacttttttaagtccttcaaaggcattcaaagcgaaccactaagaactaaacccataataatgataacagagctaaagagatgtgatgagagtgaagacaaacctattcttattctctctctgtattttccacagtgcttcctcttccagcttcgcctgaaacaaaacacatagcgccactaagcaaaaatgcgatttcgattgaatctttcaacaaacaggacgaatatattacttacctgctcctgggttaattcctccggagcatcggaatcggaatcacggtctttattatccgacatcgaatctgatttatcttcttcgccggtctagggttttcttctccgtccgttctagggtttaacggctcttcaaaattcccaaaaatcaccaccaccacgattataccgctatagaatcctctcttctaatcagagacttggtttgttccattttatgatgggctctcgttggcctttttacctcagcccattaactaaactaccatttttttttttttttttttttgtcttaactaaactaccattagatatatatttatacactttttttttttatgtcgaggaagtattttcaatttattttgtacatacaaaagcaaattattatatcaagccgaccaaaataaatatggtacgagacaagaatgccgagtacaaaaatagtaagagacaagaaaaaacaaatcagacaaaaaaaaaatggtgtagacatatacatatatagcattacaaataaaaatcaattgaatgaattttacatcactttatagtaaaagaacacaaccatataatctatatatactctcagccaaccaaaaaaaacaataacaaattgaactcatgcgctctactttactctctccccaacccaaatctatacagtgtttaacatttttttattcattgatgcaaaagcaatctgaaactgaagtcatatggtactacttgaaccaattccattagtgattctttgttctttctctccatacacttagttgcttcttctcttagtttatcaggtaactgaaggcaaacccaatccagtaacgattccaaatccttggcaaagtcgagtaagtaccaatctaatacctttggaagcattagtttgttgttctttgatatcccaactgatgcttgcagataatctctctttgcagcttctagctcttcctctacattagctgctgtgtagacccttacctgcagaagtttcacaatagagaagataccaaagttacttgaaagtttgcatctttgccaaattgtgtgtatatattgattttgatctcaacttacagcaggagaggaccagcttccacaggcgagagcgaatgtgaccaagggctctgaccattccaatccaaatgtgctatgagctctcatttcttcatgtgttgcagttttgggacaagtctttttttcaaaataagaagcagagagaaaaatgtataagaaccaaactttgattcaatggtgtatacagttcaaagaaatgaaggcacttacgaatttcaagtggtatggaagtctcaagatgaaatgttcgattgtgattgcatttagcgagtgtcctcccacaattattgttgcctgaaacaacaaagagaagatgaatatagttaaccaataaacatgttaaaccgaaaatattgtcagaatatggtttgaatctaaaccttctgcatcagcgctacaaccatttcaggagtcgccgggatcccgtgctccaagaatgcctacgaaggtaaattggaaacaagacatcagcaacgttttcacagacagttctctatctctatcatatcaagtaatcacacaagtctcacattcataacgcaggaattataagtatttatccagaatgcaagcttctgctggtggctaagaccgtctagattgacaacagaaagcttattaagcaggaacctggagatagatatagttacacaaaacatgagtttagagtattccatcattctaaaagttttcaaatcatctgtttaaatgagaaacttacttgagacgatggatcagaaatgaagcattgattcttcgtccaagatcaactgaagatgtatcgaccgacgaaaaatgcttgtatgcaccaagttctcttgttctccactctgagcagttattatatggatccaacacaatgtccttggacgagctaatcctcaagataatagtcacaagacatttcagtaaatcctctgaaactctgtttgctacatttccactttgcagtgtcttgtcttccgaagatgatcctgacacactctcttgagctttgtcctgatctgctaatctatcatctagctgaacaacagaaaaaccaaaaaggcgaaaactttcagaaaaattctatagattcatgcattagtgcaagcgtaaatgttgtaaatacctgcaatttggttgattctgagtgtttatccgctgcagcctccggcttaatcaaaggtttcttcttcttcacagatgtcaagaatctgccaagcttcttctcaggtgattctttatttttcttgtcttttgaagcattactagaggtctgattctctttccctctcacatctactggcttagtattagtaacactgcttagatttgatttaggcgacgcttgtttgccacttaccactctctgaccacttcggtcattaactgtttgatcagaggagaagagtttcctacttgagatgcttctgctaagagactgttgatgctttttagtgggagtgatcatagaattgaactcgtgttgcgacattgatttcgatctctggtgtttagtgcttctaacgggcgaattctcattcaaactgttgttattaggactctccagattcctctttgaagatatgtaaacagcttcttggtataaaccttgtctaaagtttacaacttgctcctctaaccgaaccacttcctcttcaagaacagctacttcagcaagaagctccaatgtcttatcaaaacccaaaaacagaaacaaatattaaaacacaaagaacaacaagttcgaaatacaaaagtcgagaatccagcattcggatcttacatgtcgagggaggtaagacggaagacgaggtaaagctcctaaaggtctagtaaaagctctctccaatgctctatgaacattctcctcctgtctcagcttcctcttaagcttatcaacctaatacaaacaacaacattcttaagactcaactcatcactaaatcatcaaatcatgaactcaaagaaagtgtcatcatacatcttgtagcaaatccattttcttttctttgttagctcgtcggcgattaaccagagattttcctgaattagcaacagctccattgccttgagactccatcttcttcttctcatcctttgcagatttcagaataccacgaaacatcattactcatatagaccaaaaaaacacactcacaaacagaatgaaggaaacagaactggagctaataataaagaaacaatagttgtgagcctttgatagtggaaaacaacacacacttccagaatgaggataagaattgagtatcgatcactttcactgtgaccatcactatggaataactattattcagaaaacaaaacaaaaaagcaaagatacggttggtaaatagtccaatgttgaagccaagaatcttaagaaatatctgaaatccaatttttatcaatctaaaggaacaaactttttatcagagactaagcataatccaccaagaaagatttccccaaagagaaaagcaatcaaaattgagttaataaaagtggaaaaagtgatatgagagagagagaaaaagaaagctacttgatgatgagtagtgtcatgctttgaaggagctttcatggaggaaagaacagctcgaacacttgtgttcatcgcgcttctctctctctctctgtctgtcttcaacttttgctttctctccactctaactgatataaacccaagagagagaaagagagacccatcaagataaaacataaaagaaaaacaaaacagaagtaaaaagaaagaaagatacagttacatgtataagtataaggacaattaagaacacttggaaaataaaaaagatttaaactttcctgagaaagagataatgggtgttgatagaaattaagtaccttgttgattctatgaagacagagcgggaaaacgtgaagttaaagcgaaccagaagcagaaaaaggctggcatgtgtgtttcattcaagcttatgtttcccaaagatccacaattttgattatatttaatccaatattttgtataggaagattactttggtcagataatctcgaacagagagcaatggaagaaaactacagaatctctctctcttattggagctgacgaagtagcagaaaacaacgtttaatcgccatttctgttatctctataattcaattttataaagtaatgtaaattggagattgaaaagtggaatgattatggatatcggagaagatgggagatctgagtgacgagcgctctttcgagctggagtagaattgtgagagatgaggacaacttttttctctccttttttttctatctttttattaattgtgatttggtatttagtggcttggtgctttcattttctctcaatcttttttgtcacttcttttatttttcaaaaattaatattactaattaattatgctcagaatgttattagagtaaaaattgtcccaaaatagtacaaaaatattgttattatatttagtaatatttttatgaagtatacacttttatacttcgaaattttaaaatagtatattaatccaattatgtgtgatcagttaattaatagatcaaaaaattaaaatatttttatatttttacaatgttattcgtatagttggtaagatttgaacgtgatttttttattaaaaaaaaaaaaaaaaagagagtttggtggtttccagcctttttgtttcgatatttctcatagtgagtgacaatatttcgtgcaatttagatggaaaatccaaaattattggtcactcactgctgttttatgttgttgttgttgtcaatggtaactactattcagtctactctaataatatcagttttaagctgtcattcgactattctatattaaataatttctagttgcaattctaaatctataattttgtgtatgaaaacacatcatatcaagtaaatcttacgtcttgttgattaggttaagtggctttatatatataaataaccaattgattagagaattgattagcgattatactaagcctaactagtactctagtagtaattgttgtgtaatcaattatgcaggctgtacttaaacagaagcgttttgcagagttaacttctgatacatttttcataaagcaaagataacgtgctaattaattatgatgctaaaggaaagaaaaaaattagagagaaaagttaaaactcgaaagatgctgacatctcactatagtcttaactttttaacatttgattttcatttctccttttttgctgtcaaatcgggtgatccacaataaaaaggaagtaattaattaagaaaataaaggtgaatattgatatgtttctcctatttacgtaacatgtttatatatgcacttattcaaatctactttctgtgtaatgaaatagattaattcgttttaatgaactaatgtcgtattttgtgtcaattaatgacgttattattaagttttataaaccgtagtataaacaaaactcataaaaaacaaaatcatgagaaaccagaaatagatggaacatgttgggtcctgagattaaaaaggaaactcattaaaagtagtaatgtcataccacggaaaaagggaaatatgaaaaaagtgattacaattattatatatcaacaatgacaaatttttgatatatgggagagatagttgcatattccgaggctaagcgtggtaatattataccatcaataatttgattatttaaatcaactaacatggcctcatatagtagtcttaattaatgaaatttaaaaaacaaacggtggattaggtaataaataaatgaatgggaattaaatgatactttggcagattctaataagcattagcacgtgacaaagctttagcaacatttgctttttactaactcatgctttgcgtttctctctagtggaccctttaaaacatgatctttgtattcatgactttagtacttagttacggaatacacctttcttccatgtcatttacattctagtgatacaaatttatttctttttatatcaaaagaatttcgaaatacttgattcataattacatagatgaaaacaaaacaacaactaatggcatatgcatgtattttttagctgtacttgtttatatattattggttctccatatattttatgcatgtaaattttcttacttgcaaatcaataatcttaaaatatattttctacttacatactattaaataaattgagatatctattatctcatatagaaacaaacttcggacgtgcatcattttaatcctaataaaagagagtgataataaaatgtaaggcatgcgtctctcaattcacatcattatttcctcttctttatttatttatatattttaaaaaccgtttgtatttgcctttaccaaggatgaaccttttgaattaattttgatttggtttctgaatatttttgtgattataaaaaaaaaaaactatttaagttcaaactcagtcagggtatgatgaattagaaaatttcatggtaacaaataatatatatttacttagcgttccattagttaagaaactaaaatatgttattagagaaaacttagaattacatttatgacatttcttatatttttaaatttataactataaagtctatgagaaggaaaaaaaaactagaaagtctatgatatattgcatcaatcataaataaatttgaacattccatctgaaatagagtacatagagaagtgcaaaattaatagcagaatcaacataatgggatctctcaatttctacaaacagaaacgaagacagtgcaatattaacctattacaataaataaatggtccatccaaagctgaagttaagtaacttccctcttgcttttcttttctttttttcgtttttttttttttactttcctttacttttgggctggacccagacactgtggtcccttataaagttgccccgtattgggcctggacttaacccggcgatcaaagaggtaacacgaattaatttttttagcaatgatcgcatttattaatataaaccataaaactagcgacataactttgtttgtatataaataaaataatactagtaatgattcacaaaataatttttaccattacaccacaaaaggtcgacgacatttatttcccaatatgtacagataaatcagaaaaaattggggagttttataatcattttacacaaaatttcttttgtcaatttcctactacgatggaccattctcagcttcgagtacatttctattaattcataaaagccaaaacaaccaaatatagatttgtttcttccataatcttttcgacgtgaaaaatattattctaaattatttatcgcaaatatgtttccttttactcttatatataaaccatgagctttttaaacccaaaatatgttagatatccatctctatttccaacgtcggattataagtccatgttttcatattttacatgataattcgactctagacaagttaggctggtgacattggactacttcactaccatgacaaagaaatatatcccataattttgaacaccactaagaagataatgtcatcaatatcttctgttgtcatttaattttccactcttaatgaaaatatattcaaaatacacaattacaaacaactttacaaactaatgttgaaaggttttaactcattaataactacccaaaccaaaaagggtactataaatatagttaatcatctaatagtttctccaaaattcttatacgatcatatatgatatctatagatagatgtaataaatatattagatgacacataattgtcacctctgatcatctagcctcttcccatcacatgccattaatggacctatgcggtgctgatagtaacgtataaccatgacgacgtctgagactcagaggatcttactctaacataattaaaaacataaacttgcactagtgaatttgtaatttcatataaggaaacattttggagcaataaacattatatccttttttcctttccctgtatattgccacatttatgcacataaaatcagctcatatccatcgatcggtccccaatttttcaatgattagtcaattttttcttccttttgataaccgctgtggtccaataagacaagtgaatagggtccatttagggctagcgtacgtggtacatcgcatgttcactatcacttatgagcgcatgcaagtgaaattacatgtcaaaaaaccttacgctatatataagtgtatatggtatctgtcaacattactatacaaaacaaatcttttatttttattgatcacatattttgtcaaaaagtatttgttttgtatcattaggcccaaagaatgtttttgtgtcagttttcttttcctaataaaacagaagaaataaacaataagattcaacttttcacagttaatacagtatttgtaaaaattctgaacaacagattttcaaaactacgacatttaaaattagaacgaagattaacacgcattagtgagtatcaaacgaattcaaaaacttatgtaaatataccaagaatatgtaattataattaactaaacatttttaatttttaaattaaaatgttaaatttcaatgctatttagaacattttggttatgattattaaaatcgtgacacgatggatagtaactaaatgaaagaacaaataggttgaaagctatagggaaataaataaatgaacggtttatagtaacatctttatcataaagctggactgtctcgttgtgatataaaacaacgaagataagtaaggagatttagtactgttgtcattcgccaacgtcaacttcactaatgatcactagtccttttagtttttagagagtttccatcagaatttgcaaacgtaattacaaatattgggccttaatttgaaacctacatagagggccgagtatttgatgaagcccaatcgtctaaagtcgaaaaacatgtaaatagtcaacacacagtgaaaatataaacatatgtaaatacgtttgtgatccaaattaaattacgatgataagatggaacaacagaagctaaccctgagatcatcttctatgacaggtgttacttagaactagtctggatagggagggagatatgtgtcctagaaacttcaaataattcaaactctattatcaaaaaaagtcagaaataaatatagtcttgaatcagttatgcagatctcgtttgttatgtttttggacagtcgacgaaagaactcctagttaattaatattatctattacaatatattctcgcaaaattaagcttatatgtgacagctagagctcagcgttgatattgcctccacacttacattatataattctaacgggaattatatacataaactataatcatgattagcacgaaatgtacgaagaaaagtctgaccaattagttttatcctacacgtgaagacttgaagttgatatgtattaccaatatatcatcaaattattgatataataataagttgttgtttggtcgagaaagcgtgcttgcatgctataatgctaattcatatttaaatgctttgttgctttgattcgctaattaacccaaaattttgaaaatgactcaaaacaaacatacagtttttacatatactattctgttgatcgtgcatgcagagataccacagtttttctgaaaacttcaatattccgctgacaaaactaatatttcacgtgttagtttttagttttttactaattaagacactagactaactgattcctactaataggttttctaatgtaaacaacataagagactctagctagaaaagagaggaaaaacaataaaagcaaatcttgagatcttctcagtcaattgacagatgtctttagaacaagtctaaatagtggattgagaagggaaatgtgtcacagcaaatccaaaaaatccaaactcatcagtttttgaaacttttggacgcaaaactcgcttggctgtgttattcattatttcaaagtccacgaaagaaaataattgtctcgtaaattaattaattaagcttatgacagctcaaggtcgacgacataattgattttgttccttactataaattatctattcaaaggaaaatatatactagctatatatataatccttattcgtacgaaatgtatgaagaaaagtctaaccaaatatttttttcgtttttttaattaaatctatacgaaattgtgcatttatatatcttgacctctatatccaaaactttaccaaaatctcgatttataatcttaactcaaaagaagatcgatcaactattatggagaacaaatcgccctccaagaaaaacaaaccgccatcgtgcggatcactcgtaaccatcctcagccttgatggtggtggagtcagaggaatcatcgccggagtaatccttgcctttctcgaaaaacaacttcaggtttaatagtagaatgcaaattactagatagtagataagaagggatatatcatatataactcgccatgcgaattttatacttagtagttattaagtccctgcatcgatttatgatcacgaattcatatttgatctttactatagagtaattaaacaacatctttcttcttgtagttattttcttgaaaaattaaactttctcggtatacataggaactcgatggagaagaggcgaggcttgcggattacttcgacgtgatagctggaactagcaccggtggtcttgtgacggcgatgttgactgtaccggacgagaccggtcgacctcatttcgcggctaaagacattgtgccgttttaccttgaacattgtcccaagatatttccccagcccacgtaaagaaattctatttctctatatacacactaattacaaaaacaataataattagacacttgtatttctgtttagaatagaaaaactttatgttcacaatttcgaaaatagtaaacgttatttaaatttttttaaggaataaatcaaccagtattttggtgtctcatataattgtttgttttttcctaatgaacaattggcatataaattaaacaaattccaacgtaacaattgaaaaaacattctaatgaaaaatgcagaggcgtgcttgctctgttaccgaagcttccaaagcttctgtctggtccaaagtacagcggaaagtatctgcgaaatcttctgagtaagcttcttggagagacaagacttcaccagaccctcacaaacattgttatacctaccttcgatatcaagaaacttcaacccactattttctcctcttaccaggtctctcttcttaacactacacacatgtatagactaaaatctaaagctcctaattaacaaacttaattagttcactttctgtttttgaagctgttggttgaccctagcttggatgtcaaggtatcagacatatgcatcggcacttcagctgctcccactttctttcctccccattacttttccaacgaagacagtcaaggcaataagacggagtttaatctcgttgatggcgcggttactgctaataacccggtactatcaaaaacaaagagaatacaaagaaattgataaaacctttagattttcgaaaatcaaaacagaactaactccgttgtgtttggtcctgtaatcctgttatagactttggtggccatgacagctgtgtctaagcagattgtgaagaataatcctgatatgggtaagctcaagccgttaggtttcgaccggtttctcgttatatcgataggaacaggatcaacaaaaagggaagagaagtacagcgcaaaaaaggctgcaaaatgggggatcatatcttggttatatgacgatggatctactccgatattagacattaccatggaatcaagccgcgacatgatccattatcacagctctgttgtgtttaaagccctacaatctgaagacaagtacctccgaatcgatgtaagagctacatattaacatatatgtatgtccttatttctgattgatcgtttaatttacaattgcaggatgatacattggaaggagatgtaagcactatggatctagcgacaaagtctaacttggagaatcttcaaaagattggagagaagatgctgacaaacagagtcatgcaaatgaacatcgacactggtgtatatgaacctgttgctgaaaatattaccaatgatgaacagctaaagaggtgattaagcaattatgaatgtttttcttcttggattacaagtaatctcgatattttttatttattaaaataaaataaattaataatgggcctcccaaacaaaattgggctgggcctaggacattacaaaagattagtaatctcgatctttgatataggtatgcaaaaattctctcggacgaaaggaaattaaggagactaagaagcgacacaatgattaaagattcatcaaatgaatcacaagagataaaataaaaggaaatcattcgtgcttttgtgtgaaattgtttgttgcatatgttttacgtggtgacgtccattactttatatgctgtgagatgaaattttttaaataaaattggttatctaaatttagttctacaagtaataagatgaaacagcagaaggccagaagctaatcctgagatcattttattctatgacaagtgtactcagaacaagtctctcgacatggagggagatataggtcctagattcaaactctattacaatatattttcttcgtaaatttagctcatgacagctcaagctaaacctacattaaaataattccacatggaaatatacaaattctacaatcatgattagcacgaaatatgtatgaagaaaagtctgaccaaatagttttatcttttagtatatactactacacgtgaagtttattttttttgtcaaaacataatttaaatactaatgctaacgtcaattcatatttaaatgcttgttggttttggattttttccgctaacctaatttttttgaaataatgacccaaaacaaaaacacagtttttacatatattttgactttttcgaaaaacttcaaatttcgctgatgaaacttaatcacgtattacgggttttactatttaagacactagattaagtgattcctaccaattaggttttctaatgtaaatagataactgatctccaagcaaaccaaataactcattattagttatgattcgtggcattagttgtagtttccaattgatagatgtctttagaacaagtctgaatagtggattcagaagggaaacgagtcgcagaaaatccaaaaaaaaaacaaagtcagtttctggctgtttatttttgattaattgcaaagtccacgaaagaaaatatttgtttcttaattcaaatttatctattgcaactatttctcgtaaattaatttgtgacagcccaagctcgatgaccctaattaatgatagggtaatattacttgctttaaattatcatattccacataaaacatatatcagcttgtatgaagaaaagtctgaccaaatagtgttaaatctatgcaaatgaaattgtgcatttgtatatatatattgacctctacatccaaaacttctaccaaatttcgattcaaaatcttgtagttcaaaagaagattgatcaactataatggagaacgaatcgccctccaagaaaaacatgccgccatcgtgcggaacactcgtaaccatcctcagcctcgatggtggtggagtcagaggaatcatcgccggagtaatccttgcctatctcgaaaaacaacttcaggtttatatctatataaatttcagtagaatgcaagttactaagatagtagatacatatgataggatcataactcgccatgcgaattttgtagtagttaagtccctgcatcgatttatgatcactaattcatattaggttcttaccatatggtaactatgattcatcaaaattttgtatttactcttcgaaaaaataaaattttgtcggtatataaaggaactagatggagaacacgtgagggtagctgattatttcgacgtgatagccggaactagcaccggtggtcttgtgacggcgatgttgactgcaccggacgagaacggtagacctcgtttcgcggctaaagaaattgtgccgttttaccttgaacattgtcccaagatatttccccagcccacgtaaggaaattatatttcgctatatactaatatcaaataataattatatacaacttatgttcacatgttaacaccaaaaaaaaaacttatgttcacatgttcgaacatatatattaaatatattatttggaaactttggaggaataattcaaaccaccagtaagaaatgaaatgttttagtcctcagagaacaagtggtgtatttggtgtcccattcccatatatttgttttttctaatgaacaattagcatatatatgtatatataattccacgtagcaattaaaagtaaactctaatgaaaattgcagaggcgtgcttgctctgttaccgaagcttcctaagcttctgtctggtccaaagtacagcggaaactatctgcgaactacacttggtaagcttcttggagagacaaaacttcgccagacactcacaaacgttgttatacctaccttcgacatcaagacacttcaacccactattttctcatcttaccaggtctctattcctaacactacacacatgtatatactaaaatctaaagttcttggttcaacctaatttacaagttgttgattagttcactttttgtttgaaggcgttgactgatcctagcttggacgtcaaggtatcggacatatgcatcggcacatcagctgctcccacttactttcctccttattacttttccaacgaagacagtcaaggcaagactaggcattttaacctcgttgatggcggggttactgctaataacccggtactgtcaagaccgaagagaaattgattaaaaaaccttagttttagtttttccgaaaactatatataaacagaaataactctgttatgtttggttttgttatagactttggtggccatgactgctgtgacgaagcagattgtgaataataaccctgatatgggtactctcaatccgttaggttacgaccagtttctcgttatatcgataggaacaggatctgcaaaaaaagaagagaggtacagcgcaaagaaggctgcaaaatggggaatcatatcttggttatatgaagatggaactactccgatattagacattacctttgaatcaagccgcgacatagtccattatcacagctctgttgtgtttaaagccctacaatctgaagacaagtacctcagaatcgatgtacgtaagagctacatataaatatatatatgtgtgtctcctaatttctgattgatcgtttgattgattggattgttttatgtatgaaaatccattgcaggatgatacattggaaggagatgcaagcactctggatctatcgacaaagtctaatttagaaaatcttataaaacttggagagaagatgctgacaaacagagtcatgcaaatgaacatcgacactggtacatatgaacctgctgctgaaaatattaacaatgatgaacaactcaagaggtgattaataagtttcaaatgtttttatccataaatgggtttcttggatcacaagtaatctcgttctttgatatttgtaaatttaggtttgcgaaaatcctctccgaggaaaggaaattaaggagaaagaggagcgacaaaatgactaaagattcatcaatcggatcacaagagatcaagtaaaaggaaatacagccggaaaatcactctcgtgcttttgtgtgaaattattttttttgcaagatgatattgttattttgttaaagctgaggattttgtgtgtgttggtcagcaaattctcttaacgtctttttttgtttttgtttttttctgggtgtttctgattcaattcttttccgaattgaacaaaaataaataaaattttacaaatcaaccctttaaataggaactaggctccctgtcatgtgggttaaactgggaacggtcgagttatgcaattcttcacgtatcaacttatattgaacctctctataaattaaatcaagttagtcaatcactatagcatcatgatgttggaaaaaataaaatctctatcctcattatatgtaaaaaaatgtggtcaaatgaagaaccaagtaaagtggacaacctttaaaatgatattatctaatagttttgtcaaatttgatgattatatatatacaattgtaacgttctcaagaggacgtttagtgtttacaagttcttgactctttcaagaaccgttgacaaaaataatcgtataaacaaactcatatgtatgttacacgccaaagtatattatccatcttattacagaattaggtgattaaacataaattttgttctctaacaataaaaatataaattttgtaaaaggttaagccaagaaacgagatacgtgaagaattgcataagaggtgtgaaggggtaagatgatattggaggattacaattgtatgttttttaaataacacgaaaaacatttgacagatttaacaatctcgcaaaagtggaccatagatagattctgtactacttgtcacggcatgggcataaaataaatattgtagcttgttttatttcctaggtttaaaagttggtggaacttcatataatcaatgaacaatgagcaaatttatgcgaaagttacacaaaattaaatgtagtaaatagtaatagagtatggttagtacaatgataaaatatacagtatattgtatccttgactccttgtagagactaaccgtaaccatttcaaatccataatttaggccacatttttggttcgagtaacggttatatttgcttggaagtatgattctcgttgtccctaacggaaatatttttattggacaacctcatatacttttcagcaaagttccctagttctgcgatttcagttctattagtagtttaagaagccgggtttaaacctccaaccaaaaacattgtaccaaaaaccaaaaacattgtaccaaaaaaagtttacgcatcttcaggatggtaacctaaaaaactcggaaaaaagcaatgaaaaggagctaaaatattactcttcaaaaatttctgaacactgagttataaatagatctcacaattagaagatgaaaatgttcaaaagtagcggtcttatcttctactaatttttataaactaagaacatttaaaatatatatacttatatgttcaggtgacttctgctactaaattttgtgcatttatgtctattaattgtttattttggaaagaacagctgtcatctagacctttgtttttaaatatagaagtatgtgtgtaacatgacatgctctaaagcaaccacaagtgtaatggggcgtgagagtgatgaacacgacatcccaaccaagaaactggttcaaaaaacatccaaacactatgtgatggatatgtgtatgggcatgcataacatagtgttgtatatagactccctaatctacatatatctctttctataaatatgtaacggtagttctaatgggttcatcacatttatcaccatctctatcttgaaaaggagaaataaataattaatcactaagcgaaagagatttgatctaaagtaatacaaataaaccttgattgagattgtaaaggagaagagtttaaaagcatggatacagagagaggatcaataagttcatcagaaatatccagaactgctcatctacaagatagaacagttgcttgtcttcctccttcgtacggacaacttgtgaccattcttagcatcgatggtggtggaatccgtgggatcattcccggcacaatcttagcttaccttgaatcacaacttcaggtatatgtaactgattctaaattgaagattgtgtgcaaatcttatatccattttttattattaaatttattgaaaaagctagcggtgtaaattaatgtcacaaaatcagtatattgttagtttttgttttttttgaagttttatgcaaatcttcaaaaagtatattcagtgttgtaattgacaaatagagactctagttctttttttttttttcttttttttaacatctgactcttatagagactctagttcatgtacactttttttaatggaaaaacaaatttgaaactgaatatcttatttccacgtagattgtatattagtttaatttgattgttatatttgtaaatgtctactaaacaggaattggatggtgaggaggcaaggcttgtggattatttcgatgtcatctcaggaacaagcaccggaggtttgatagtggcgatgttgaccgcacaagaccaaagcggtggccatagccgcaacagcaaccgccctttgtttgaggccaaagaaatcgtccctttttatctcaaacactcacccaaaatctttccacagccacggtactgttcttaactgtttccgtttaatctgattcagagtcttatttcagagaattataaaatgtgcagagggatattctgtggttggggtgaaaccatagtgagacttgtaggaggacccaagttcaacggtaaataccttcatgacttagttgaaggtttcttgggcgacacaaaattaactcaatctttgacaaacgttgtcataccttgcttcgacatcaagaaactccaaccagttatcttctcttcttaccaggtaacaccaaaatctatctgtctacgtgaatattcgtgcaactgtatcataaggtatatacattgatccaatctcataaatacataggcggtgaataatcaagctatgaacgcaaaactatcagacatatgtataagtacatctgcggcaccaacttttttcccggctcatcgattcaccaatgaagacagtgaaggaattaaacatgaattcaacctcattgatggtggcatcgctgccaataacccggttaactcaaaactcaaaaacctaaatctcaaaaccctaacttgtccgtaattattgacgtttctttttttcagacgttatgtgccattgcggaagtgacaaaacagataataaagaagaatcctgtaatgggagatataagcccattagattttacgaggtttctggtgatatcgataggtacaggttccataaggaatcaagagaagtacaatgcgaaaatggcatcgaaatggggattgatgtgttgggtctttgaaagtggatcaactccaattcttgattgttacagtgaagctattcatgacatggttgattaccaaagctctgtcgtctttcaagctcttcgttccgagaagaattatttacgtatcgatgtgagtttcttccttgattagggtttgatctgtcacatttcgatttcatattaattggtaactgtaattgcagactataactcttttggttttggttaactaattacttatatcccacgctaatgaaagaaacttgatggttatcgaaactcgatacttactttattgttttcttactttgaattgttcaacattccgattttaggtcataagaactcatgtcttatcttataaacaaatgctaaaaaagatttcttgtaaagattggtctatatatggtacttttcttgtacgaaacaataagcacaagtaacaaataaagtattattgtcagtgaagggtcaattttattgaccaaaaatataaaataatttactgacattttaaatgtttttttcctattacaggatgattcgttgaagggtgacttaggttcagtggacatatcaacagaaaagaacatggaaggtcttgttgaagttggtgaagctttattaaagaaaagagtctctcgtgtcaatctcgaaagcggccattatcaacctatttccgaaaatgtgactaatgaagaagctctcaaaaggtttaataatacttgtatctaaagcagaaaatattcttacttaagcatacaataatagtggatttaatcagtaaaatactgcctaattattacaggtttgcaaaagttctgtcagaagaaaggaagctcagagaatcaagatctcctaaactcaagatatgattttttacttgtcctaaaaataatgtaaaacttgtttgtatctgtttgtgtgactagtaagtaactgttcgcatctgcttgtgagcaaaacaatatttgaataagaatatgattcttacataccttaaggctttgggtttcattccaagaagatcaatttttcagaatcatttttttaacacttggttagaatctcagcaccatctttggttataagaatggtatgctcgaattgcgccgagaggcttgcatcttctgttaccacggtccagttatcatcccacattatcgggtttctgcttcctattgtaagcatcggttcaatggtgaaggtttgattcaagaccatacgtccagcttcattgttccctgtgtagaagaagttcagaaactatgcgagaatggccacaaagcagcaactcgatgtctgagtttagaacaaacttacggaaatgcagaacaactggatcagcgtggaagacgctgccaaccccgtggcctacaaattgtcgaacaactccatatttatgtttatctgcaagatcacttcataagcacaagtgtttttttatgttagaagatttgattttttcaatggggatgagagaactcattaatataagatttaacttttcgaagaaatcggtgtcttactgaatgactttgccgattttcttgtactcaactccgggaccacatattgatattgctttgtcgagagactctttcgtcacctagagcacattccaagtatagagctcatcaaactataacaaaaacatgatttttctagacgacggaaacggaactgtttaggttcaacataatacctcgactagctttttagccttctcgtcaacatttccacagaagaaagttgctgaagtatcaccatgataaccctgcatcccacataaatatctatagtatagagtaaactcaatttacatgactagtaaagaatcaggaaatacacaaaagaagaaaggtttacattcaaataaactgtgacatcgatgttgataatatccccatcctgccaaaggaaacaatacattattaagattcataagggacagagataaaaatctgtttagcccctacaaacaccttttaaaaaagcgcacctcaagtggtcttgaatctggtataccatggcaaatgcattcattcacagatgtgcaaacacttttcgggaaacctccataaccaagaggcgaaggataagctccattctcaataatcatattgtgaactgcttcatcgatttcatcagtggttacgcctggctgccaaatagaaaagaataaaattatgatgaattaatagagcattattcaaaatgagacagaaagtataaaactttcctcaccttaaccaaagtgccagcgtaatctcgaaccctagctgcaagtattccagaagctctcatgcattctatacctttcttatcatgaacttcaagtccacttgagattccgggagcttgaagagaatcaacataaggaggttttgttatatgacccggaacaggacgacgaggagatacatttcccggtctcagacgttttctcttgccatcaataacttcatcttcatttctttaaaaaaaaaacaagaaagtgtaaatcaacacaacattcttttctaaacagagtccacatgaattgtgtcctttaaatccaaactcagcagctaaactataagaaactaacaaagatgatactaccttctattaaacaggagatcggttaatccagaaaaggttcttgataattgcatcgaaacatgtcttcttcctgctcatattgagaaaattcccacattgatttcggttctgttcttatctatgaatcaaactagcaaactgggcattcgaaagttttaatcttttctgtaatatgctaatctaacattcatcatcaataaaactagcagtagcagtagcggaagaagtagataatgaaaagaaagaagaacctaaatcgaagcgaaagagatgaataagtggttgcgttgatctaatagaattgttgccgagaaaggaagatatgagtctaggttgcagagatttcacgcccgccatttgtgctttctcggcgagcttttcgttatccgcttcgccgtcttcgtctcacacaatttcacaagcttccgtttgtgatattgggctattaatgggccaaaacttaaacaaacatgggcttttttacttgagccgtaactttaaataaaaacagagttaaaacaaaacagagtttgagtctgccttcgttatgctctctcaaacaaaacagagttaaaacaaaacccgatgtcgaattccggcgccgacgaagggccaccgtgtacgaagaaattgaagatgtcgtcttatccgtctacgtctgaattttcttctttgccagatgagatagttctgagttgtttggcccgcgtatcaagattagactattgttttatatttctttgtcacaatctttgaaatcatttttttttttaaatgctctgttttcttgagtcccaaacttagcaacttctgtacattcttttttacaccttgtactacaagaaatgaaaaacacatctaaaaattatagaaagactacaacaattgctcctagtcctaggttaaccctcttcaatgaaatctccagagctcatggaaccggttcgatttaagccttgtttctctgaataataagtaattagagccttaaccacttgtctgaaccttcttctataagtcggaagcttcgatacgctccgtaccattcccatcatcctagaacattcaagataaataaaaccatcattgtcttaatgagattaattaacacaaacaagtttcaggcagaaccaaagaagccatacagattgaacttttctttgtaagagaagttttttcaatctttaccttctgctgattccttggatttgagcagttcgaaggttttcttgaggcgggttactgtgattatcccaagcttccatcctttgttcatggtttccaaagagaacaactttctctaagtatttaacttcactttctccaagtttaagagctcgaatctgatctttcaataccattattggattaaagacccagtccaagaacttgtcttgtggtctattcaaatgtgtcacttccgagccatcaagcaaaagcacaccatgaacaccagcttttatagagctaagcaatgtatgcaacaaagcgtaagaaggaagcccgacattgataatcgatgattcgtttccgtgtctgccctttaaagactcatagagatcagttggtgttaacacttctgcatctagtagctctttgccttgcatctcaaaccaccccatcatatgctcccaaatctattaaatacattttcaaatatttaaaactcagtagaaacgtgagagatttggtatcgacaatgaaaacttttgatatatacctgaaccattctcacttcttgtattgcttctctaacagatacagagtgaactaggctcggtactagcatcgctggagcatcgacagaaccagaactattgactcttgttacatctgaagggtgaacgatcacagatacttcacttgaaaacgatcctcttcccatccgatatcttggcctatgtgtcacggattacagtttcgcggtgttaggataatggaggcaaagaaagggaatgtaaaaagatggaaatcaaagagagacatactttgggaagatggttccttctctaaggtaaagccaatcatttgtgtactcatcaaattctccaactactgcaatcacataagagactcctcttctgaatgacctttcctgcagattagagattcaacaatgagtaagaaacccgatatttttctcgaatcattcggtcaatatgatcatggtgtacctgaaatacaacaactgctccatatagtcctacaaagatgctggagaagatggtcaccaaaataaaaccaatgacaactataggccataacagtactgtcaaaccagcaactggtatacaagctatttcaagaaatggtccttctcgattaatcgcgtcttgagctagtcggtaccagcctttgagaagaaggtaagggcttttaataaccgcgattgcagtgaaaagagggatatcaatgactaatcctagaatcccaacaatgatgcatcctggaacatgaatcaacctgcaagacgagacacaagaatcagcaaaaactcttttggaatagtttaggacaaaagtttttactttacctaagagtttgaagctcatctgaaaccggggattcgcgtaactcctttaagtaaagtggataagaatggtaacaaaaatctgcaaaatcagtaaccacaatgcaactccctttgatggttccccaagttccatcctaatatacagagcagtcaagtgatatgattcactaacaagtgcttaagagaaagaaacttctgggggaagttatgtaagtaccacaagacagtggaagaacttgttggattcagtgtcttgtctaaaggcttcaaaagcagagatccaaggagtgaagaatccatagccaacaccaacaagaacactaattgctagacttagacctaaccatatcccaaacaatgcaggaagtgccactaagattgctaccttcagaggaatgtcaaatctatttgtcctgaaagttagaaaatacacaagaagacatgtttataaaattgattctcctttaagaaagaaattgcagggaaatcttttgagaaaacagtgttgaagttttcttactttgcaacagcgtaaatagtccaagtaacatgtgcagggaacaaacaaagaatcactccaacattcccaactattaatgttaatccagcaattggacctacgatcaaacctgcataggaaatatatataaaaaatcaaactttgttttgttcaaaagaacccatcatgaagaatcaatcatagaaagttagaaacagaggaaaacagagccaaaacaaagaagaaaaattgaaacctttgatagcaccgagaaagaaagcagaacaaaaggcaaagatgacataagaaatcttcagacagcttcctaggttagtgacgacgacagccatagtcttccggaaaggaaagctcagatatttttgtatcaatttttacaaattttatagctgtggaaaaattagagagagagaaaggcgtgttgtccaagtctacaaaagagatgaaatcaggaaaaagacaaaggggtgatgacaattgacaagaaacgcaaagactcaaacaccgagaaggcgagaacccattagataaaaatgttgagagaatttttttatagtttatttgaatgttccatgaataagttatatatagttgataggagaaattgttgaagaaaaagtggtcagacgtgtgtaaagacgtcattggaattggttgcagatattattaatggcgtgccaagcaaactatgtgcctctctgaatgttactgttgtattcattatttttactgattttttttatgttggataaagtcattatacatactaaatgaatagtctgaatttatggttttagtcactctagaattaatctcgttatcgtttattgtcattaatgttacttctcatgctaattagatttctttttaaaaaaaagaaaaaaattctcatgctaagtagatcctccatccaaactcaaaaatttcaactaccaaatatatgatacaaaagtacgttaactctttatattcaaacaaatcgtttttcctttttgttttaataagaatgatgaaaaatcacataaactcgtttattttgacatcaaatttatacccaagacggatgaaatagattcattgtattttaaggttttcatgatgcgataatgaactatatcatatttgattattttcttctgtatatatgtgacatcctaggaattaaatcgttgtgtttatattttaatcttcattgtttccaatccaaataaagaaatgtaaatagcagttggggatcaaaggtgtgcattcgacaaactcattgtcaaagtcaaaactaaggagtgcccttttttagttaatgctttttaaaaatgtgttgcttcggtttgaccttctaaaggaaatttcgtcgcaaaatgaaaaccgataaacatttatattttacaaaaatagtaaaggatcacgaaagtttgcaatttaaaaataaaattaaaaatatttaggacaatatttgtgaaagcatttaagtgttaaatttaattatgtaaaaatatgttaaaatatggtaccacaagacttacggatttaaggatgaaatattaagtctggtttgtttttatgtatttaaatttggtagaataattgctgataatgtcctttgcacactaccctttttcaattctacccttttctatttgccatttttatttttactctctttaattttttatttaccattttaccctatttagaaattattttatgttaacaaaatgaaatattaatattttcgcctaaaatattccaaaataaaattcccaccaaaaattttccgccaaaaactttttcaccaaaattttttgaaaaaaagattcccgccaaaactttttttcaaaaatatttttgcgggaaaaagatttacaagggatttgaaaagaatttaaaaagatttacaagcgatttaaaaaaggttttaaaatatttacaagggattttaaaagggttttaaaagatttacaagtgattttaaaagggttttaatacatttacaaggaattttaaaaggttttaaaatatttacaaagaattttaaagggctttaaaagatttacaaagatttttaaaagatttttaaagggtttaaaagcgttttaaaagatttacaagggattttaaaacggttttaaagatttacaagaaattttaaaagagttttaaaagatgtacaaggatttttaaaagatttttaaacaatttacaagaaaacattttaaaaactcttgtaaattttattaaaaccttttaaaatctcttgtaaatcttgtaaaacacttttaaaatcctttgtaaatattataaaacccttttaaaatcatttgtaaatcttttaaaacacttttaaaccctttaaaaatcatttaaaaacatttataaatctttgaaagccctttaaaatttcttgtaaatatttttgaacccttttaaaatctcttataaatctttgaaatcatttaaaatcccttgtaaatctatttcccgccaaaaaaaatttacaaggatttttaaaagcatttcttttgctgaaaaaaaatttgtcacgaacttttttttggcgggaaaaagtttggcggaatatttttttagcgggaaaaagaaaatttggcgggaaaatttcagtttccaattaaatattcctattagatgagggtaatttggtcattctgttcaatggaaggggtatttttaaaaatggacaacacaatagggtattaatgcaaaagatagtaaaaaaaggctagttttgtaaatttcccttaaatttaaaatttaattttgtaaacataaaaggtcctttgtgggcatttgcaaagatgctcgttataaaaatctgaatcaaaaacttgaatattaaatctacataataataggaaataaatgttgaatgtctgaaatcgcgattaatgttgaatccaaaatttggttagatttcctatcattatataaatttaaaattcaagcaaataaatttaaaaaaaaaaacaaacacaaaaaaggtttttaaaatccggaaaaaaaaaaacaaaatatggaaaacaacttttaaaaattcaaaattaaaaactggaatgctaaatctacataataataggaaaaacaagttgaattaggcctgggcattcggttaaccattcagtttcggttcggttgcgcatgatttcggttatttcacttatagtaatataaaaaccatttggatatttgaggaacggttcggatattaaacttggtaaccataaataaaccaaaaccgaaataaccgactaaaaaccgaaacaaccaaaaaaattgaccaataaccgatatagaacgtacgtaaaaaaaagacatattcacaactcagaaagatgcaaatatggtccatactctccataatattaaaacacctgattcacaactcacaaaattcaacttgcaaactaataaagagaagaacatagttaagtgtcaatacatacaatatatgtgatatattatctatcatacatatatgctttggttatcctttggttatcggttactaacctaaccgaaaccgaaaccgaaatctaagacatataatatccagccggttattttaagctatccaaacccgaaccgaaccatgtttttcggttcggttcggttaatcggttagcagtttttttgcccaggcctaaattgaatgtttggaatcactaacgactaatgctggatacaaaatccgtttagattttctatcattatataaatttaaaatctaagcaaataaaatattaaaaaaacaaatacaaaaacggtttttaaaatccaaaaaataaacaaaatcaaaatgtaaaaacgacttataaaaatccgaattaaaaacttgaatgttaatctatataataatagaaaaaacaagttgaatatttggaatcgctaacgactaatgctggatccaaaatccggttagatttcctatcattatataaatttagtatccaagtttcttaaaatccgtaacaacaaaaaaaaacaaaaaatttcaaaatctttttttgtgactttaaagtataaatattcgaaaagctgctaattttttgaaaaaaaaaaagaaaaaagaagattggatagaaattgaccttttttatgggctgaaatttttgttcctttaggtgggctttgttaggcaaaagggcttcgttgatgtcatgaatctaacgccaccacgtctctctgcatcgcaaacctccaccggaaacgtataagccactcctcaatcttctctctctgtatcgccaccgccgtcgtcgattgcagctcctcgccggattgaagctccatcatcatgactttgaagcttgaaataccggcgacacgtaatcattctttaacttctggatcgtcactcatctcgatcgctgtaatttttggaacgattctccagaaagggctcatcttggtcgaagaagagtcatcaacatcatcttccatcacgttcgtttctcgttcggtttgtcgaagagcgactgcaaatcaacaaatcaaagtgtgaaaaatttggagcgtaacggctaacgaagaggtttgaccagtcaacgataaccaacggttactcaccaataatctccgatgaatcctcatcaatcttccctctctatcgccatctccgtcgtcaattgccgtttttatcacccaagtcttcgcaaaatcttcgtaacggctaagcgaacagaaccgaatccatcggctagcgtaatgattctaaacgaagaagagaatccgatatcggagaaatcagagagcatgaaattgcgtatttctcaatctatagccctctctctctctgtatttcttgtttctctaggtttttgtttgtgatgatcgatcgaagatacttaaacgatgaggctattctataaacattaatgatgtgttagggatttccttttttctcttgtttcctttttcctttttccacatgtgattagggttcagcgtaacggtactttttaaaaaaaaactcttatgcgttgtttcctttttcacttaatgatttggtaattacgtactaaaccataggttaactagtagggagctacaaaagaaaattgcaatttgatgtacatgtatgttgataatatacacaagagaaagaacaaaactttctttcgtttcaacattctttaataatataagaaaaaaagaaactggttttacaataagtttggctttgatgatttgagcgcaatggtcaagagacatctggatacaatcaaacaaataaagcgttatcaatccaccattcatctcctctagtccttcaaaaggcttaagagccattaaccccatttagaattcttcagatcggagatccatgtgttgttataagatttcagaaatctgcaataagaaagcacatttgaagtcattaacctaagataaaaacagcagaatgtttcttgctttttctttgattgattggttctactgtatacattgattggcatctcagcgatgagtatgccactgctttcttcgaggcttttgagagtcgttacttcacctccaacaaccatgtttatgactattccaccttaagagaaaagtctcaaatgttaagtgacattgtttgatgaacaaaaagagtttgttttgaaagaaaaaaaaaagaacctgaagctaagcaagttgttatacgccttgtatatgtttcctgaaacatggtcattacaagtagtgaataagaggaaggttctggacattttgacttgacaattgcagattgattaagaaaaataccaaccaaccttctttgtaggaagctcgtagtttatgagaacgcgtgcggatagagaagattctcctgatgagagtaacggaaggcaaacatcggtcacaactaccaaatgagatgtcttttcttcttttccgttttcactctcttccaaaccttcttctaccacagagttaagttgctggttccagttgattgttgcttgcctgaatttctctataaccatagctcgttctctatctgctagatcgctgtactgtagacacaaaagacgttgaacataaacataacctagtgggaagaacatgtaagttaataccatgatgaacaagaaagtggtacaacaagaacaataacaaacggatataaaaaaccgatgatatcaatcaaacaatgaaagacaatgaactcaaatcatgatgaaccaagcaagtgaatcaacaagaagggtcttttcaaatcaaataccaaagagaagactaagaagaaacatgcctcagctatgaaagttaaagagaagaagagagagagataccaaagcggctaaggaaatgtaaggaagagtggataaggaagaacagacggcgtcaagttcgtcacgagagctgcaacagactacaatcggaagccatggacgacgacctagaacgcctaataattccactacagtctcctgtgcccacatccaaagtttcgaaatttgcgattcagaatctcagtcttgatgagaaattacaaggaatattgatacaatttacttaccattttgaattggggacgatccacggcgaggtagaaatgcaattgttgactgcaaaccaaaaaaacaaattgggtttttagggtttttgttagaaggtatgagataatccttataaactcaaaattaaaacctggaacgagagggagattgaaatggtagagatggagcttccatggagtccataatccgtctttctcaaaattgtccaattcgccggagaagttacgctccggtaaccaggtcacggacttatacgcagtcgtttccagtcttttgagatttattactctagcaacgtcgtcgtttggttatatgtaagtatcagatctaaacaacatcgtttctggttcatattttacataatttattttttggtcaaagacatttatacataaaaaatgataaaacaaatgttcgttcaaggacatttacatattcaaaataatggatgtgaattacattattatttttatacaacaatacatttttattcgaccaagccacaaatcaaacttctttattattataaatcaaggtgattaacaaatattattcacaaccattactaattgatttatacttagccgtaagaggttctcttcatcatcttcatgaactcctccaagttaacttctccatcttctgcgtaggttaaggcaaaaacatgaacttgagggaccgattatagataaaacgcaaaattattatgtgtttttgcttactgtcacggtctgcttcttcgatcatttcttctatatcattatctgtgaaattttctcccaattctttagcaatcatctttatatcacgaggtgaaatcttcccctaaaacattccaaaagttgtccagtcaaacacaatgaaatcaatccaaacaaaaaaagataatattaaaaagaatgaaataatgacaggtttagatttattcacattattgtcgtggtcaatgatcttaaacgccttagacaattcgtctatggagtctcgttctccgaatttggttgtcatcatatgcacaaattcgtcgaaatctatggctccactttggtttttatctacttctgccatcaattcgtttatttgctgcaacaatgaacatgaccaaactaaatacaagttggttctacgtacaatgatctaaaccatgaaattaaaacaaagaagaaaaaaggaaggaaaacaaacaaacctgattattcatctcaaatccaagagacctgtaatcagctgataattttttagtactatacttaactagaacttgaagaaaataactttgaaaaagaaagaaaaattgccgttgacctcatagcaacgttgagctcgctagcatcgatgctacctacatatgaaatgatgcactaaatcatgtgagcaataactttgtaaatcggataaagaatcggtttaatagtttacctgaaccgtctatgtcgaaaagatcaaagatctctctgatctctcgtctcttctgattggtcaacccataagtcttccctttaggctttagacctcttctgagctgtgctgcttccgacatgtaattcgccttccggaagacaaaaagaaaaacaaaaccgatgaacaaagtagtcggataaagaatctaaactaagagacaatcgagaaaagaaaacactaaccatttcttgtgtaggaaggaaaaggatgatctgataagaacaaatggattaaatggatgatttagttaatttggtttatgatgcatgcgatgacgagattagttgccgatgatctgtctcttttttgtctggttactaactcttttgaaagcgatttagctttaaaacttttagttttgcacgtttatgttccttcgttaatattaatctatatattatattggttttgctaatgtaaaatgacatgatctagagaacgagaaatttaacaaaacatccatgtaaaatagtgaaaaaaaaactttaaaatccatgagaaaaacaataattcaagacttttttttacagataaattagaaacttgattgataaatttacaatcccatagtattaaaatgaatcagaaggaatccgattcagagatgattcacaacaaagacgttcttaggagaaaacaggacttgtttgatggtcatcttgcgttcttgtgacattgatgaaagtaaatgtttagtacaatgaacattaactgatgtatatatatagttacataatctagagaacaccgaaagcttctttaatagcgtgtacaacacgggaggaaacttcttcaccaaacattctcggaaactgcaaatccaaatcgtcctctatgctcttccttctaaagcttttatctcttctctccaactccattctctcttcttccccaaccacaatcttctcttcttcttccttcacacaccgctccaaccaaacctcgagaacctccttagcagctggactaacatgatctctcaatatctcctccaacttatcctcttcctccgcatcaatcttaagcatcgaagcagtaggagagaaagcagaacggacaaagagagaaggagacacataagggttaacttcaggtagcttaaggagagattgtcgatgagaatcaagagcagtgtcttggtaatactccttgagataatccgggttaagaacaagatctttacgatgtgggaggtcaaggattagcacaagcgacttggaactgctctgtattagttcgaccacaaagtttggagcttttgttgatgagtttaagaatccagagatgcttgttatattcaaagatactcctgttgggatcttgcaatgtatccaacttcctataacaaaatcaatctgcaaaacaaaacaaactttaagattctctaaaaagtttttttttagggttatgatttacatcgaaattgaagtctgtttctacttaaaatcaagcaattgagctctaaaacaagcatgcaaaacagtcaatttcgatctcataactgaaaaacagagttaatcgtcgcaagtaccggagaagatttgtcgccggatctgatatgaagagatgcttcggcggaaccgttagggttattgaagtttcgtacatctggagggaggttacagggaaggagttgtgattggaggcgattctccaccgtcgacatgagatcaaccatgagctgcttccgcgtgggtgacacatacgggaactccataaattttcggcggaggtgatcgtcgtggtcttccatggactggaattgagctcgaggtctgagattctttgagaatcgcgacggttttgaagttaacggcgagagatatgatggagaagaagaagagtagagagtgttgcaaaatatcatcgccattttttatgtggctatgactaaattatgtctcttcttttttatttacacttttgaagaaattaattactattttaccgggattatagttttgtggtttgtaatatatttcttgtggtgaattattacatacacatatttaaataaaataaactatgctttttaatttttaaatggtttgagagttggtaagtgatcttcttctactcaatcaagtgatgcaagtattgggccaagagcgacttaattgggcaaacaaataataagaataaatttctaaatttttcgattcttaaacaagtaaatgatttgtttgttgtagagctagttggaattatttttctctctagttaagtagtgtctttggaaccttactaaatttttatttaatttcatagcattttctatttagtatattgctgtattttttcgattccttgaagacatctttatttttattttcctgataaagagttctagaaaatgtttctgtgacttttataaagacaatttcgagggaaaaatattcaacggattacgtaaaaacacggaaaccacctactactacttgcaaagaaaatcaatcaaacataaaagtaaaatttcttcctctttcacaagttttcaactaagtagatgaccttagaccaagtatttcacatgcttttttacattatgaagacataaattaagcaacaataaaacttcaacatctgttttattttcttaatacactaattaaattatataatacatgaaaatccatttatatatttgcgttgatccttctggaccttcttcacctttttaaaacataaaaataacttttcttccttacggaaaaaaatagttttttaaatcatttttttcgtcgtcgtcgatgacgtgtcacacgctggtttgaacagtcttctactctttttttagttgcagactttgctgcttttccacaacggcgcgtgaaagtccacgttctttatttccgtcatacgggacccactcaccacataattcttttcatcccggtccctcttttttctctctcctttcaaccacaccccaaacaatttcaatccttcacctaccccctcctctgctcctccgccgccgtcgcaaccttcgcactcactctcttcgtcagactccaccggtttaaatttccctcctttgatcattttatcgatttgttccggtcttactttcagatgacccgtcaagaacgtcactagctcatcgcgctgcttcttcgccgccgcgagctccgagctcaagttattgttttcacgtttaagcttctcgttctctcctgataaatcagcaaccatgttctccaccgaaccaggattcttcgacgaaccgggtgatgacgtggagcttgaaccgtgatcatcaccaccaccagaattagactcagaaggcgaaccaacaacaacacatttccccgccgttgaagcaatcaccgatttacgccgtcgtatgtccgtcaacagatcctccccgcctctccggaaataatcgtttgcaaattcccatttatccggtacagttttacgaaatccctaaaccaaaaaaaaaaaaaaaaaaagaacaagaacattctcagcttctagaaggttttctcaccaacccccaaattatgagaaaattacgaaattggctaaccaactacaaaagaatgattcaattcaccaaacgaattaaatgaagcattaaattgagagtaaatgagttttcgttagagtgaaactcacgtaagtgttgagctgacgaatgaagcttgagaaattattatgcttgaagtattgaggaagaagatctttagcaaactctgctgttttccacacgacaaaagctgttccttcttcgttccatgaaacgacgtcgtctgtgctatgatcatcaactagctgatacgttttgcttaaaaacggcgccggaactgatctttgcgccgccgtcacagccgtcatctccggcgaactttttttattttaccacagaaaaataaaactaaaaataatctaatacacaaagagaagaagaaagattggaaatagaaagtcgaaggaaaaagaatcagcaactaaaaagcaagagagcggtgagaaattcccaatcccagcaataaaagccagagaggaaaacacgagaacggagaagatcggagtttcgtttggtttcttccatttaaggaaaaatctgatgatggaggaagaagatgaagacgacgaccatacttcgccggagctaatccgtgtgattaaaaagtaaataaatataaagtcttttttatttttgtgtgtatgtgcaaaacaagtaaaacaaatatataaacgagttaagtgttatgtcgaagggtctctatataacgtagtaggaagatttatagatcacaaatgttggtcctacctttgtaagaaaattaaattataaaaacggatgctgtttctagaaattctcagaaacatcttttcttcttactttcttctcttttgaataatttttatccatcaaaaatattgttaaaaaagtctaaaaagtcttatcttttgaattatgttctactttttctctcccttgaatatttatattcgtaatttataaatctcatattttatattattgttaaaattattagatgtcaaattatattttaatctatagttgagtttataaatcatttaatatatgcagaaatatgtaaatgctaaaatatgttgagtcgccaatcaaaacaatgttattttaaaacaaacacgcacgaaaagagaaaattatatacttgtgtttttctagaaagttttaaaattaacagatttgtaattttttttttttcaaatatgacgggagacggaaagatattttatacaatacaaattgcgactttgttaattagttttgtttctattatatttctttttgtatatttaaatgtgttcacctaacacatttcggcttcatttcacatttaggcaccaatgagcttcatttaccttttctttttcaatatatgtgtgtctttagactaaacaattcggataatatattttaacgtgtgagtcgtgacaaattcaagttcttaaaatacccatcgacatctacgtcttcattcttggatttatttccaacacctttggcttttatccgcatttttattatcattcattgataacgccacggctaagtatttaatatcaatcaaagacagtaaaatcttacctaaatagttggcatggttgaagaaaaaaggtcttagagagacgagtattcatagtttacacaaattcaagtctccattggagaaagacgatatcaacgtgtgaaaatgtcgatagttgcatgcacatctccatatatatggacctcatcatacaaatcgtctatttttaaacgctatataattgagtcagtatacttattttgcaagttatagtagaatttagagctaattatatatctatataaatgattcagtattttgtgaaccaaatactcctttggcattgataaatgataaatatttgcgacctttttcatgtcgatagagtttttgttttttttcttaattcaagctagttgaggtatctcattttagacttctatacttcacatttactaacagcgaattgtttcctcttcttttacaagaaattacattctgttaaattgtgcacaatgatagaattttttttctccacatagaaaagtcggaatgaacaattttgacttcgtgaaatactattcaagttgatagtaaacaagaaacttctttaaaacatgcatgtattatgaactacattgttttttttttgttttttttacattagtttttactcaaaaatcatctaacagcttaaacggaaccatttactgtattttataacaaagaaattacagattctgactttatgttgggataaataattaatataatgcggatggtaacacatcgatgacattaacacaaaccactatcttatatagtatgtagtatttgaaaaaaaaaaaatggaaagaaaacaaattagaaaactatcggaccaaaagcataattactccgactttcgttatcataaaaatcttcacccattaactcgaattcaatgaactaatggcttaggtcctttttaaaacaattttggaccatttattcagttcttctatggaaagttcgaactaatttctagggtttggacctttggtgacatgagaaaaaaaaagaccacttgaccaaactcactgaagtcagagtaatggtgagtactctcgacacgcgtcaagaaacatccattttttttgttataaagaaagaaacatggatttgaaacgtaagtctattattttccacgaatctttttgatggaacttgaaagatgagtcatggtaataatataattgcgtttgttgagtattagaatgtttgagttccattccttgttcccatcatgacttttaaactttactttcttccatattctcatcttaacttttgagtcgacaaaaactgttcataaacacattcaaaatccaatataaactaacattgtaatatgttttacggtgaaaagaaaacattatacatacgaatattcaaatgcttatatcaacacattttggggttacagaagcaacgataaaaatatacatgaagctatatcctattatccatatctaagtaggatttgtgtcaaattatatcacttaaagctaaacttcttttactactactttaacaatacttggctacttggctacaatgaacgcgttaaaattttttttttttttagatttcacattttttgaagattaatatgattttagtttgaaaattttcagtatctagtttttagtgatcactccgattcaaactaaaaaaaacataaatgttcttctcatgacctcaaatcaagtggtccaactaatgggatatgatatatgaattaaatgcaatatgattattatgattaagttcatgtaattattatgtacgccatatgttaacgtcatacgttgccactacactcacctcaaaaacaaatgatcaatcacagcttcctgaatgtttggtcaccaccactaattcatttttttctctctcaatttgcagttctataagcgaagacaaataaataaaaaccatttttgcattataaactaattacttaaaaaatgaaaagaaaatatttttaactcgtgacacagctctttcaacaaccggattaaggctttaaacaaaatacaattttttctctaaaaaactatataagtaatttttatttttctgaatctcattattggctttttactcgatcacatgcaacatgcttctaccattttaaaagttggtgtggagccataaaaacacacacacacacacacacaaaactacatactaaaaaatattaaattgagtaaaacttctacatgaatcagaaggtttcattaaaataggggacacgtggaaaacctagatctattttcgctttacatcggacggtccaaattctctgtaaactagtcgtcggaaatataaaattatcgccaaaattcgcctgaaaattttcccaattcgaagagctaattagggtttcttctgagcttagagagcaaggacaagatgtggcacgaagcgagaagatcggagaagaaggttcacgatatgatggacgctgctcggaaaagagcacagcggcgagctatttacttagctaaacgccgtggagatcctattcagtcgattcaagccgttggttcccgctaccgagtattccgtgatgatggtctttaccaagccaccgaagatcaacagggcttgtaatgaatccctttacgaataattctccatatataatccaatctggatgatctaacgatcctcttggagtttttcaatttggatttgactgattagtgaagctgaacaatttctgtgtatttaggattccttggaatgggaagcaagatgttatgattgataggtattgaattagttctattggtttgtttgcttgtttggaactgttgattgaaaattagcgattggtttttacaattagatttgatggtcgtgctcttctggattttgtgcgtgaggctggttcgagaagtgtacgtccacataagaaaacggaagaggaagaagaacttgaagagtttgttaattttgagcgttatcgggatttgattaagcatcggcgtagaggatgtcggtacctttttaactacattttcttccgataaatttgtttcttttttcgatctttgaatcaaatttaagggaaaaaacagtcgtagaatcgaaaattcgagtaactgagacaagggtcactgggataatgaacagtttctgatgaggagggtttgcaacatgtccatcaagagctcgaggccaaacttgctgctcccttccttgggacaaggtacattgattatgttatgtcgaagcttgagttgttaattcctcactctttcttactcttcttcgtagtctctgttgtcatcgtttcactgatgtaaaacgtaaacctttattcatctcaccagctaatgtaagactgggcctgatatagtgaacacattttgttctgttttgtatgtcttttgtagaacacaaccagctcaaccacctgcaaacaaaggcacatattcgcaggttggattttcttatgctggaaatggcaaagataattcattggatgcggacgaagatgatgttgatgacgacgaggatgatgaggatgaagaggaagaatttgacagtaatgacagtgatgatgaaggaatggaaacaattgcgaaacagtttggtattaagcgatatgggtggcttgtttatatggacaagaaggcaaaagaggaagagaaaaggcaaaaggaactcatcaaaggcgatccttcaattgtaagttgcaaggctagtgttgattgatgaaagtttatgtctttttgttttgctccctttgcttgtctatcgatgctgaatcaatatatatggaaatgtagaagaaactaagtcgcaaggagagaagaaaagtttctaggatagagagggatagagaaagggaaacttcaaggagtgtcggaaggcaaataattcatcatgatccatacaggttagatagtatacacgtaagaaagcaaaagtcaagttgaatgtttagctcattgacatggtacttctcaatatacagggagtctcgaaggagtcctacttatgaggcctatccgcgttcaagaaggtattgccgttattagcttattattatgtaataccagctatggaaacattagtaaattgattgctaatctcttctttcccctattcacagatcaagatccagatcccgctcatattctccatcatactcaaggagaaatgggcgtggagaccattctgatgaaatcagcaaaccaaaaatcgaatatattacggaatttggaggaggctctggagatatgagaagtccaaagtttgaaggatattccccaccgcgttcaccaccatctcagtctgatctattaagccggtcggagcactcaacctctagttcttgcaaagatacccacttactccccacttgttggttgaggaaaacttttattgttgtagacttaattggcactagattggcactaagggagatttataatctttctttctggaaccgctttgaatcttgaatgaattagctagttataatcgatggagtaggaaattataatattttatttccctgcagaccatcgccaggccgtattcttgaggcgctgcatgttgatcctgcatctgatatatcccttgagaaagacaaagttgccaaaccagcaaaatcgacagtgaggtatggatgagattacatatttttagtttttttttggttttgtatcttcccttggcttttgttgttgtgaattggaacattattcctcttttattcttgcagtacttccacagcactagcgaagctttcaaaagtagcaggtacctcctcttcgaagcagtcacaagcagagaagaaagaaactccccaagaacgactgaagagaatcatgaacaaacagctaacgaagcaaagtaagatcttaattactgttatgtttactatcattaagtttattcctatttgctgttggaaactgagatggtggatgaatcatgttgtacgcagttaagaaagactctgcaacagaaacggctaagaaacgagaacaggagcgacaaaggctggagaaactagcggaaacaagccggttaagtcggaataggcagcgcagccgtagtaggagtattagtcgatcaccaccaccgaggttgttaataaagttatcatttttgcttcgtgattaaaatggggggatttgtgaagatgagaaggaagttttcggttctagagctctgattggatccgctctcttgatattcactaacacagttgtcatctctccttctcccgtttgattttctttactaaaatgttttgtctacagaagacacaggcgaagcagaagcagaagcggaagcaggagcaggagatcacgcaggcacagttcaaggtcacggtctaggtccccatctaggtcgttatcacgctctccgaaacgtcacgcagacgctctccatcttattcgaggtctcccaggtaagaacagatggaaagcattacatgtacgtcgaaaatggtgtctttgactctttgctttacctttgcctatataacatattgagttgttgtgtttgcaggcgaagaagcagcaggtcaaggcactgaagagaggaaactctaattgttgcggcagctttttttgttgcctctgttcattttttttttttttctgtgtgttttcgtatccttacgattcagtggtaaaatatggttttgtgggtttacatgggataataacaacgttttcatatgatgttttagaaatttataagatgttataaaaaaataattattttagtagttgaatgtgaagttttatggttagctttgtttgttggattagttaacaaatgtgtgtgtttgtcgtctctgtgtgagacgcagcgtaaccatctccatgcgttgcatcgttcgtgaaagtaaaacctttcataaagtttctaactttgaataatcatccgcaatctttataagatattttcagctaattggaattgcaaatacacaatttcaaaagtcttggttctttccaagaaataatttgttatagagagattgtcatactttacaactacatttagaaaaaatagttaaggctggtcccataaaaacaacttgcttaaccatgttatttgcaaaaacaaacttttataatctccatagtatagatttcactcaatttaagtaagaagaagaccatgaatatcaagcttggggcttgaattctcgcgaaaaggaagcatttaaatggttataacaacaatggaaacaaaaaacgtgacattagttgaaaaatctatttctctgatgtctatatgtatattcttcattttcttcttgtgatgaatatatagataaggacgatttggatgaaggagaataaaaaaaatcaaacgttgaatgtggtaggagcggagtcactataattcatgcgtcaatattgaatattggatacatgacatggtttccattaattggacccattctctgattttttggtctgtttattgaagcagaattatttattattattgttataattgatgcctttgttttgttcgaaaaatcaatgctacattaaataataagagagactagtgtgtgttgtcgtgtgtgtgcttgaccatccccatgcgttagttagataacgtgattataactccgtattactttaaactatactaacaatttgaaattttgtaacttcatctataatccacattctgatgagattttccagctctttggaattgttaagtactaaaagccaaaagtcatgctaaaacaaatcatttcaatgaaattctaaaacaaattgtattttctctcgttaatcaaatttattaaatgagattaaaacggacacctagggtttacaataccatcgatcaataagaatcgacagttaacacttaatccaataaagttggaatacgtagttctttaattaaatagatgtccatttatagatgatacaatattcctttatttgaaataactcccaattgattgtctattaaattttatatcttacccaatggaaatactatgaaagagagtgttaatagcctatagagtgctagctctcaataccatttgttcatctctcaaccatactagtatttttctgcatttaattaagaggtaaataaagtaattttcctcaatttcactgtatattctaggaaattgtttgactaataaaattgaataatttcattgaataatctcataattgtctagctaccaatgagaagtactagtaaagagcggaaactacatagcagaaagagtcttagggtctacgatcctagctttttaggcctgcagaagctaacagttacaaatatctgtaaaaataacctcaaagtgaaaaggaaagaggaaaaaaagcagaagctagttaagagaaacgacaaaagagtctgaatttatcgaaagaacaaaaagagcagaaaaatgtcacatggcaatagtcgtggcttctgtaataacggtacagagtaatcggatgaagaaaattaccaaaaacaaacaaagagaaagctctaacgtcagttaaatctgtttcttttcaccaattttttttttttttctctctcacaatttcatgaagaaaaaaataagattaacacattgaagagcgtgtaaaagaagaaactggtaaattgcattatcccaattcccaaatagagatttgtttggcttttcctctatttttcattattcggacaagccacgacacttgtcttaatgccaccaaaaaaaaaaaaaaaatcactcacatcatctctcttccctcaaagttctcaccttttgagattattacaaagaacacaaaagtacagtttctttattcccttttttgaacactttaaacatcatcactcttgaaacacttcaaatctccggtcaacaaaaaccatgacttcaatttcttaaacaaaaagtttcaatctttttccaaacaaaacccatttcagattttgttctttgagaaaccaacatgagaaagacttctgtttcatctaatagctttggtgggtttttaagtcccggagctccgagttacgctgacaacaaaggttggagctccgagagagttcctcatccttcctccactacttcctcctctgcaattaacggtggtcgtcgtcacatcggctcttcttccgctttaacgacgccgttttacagcggcagagcaattccttcgaaatgggaagatgctgagcggtggatttgtagccctgtgtcgacttacccacaaggtgtttgtttaaattcctcagtgagttctgaacagagaaggcagaaatctaaaagtggtccgattgttcctcctacgttgcctcatccgcatcctacgtcttcttcgtcggcgactgggtgttatcactattctccgaggatgatgatgcggtctatggatgctcctcctaagggtttaatggttgctggttctccgttttctactggagttttggaggcggatagggtttttagaggaagtgtcggtggtggtggttgtgatggctatggtcgtggacctggccatggacatagccggagctgggttgatttgatgagtgaagaaacttcttcacttagctccaaaactgatacaggtaactatagtttctttctctctctctctctcttatcttcttaatgaatctgaaattagacctctttgaatcttgcttttggcaaattgaatcacagaatcatgaaaagattcaagcttgagctggttcttatgaaaccatgttcaaagatctaagctatgtttgattctgaaatttgtgtagaggagaaagcagagatgacgacggcgatgcaatctccggtggtatcaagaagagatatggctactcagatgagtccagaagagacgagtcctaataacaataaccagtctccaccattggttgtttctgtgattgagccacctccttgtagaggtgaagtgagagaagtgaaaatggataaaggagcaagaatgattaagcgtccaaagagacgagtcatgtcttctaggattattaggagagagcaacctgaggttgaagacaattctgaagcttctgcttcttcttcttcttgggatatctcagaaccagccatgactctttctaagtaatcaaagttgttgtatcagttttttataacgctttcttcttggtcagccattaatgtgagtatttgcaggttgcaaagagaggaagcgaagattgcagcttgggaaaatctgcagaaggcgaaagcagaagccgctattagaaaacttgaggtcagtcctccttcacttacttacataagctcctcacaaaccaatcagaggttattatgtattgaaatttcatttggcttgactgaatcaaacaggtgaagctggagaagaagaaatcagcatcaatggataagatcttgaacaagcttcaaacagctaagatcaaagcacaagagatgaggagaagttcagtatccagtgaacatgaacaacaacaagggaatcatcaaatctccagaaactcggtgaagatcacgcatcttgttcgaagacatactttcatgactcctttcatgacttgctttgctcctcgtgttgattgcagaaaatcttcttctgctctctgaatttttttattgaaaagacaatttgatcaaaagaaaaaaaaatgtacactgcgaatttttcttgtaaagctttctctgttccaactttttacttgtttgcataatacaccacacaaagtaggttcactggttccgagggtaaaacataaacaaaagcttcaattaaaatagatctgacaaagtgaagtttctataaaaagacaaagccaaagctaatgaaatgttggtctgctgcattagtatggccggtacctccggtctggtcttgatggtcttgcgtttggcattccatatccccactagcagaattagtttaaaaaacgcagtgaatcagaaccaacttgtataaaaagaatctttgattagtgtttttagttatatatatttatatactcacatcgtccaagctcatgcctccatacattcgaccaaatgcgcgcataggacctccatagccaccaaaatattcaggacgagaagaacttaacatggaacttgcgccagcgctaggtccagcttcatcaagaggcgttgctgaatctattgctacctaaacccgaaaatcaaaacagtgtagcttctttatacatcttagataagtttttgtctaaagcatcaagtatcaagcttgtttttttacctcttgtccacagatttcatgagatcttcgggctacacgatctgcaacaccattttcagcaaaggtaacaaatccaaaacctctatgtccacttctctttgggtcctaattaaaaaaggatgaatgttcaatacatatacaaaaatatctgaaaatgttctcagtgtaacaatgtaacttatataactcacctttggaatataagcatcttgaatatggccaaatctcccaaaataatcgcgaagatcatcaacggatgcttcttgaggaagccgtccaacaaagatcttgtttcctattccccttgtggttggttcccctcctaagacaaagtgagaattctcttaatgagctgaaattcatttgtttctagtatgttggtattatatagtgagtcgtcttacttccataaaacgtggcgggattatcatacaaagtaggggcaccaagcgctgcgtatcttgtagctgcagaaatgtaagcatcataagctccataaccacctggagctccaaatccacctgcaatagccacgggtgggcgcgacattctagccactggcggtggcctaggcggatgatcatcctcttttggtgttgcccgatcaacagcaactgttgtacctcccagatcatgagtgtcctccatcagatcctccactgaatctaaaatcagaaaatagaaagtttcttctaaatccaaatttttacaaacaggtgacaataaatattaccaggatcgcattcatcagtttcttatgttttctttcccatgagtttgacagtcaaacatgtaaagaaggttctgatatcaaaatataaaaactcaattcgggtttggagaagatttaaccaaaaactaaccagcactagagaatgtgataaaccctattcctcggtgctgcttcgagttgtagtcctaacatagaaaatagagaaatgatatcaaatccaagagaacagatctgaccagaattatcaggcacacaattagataatgatagagtaccttaggcatgtataagtctgttatttccccatacctctcaaaatggctgcataagaagagtacagaaagaatgtttatactttccacatctattagaaaccattctgaaaacaataaacagaacacaataaagcagctaagattacttcggaaatctgattcagagactgatgaagggattcgagcaacgaagatcctcgtcactttttttgcaggctgtctcatctcttcctggcaagaataaaataaccttgaacaaagattatcgggtaaaaaaactaatgtcttactgaattcacacaactccatgtaacgaacctttggtgtagccactttaacttccaagatcctgttccctaaaaagtgttcacctttcaaagcattctacaggtactcaaaggaaacaagcaactaagacagattttccagtacaaacaataatatccaacgttcattgaaactaataaatatacctttgcatcttcagctgaagcaaaagtgacatatccaaatccacgagatcttccagttgatcgatcctaaaacatcaaacatatcaaagctctacgtgacattgcttaatcaatgctcaaattcaaataagacaaaaacaaatgcaaaccttcatgacaatacaatcctccaagtctccaaattttgacatgtaatccttaagcccatcggaatcaatatcccacgggattcccaaaacctataaatcaattcaaaattacatataaaagcatcgtagttacacaattcaaacaaaagctaaaaacttgagctcaatgcgtgtgaaaaccaaattaccacaagcttccgttccatgagaagagataaatgtagatctgcagaggaaatgaaaccctaacacactcaaaaagaatctctctttcttctctccctctaaatctctctcacactcgtatcttcctcttcctcctgcaaaccacaagcacatctctttctcacacacaattatcatcatcaaacaccaattcatcatttttgtttttggggcatacaaatttctctccgattaagaaacaaatgaaactaaatttatcttctttttttagattcattgtgaaaattcgaaaactcacacactgaccttttgaaatctctcaatcgctctctcacccacaaggatgccctaaactggcaagaccctttctctggattttcgttttgaaatctctctctatctctctcgctctaatttttcaccttttgaggaggaagcaagcgaagatgggaattttccggcgataaaatgatcaccgtccattgtagctccgcgattggtgacacgtgttgaacattcatgttttttgccggtaagcccataagaatcaatgggccataagaatcaatgggcttatcttaattgggtttaattaggccttataatataacaactcagccctcataatgggcttgaatctttttaacaaacataaaactaaatcatatagcttaaggtatatggagttttaaaaccaaaatacatagtgaatataaattgattgtgtacaaattttttatttggatactagcaaacaatagctgtaagtatatcatatattctattctgtttattttaggaggaaaaatgtcatttaaatcaccactttgccattcgtggtgatttatcatgaactttgctttttatgattaaaatcatcaattaggtgttgacttcaaataaaatcagtaactttcgttgacaaagccaaattagtcataacgttaactgaataatacgaagattgagataaagattgtgatgaaattggatacgaagctgctggcgaggaagacggtgaagatgaagacggaaatcttgatgacttgcacgaaaaagttagtgtcgatgaagaagttgtgggtacggatgtgactaatttggctttgtcaactaaagttattaattttatttgaagtcaacacatcattttaatcacaaaaaacaaagtttatgatttaaatcaccacaaatggcgaaatggtgatttaaatgacctttttcccatttattttatctcattaaattattcatcttgtgtttactttaccacgtgaagcctgaataaaatttgaaattcgaattaatgttcgtaacttcttaatttatcattcacttccataataatataattttatattttttattctttattaaattattcaattttgtcttgtttattcttcttttgtttaccacgtgaaatctgagaagaagatttgaaattctaattactgttcgtaacttcttttccccctagattaattttgtttatctttgtcccatgtatttttattttattttgtcattcactccaataacttaacttattctatatattatttttactttttgtatttgttagtttctttcaacattcatcttaattaaccttatgtattactcttgtgtttaccacgtgaagcctttgatcaaaatttaaattctaagtaacgttcgtatttttagaaaatagttttaaccatttcactctaataactacttccacatgttatatatagttttcacaattgttagttaaaaaagaaggatttattgtgcttttttacattcctctattaatctatatgactatatgtcaattatccttcatttataagtttttgtgcatataaacaactcatactaatcataatgaaaatgaaggttggtgcatctaataatggtaaacggtcaatttttaagtaataaaagagagagagaagtcgccatgcaattgttgttatcgtttaatcattgaccatacttcactactccttatggtggaaatttcaattggttacgtcaaagtttatataacgtccgtgtgaataaatttgacatgtttcaatcgtctacgagtctttcttttattcacacgccattttatgttttttattttattttattttgtggcgaccacttcagagttcacaccattttgtcttaccaaaatttgtaataattaagtataaatttgggtcatttctttttgttttaattcagatcattgtaggactactttaagcatatatggatttaaaataaataaaaactgtgagagttcgattaacattgttggcaagtcacaaagtctttaactacaaggcattgtgggatttctggtactttgattaaatgtcttttaaatttttatcaagctataattaccgatgtggacttatcatacaaagtgttataggtttgctaattattgttaatcagatttcttgccatagaagtgatatattgagatccgtacgtatgttattagtttctctaacaaccaaaagatttagaaacatttatgagtttcatgaatattccttatcttacgtataacaaattctcaagggaaatcaatctaagtttattctatatccggagaacactaaacttgaaaatggtctaaactaaaaccaaaatcaagatattatttgcaacaaataattcagcaatgagtagagattttgagcatgcatgcacatgttttttaatgacatgtgtgggtgagattttcacaattgttttctaaaatcaacactgtttctacaagagaaaatcacgcatcaccatcaccccatcaataaataataaccaatattcacagccatataaatactacttcacacggtagggaaaaagaatctcaaagaaaaatttgacagaatcttccatccgatttttacgctactaagaaaaacgcgaatcacatggtagatcttgaaacaaacgtgtacaactacaaatctaatttatcaaatcaataaaatagaaaaacatcaaacaattataaatatacatctttaaatattcattaaatttacaggataacaatatatctctatcttttatagctaaaaatcatatttaagaaacactatcttatcaaagtacaatttagtaatcaaattacttaattttatatttttatagtgctatactgctatagtttatttttaattaatgattttttttttgttattctacagtgggcaacaacaagaatcttctcacaccacccacgtttcctttatggaccgctatttcttctcttggccaagagcaaattcttataaattggtaaaatatttttttagataaatccatatacttatataatcacgtgcattaattacataaatacacttgtttacaacaaactattaactttttttcttcttaagaaaataaatatctcaagagtatatatataaaaacagaggtagagttggagaagaagaaagtgtagagaaactgtttcataagacttttttttcttcttcttcttctctgttaaactaatggagtggattcgtagagaaacgattggtcacggaagcttctccaccgttagtttagcaactacctctggaagttcttctaaagcgtttccatcgttaatggctgtgaaatcttccggagttgtttgctccgccgcgttacgaaacgagagagatgttcttgatgatctcggtgactgttcggagatcgtgcggtgttttggtgaaggaaggacggtggagaacggagaagagatctataatctgtttcttgagtatgcttccggtggtagtttagctgatcggattaaaagctccggtgaagcgttgccggagtttgaagtgaggagattcacgagatcgattgttaaaggattgtgtcatattcatggtaatggtttcactcattgtgatataaagcttgagaatgttttggtttttggtgatggagatgtgaagatatctgatttcgggttagcgaaacggaggagtggtgaggtttgtgttgagattagaggaacaccgttgtatatggcaccggagtctgtgaatcacggcgagtttgaatctccggcggatatttgggctttgggatgctctgttgttgagatgtctagtggtaaaacggcatggtgtttggaggatggtgttatgaataatgttatgtctttattggttcgtattggttccggcgatgaagttccgaggattccggtggaattgtcggaggaaggtaaagatttcgtgagcaagtgttttgttaaaaacgccgcggagagatggacggctgagatgcttttggatcatccattcttagccgttgatgatgagagtggcgaagaagacgaagcttgttcggtttcaccgaggaatccatttgattttcccggttggaattcggttcaatctccggttaatgattcggttatgtttggttcattggtaggttcgccggaggaaaggattagtggtttggtgagtgagaaggtacctgattggtcggtgtcgtgtgattgggtcaacgtcaggtgaatagagtagtttttgttgttgttgtggagaaagaccgagtcattttgtgtggagattattatggagtcatttagaattgacggtcctgattttaatattttgtttaatttagctcgttgactttgtaaatattgaaaattaaaatattcttgtaagaaagaaactgagagttttttttgtgccatatgttacttattctctattcactttgtaacagagatactctcaatttgaaaaaaaaaacaatttggggcctggaactatataaattggggcttaaggaatccgtcttctacagataatataaatgggcttttttggggttgagcccaatgtactaatttattctgtccttgtgttacacatttttcccctattgtgtaacctcgacgtgtatactcgttcagtcgttcttatgcatattactgagtctccgtagaagaaagaggtcaagaatgacttggtctattttcagataatacatgacatttctatgcacatataattccacatggtgatagaatattttaaaaccaaaattaaatgattaaaccatataattagaaatatcatcacttttaaacgaccaacagaatcctaattatattttaaattagtactatagatcaagaagattccaaattcgaaagtaacaacaactgtcaaccaaacgccgcgttttaattaaatatcaaacaatcttctctcccatcacttgacagaaacattcgcatttaacttcatcgtcttctctctgtttctttcttctccaacaaatcaccaaaaatggagagattcaatttctttaatctgatgatcatagctttatgtttatcatccttcgttcacagtctcgaggttcttcttcttatacacacttctcttctaatcttttatgaatcttttaaaagtaacagagaagtttttttattttactcacagatgggagaaacatgtagttcgaccagcgaatgcgacgccggattgagctgtcaaagttgtccggcgaatggaaataccggctctacttgtacccggatccaacctcttaacccgacttcaaaggtttttatttttagaatttcttgattttttttcttcttctttttttttcgatttcttgatgatggattgcatgtggttttgatgatgggtaggtgaatggtttgccgtttaacaagtactcgtggctaacaacacacaattcgtacgcaatcacgggggcaaattcggcaactggttcattccttgtctctccaaagaatcaagaagactccatcaccaatcagcttaaggtctactactttcatcttattttgacaactttcgtattagaattctgtttttgctaaatttggattttgacttaatttgcaagtatcttttacctttaggtttcaataaaagacaatctcagctttagttggtgactttttattactttccacgtgtaacattctaatttgttgacttttcctccattatttgttgaattgtcaatttgttgtttggttgcagaatggtgtgagaggtataatgctagatacatatgattttcaaaacgatatatggttgtgtcattccactggagggacttgctttaacttcacagcctttgtaagtttgcaatttgaatcattcgattttgtggtctatgagtgattaagtttggtttctaacgaaattaacttgcagcaaccagctatcaatgcacttaaagagatcaatgattttcttgaatcaaacttgtctgagattgttactatcatacttgaagattatgtcaaatctcaaatgggattgactaatgtattcaatgcatctggattgagtaagttcttgttaccaatctcgagaatgccgaaagacggtacagactggccaacggttgatgatatggtgaagcagaaccaaaggcttgtggtttttacttccaagaaggataaagaagcttctgaaggtcttgcttaccagtggaattacatggttgaaaatcaatgtgagtttttatgaacttggatcaaacatgattaaggcccagcttaacaatatgatatttaatttgtgttgtttatgtagatggtaatgatggaatgaaggatggatcatgctcgagtcgatctgaatcttcttcactagataccatgtctcggtctttggtgtttcagaactactttgaaaccagtccgaattcaacgcaagcgtgtgcggataattcctctccgttgatcgaaatgatgagaacttgccatgaagcagcgggtaaaaggtggcctaacttcatagctgttgatttttatcaggtgtgaacttttgaccaatccaactatttgtacagtttatcttctggaagtcaaattttcaaactcttctactattgatgtttaattgcagaggagtgatagtggaggagctgccgaagctgtagatgaagcaaacggtcgtctcacatgtggttgtgacagcttagtctattgcaaggtacgttacattgaaccagattggattctttcataatattgagctaatgatatatgtgtatttgcatatatgcagtcaaacgcaccttttggcacttgtgatgctcctcctccgaagtcgtctccatcaccagtctccggaggaaggatacttcacggaaaccaagaaatcttcctgcgggtaatgctgattctacagctattggattgtcatctctcgttctaatctctgcggcgactctcttgctgtggtgatagttcctcagtgagctcagtttgctttgatctgatacaaatgatttttgatttcccctttatacgtttccagaaaatggccaaaacattcaaaacattattggtgagtataattttttgatggtgttgtgaaaacagtgagatcagtggcaaagctgatactatggttatacacacacactcaacaaaccagacaacccatatttgtaaattctcaatgcagttcaccgacaggagcttcgttgagccagaggaagtggatgaagtcatacaacttggcgctgacactaacctgcaaagtaaacaattaggtttctctcagaagcagaaagcgcttaatacaaacagattaagtgtaagtaaacagattttctcaggtgttttgttggattattataccttataaggagtagggtttaatcttctcatatgatcgggtcgcatattttcgagctgtttgatgcaacgatttcttagctctttcaatggctctagctcttccctagcttcatcttcatgacagtaaaagaaaattataatgagtcataagcatatgtcaaatacctgtaagaattgagagctctgttttaacctgcattgccacgccaataacatttcagaagctcttcaacgcgttgtggaaccacataagccctttttgattcattgaatggatgacggcaaagtaacctttcaccgaccttaggatccagaaaaaaatcagaaggcaaataaaaaagcttgaaagctttcaagaaagcctaatgcctttgtctcttacctttggaggtggttcgttctctccagtcattatatcaacaagagggtaaccctcttttccgaacaatctgtaagtacgctttttacatggaatcgatacctgaagacgcaaaaaaagaaaagcgagggagtttatataaagaagaacacagaaagtttgaagcaacattctcaatggggaaatgagtcaagaattcaaaccttagtaacatcttcagaaagtttgatccgaggctgattgtttatttccacaagtttgaaaacacaacctaacgcagcttgcgcatagcaagtcactaagttggttccaattccaaatgcatctacttcatgacccttttcgggatgaaaagaaaacaagattttattacgtaggccttaaggtaaaaactttttaaggttaagcagagatttacctgtttatttagagcatcgactgtctcttcgtttagatcgttactagcagtgacgatcatcttcccgaaatcaggaactttgaggtctctctctatggcacaaaagaatttcctgacctcagtagaaagataggctaagtcacctgaatccagtctaatgcctactgctttgtatctgcataacggcacagtcatgaatcttcaaaaaaatggcctggtgaatcaaatatggagcattaatggaaaattcgtacacaccccaattcattaagtgctagagcaacagcacagaagtttggaataccactcttcatcacctgttacacaattaggaacactagttctttttaactccgacaacacccataaagacttttaatctcagatgagatgaataaagcgttatataactcacatcataagtgtctacaagagcgagaaaggagtttgggaatgccagtgcatatgaaatgaacgctgcaagctcgctttgatttgtctcggaaaaaattccttgtaatgaagatgaattctatcgtccaccgatcacaagaaagattaaaaagagatgaatcaaatacagaacaatactacactgagaaaaaatctagatttgactgaacaaacctgaatctttgttaggcaagtttggaccaaacatataaaatccttacaagtgcttttcccatcagaacttcgaagcactttgtcaacaatttcatcaaggctctacacaagaaccaaagtaaagtatattcactactgcttccaatattccagtgatacaaaatatcgcaaacacaattctcaatcaatgacgttagagcgagttttttcacaaattttgctaaagcaaacttaccatgaatgagctaacaaaagcatgggaatgagtaccacggaggggtatcccaaacagttttcccgctgcaacattactgcagtaataaacaaagcaagcaaaatgagaaaatcatatcctctcttcccttttgatgtttccataacaaaacaaaaatatcactagtaaagacataccttgttgcatcaaaacctccaaggtagcaatactttgatgcgcttattgcaccatcgggtccctataacaattgcatatcagagatgcaacaaacaaaacctcaacatctaaggctaaacatagaacaggttttgagagggaaacaaacctgagctcttctagcaccaaactcaagcagaagcttagattttcctgcaacaaaccgatgtcttgctgcatttgtagcaaccaaagatgcgtaattgatgagattgaggaatggagtttccaacaattgcaccacctaagtaaagaagcacaagaggaatcagaaactgatcattccaattatgagagttagagatagataataagaactcacagcaacaggaccttcgattctgagtaaaggaactttaggaaaaacaactgatccttccgaaatggcatacacttcaatgtcagaacaatcaagccctcgaagataatcacagaaagcttcctgatttttaaaagagttaaaaaacaatgccaaaaatcgaatcttttggcaagagagattgtgttatacctcacatccaggtaacgaatcacgaacgaaattgatctcttcatcagtcaaattgaaattagcgagaaatttgatgcattcttctaaaccagcaaagatagtgtattctccaccaaaaggattcttacgaaaatacagatcaaacctgaaaacaaagatgagattttacagtgtggattcaaaggatcgaacttttttgtaaattttgaagaatactaacacagatcgctcagattgtttgccagctttccaataagcataagccatggtgaattggtaaagatcgttgagcagaggtgtgaccatcgggttagtgggtccgttaatgacccgacccgattgctttccatcgagaccattttctttcttctccattagaactctgtttttggttccggcgtctccagcgagtttatttatgagtgttttttaggagagggtcgtcactgagtctttaacaaaaagagaatgacgaaactttagtatctaaatttttttcaagtttcaactacagtcgcattcaaatatattttgttctctgatattttcaccgaaagagaatcctaattacttttccttttttcaaaatatatcgttgtatgattttacttttattgttgttttacaaataaaataaaataaataaattgtatgttcaatactagtttttgaaaaaaatataagatttatgtattttcaatccaattttaaataaagttctagctctgtcccttttacttactaaagattaattggagaactaaagctataagtatactaattaagggttaataagatatttaagcattttttaattatcataaaagatcttaaaacaacacttataaatgaaaaacttttaaaagacacttacaaatgaaattactaatataccaaatgtaagtacaaaaatgtgaagggtaaaagattttaaaaaattgtattgtaaatgatcaatttgagaacaagagataccaaaagaacatggtcaaccttaaagataccaaatccatcttgtagaatcgaaaacttctctagaagcttatcggggtaatttacatatccaaagccatcgagtatcaaactctcaaatacaatacgaagatgatctagaaaatttacatccaccataaacatacaacaatctaacaattagtcaattactttgtaataaaatttcagtcctttttatatatagctattagatccaaaagattagactctagaattcgtgtcaccaacaattgattttaaatagaaccttagaaaaaataaagacagttaaatgcatctccattgtcagacagctttatggcttgcgttctaagaaacaagaacacatagagatcccgaagttgggacactgttcaagtaattcgatcttttaggtcaggttgtccatcaaacagagcttgttcccctgcaaatccccaaatatcgtaacgttattaacattgtaaatgtcctaaaacttccttaggattccaaaacaacaagactttaccggttatgtttgcgttggaatgaccaatgttcaaccttggatgagttaacccaccttcccgactcatctccttaagtaacaaaaaaaaattagtaagcaaactagctttatggttatagaatgaaaaatgtgtaattcaactacgcaccacgggtgaagtaaggagagggaaaggtccaaagtgactgcgaatagaaggttccaaagcgtatgaagaagccacagtattgatcatttccggtgcattagaagtcgaagcaaactgattggtatgattaagcagaggatcattggttgcttcagggggtcgaatctgagagagttgcaatgggtgtaatgtagttccaggtaaacacaaaggatgcaagtttattccatttctcatagtcaacatctgcaaatatcagaacaaaaaaagacttatgtcagaatatagactggttttaggattttggttataatgataaacataaggtatctttagtgacctgaacttggagctgaagctgtttcagatactcaatggcttcatcaagcattgaagccttatccgtcttccccaataaacacattgcaataatcagacacaaaaagaatctacagaaaatagaatgattcatgtagatgtctctctatatatagtatcattaccttatttgaattagggatgagactttgtaaagctttcattttttcattaattctacttctcctcctctgttacaagaaagataaacataaatctcaaataagaaagtttctacttttgggagagactctaaaccaaaccttctcagagagattatgaacttcagcagctctgcatcttttagatgaactacgagaagaaggacctgacttggaagagggagcttcatcaactacagcttctcctccttcctgtattttcattgaagcaaattatcaaacactcggtgtgcattcattattacactcacaaatgacaaaacttcactcaaaatcacaaccaaaaaaattgcggattttaagggggaaaataaagtacagatccgttaaagagaaatctctgtagaaacattttctcgggaaagagacaaagaatcaacttttaaaacatgcaaaagataaaaaacagagattgagaaaaaacctcgctttcacagtcatactcatctgtctcgttgccactagctccaacggaagaagacgatactcgagtcccagagctatttccttgaacgttgttattattaccaccaccggagaaaccaaaacacgcggcggctgagcctgatcctccgccgattaaaacctcagagaaatctccgacacgtttcgacataagcacagaatctgacggtggatgatgagaaacgagacttctcgagttatctgcatgtgggtcaccgctcccgtgcacaccaatcaaagacgccgtcgttgtagtcgtcgccggggagtagtaagaaggtaaaggagaagaacggtcgaaaatatgccggagaaactgagagatttcgtcggaagaagacggaggatgatgaagatgatgattgatacgagtatcgtaaaccgaggaagaagaagaagatgaaatcaatttcttatctcccatcactctctgcttcttctcttctctttcttctctctgtgatatcattacaccaacaacaaaaaaaaagcagttaaagctaaaacatttttttttttaaacagtctttgagattttatgggcatggagagagggagagtgtctgtcacgcgccagctaagaaaacagaggttaaaatgattggtctgtcatttagttaaaagtgaaggtagctgttactgtagcattagcaatgagcttgtgtcagctcacggtttttcaaactagtcgtaaatattaaatgtttttactctcccaaaacttttcctcgtcgcacgtgagacacactaaactactactcgtagttagttttttttttttttggggtaacaaataatatacaacctttatctgttttctcatagtttattatttaaaatggaaatctgctacggatgaaatcgataaagttaatattcatatcatttagaagaaaacaaaaactgtatttgtatatctcaaagtttaatctgatggagagatttttaagaagtccattaatctatagaaaacaaaagttatacgtcttggttgtttgacaaaagtatttccatttctagtaatttgtttttttacttgttaccattaattagtattcaaattttgtatgatattgtaacccgtggcgtgataaacaagaatacattagttgcttgtttgctagtttattctattgactagtatataagaagcccatgctactgacatgcgttaaattacttgcgactttgatttgttcttgtgttgtgaaaattattaactttacggtgtgtgttttcaactatatacctcgttcgtatgctttcaaattggaacataacatctgctataattaactatcgaatttttagtaaattcattttatatgatccagctttatatctagtgttttatagtaagttttatagaataattctataaataatgatgaccacgttcacatatccaatttgcggcgaacaaagtgaatgcacgaaagtttccaattgcgttctcaactgtgcagacagcagcatcaattctttaatgaagtatttttaaaatattggtcgtaaatttgtaaatatattttgatcgttcgcagcgtatgaagacttaaaaaaaaagaagttaaagttatatatatttacactatatagttgttagtagtattttattttagtttttgcactgaaaacatcaatcgtacttgttcgcttgatgaatgcacaaactgcatcatttatttcattgcaacattcacttaacctcgtatatacaatttttgaaacaaaggaaaagcatatgggagacaattgctaaaagctgcagctatttgttcagcatctgcttttgattcaattattttattaagttcgtttttctggtactatttatacatatacaaaataattgttttattaaatatcagaattagaaagtgacattgtagagtccaaatgcttatagtggaatttgtaattgagaacatacacaacaaaatgcgaaaaaaaataatgaaaaaagcgtttaatcgtcaaattaaacaagggatctgattttactcaattactcaacatacatatctcattattttgaatatccttatcaaattcaacaagatatacacataaaaagacaagatttactacggcttctagaattgtcaaagatattaatgaaacgatggttgagatctctttaataatttgttcaaaatcagcatgatacactttttattttgtctagattctaagaagatagttgaatgttttctctggttttttaattggtggtttgatagaattttcaagttgagtctctgtatgttaaaagacccatacctcgttgtcttgtctgatttgaaagtcggaaaacaaaataaaaaacaaagatgatcctaaacttctttttcaccttttatcatcgtttccctttttctttatataaaacactggcaatatcatatttactcatatacaactatttacccatctaaaacagaccaaagtttccgtaatacatatgcaccataacaaggataacataaatcaaactcacgctattaaaaagatcaatgttttttaagttgttcgttggtagtttcgaagacaaaccaaccataagtaccttacgaaactccagaagagatatattgcagaagtaaatgatatgcatgtgttacacttaacacatataactacatcctaaaagattatgcgacctaaggacaaactcttctcacacaacaaaaacagttcttactctgtttttttctccaaagcttttttcttttcgtcacaaattctgtagcggttatctttctttttttttggtctaatgttaaactcggttatctttttattgttcaagacatctatatattgctgatttggacaatttacaattctccatatgaagattgttggtctcttcttgctttattttgttctgcatttgacgcaaaatacataacatatatacaactacgaatgctaatacgtgcatttcttaagttttggattctccatatccagacatgaagttatatattagatggttacataaactctgcgagagggaccacgagatcattaggatctctatcaaaaattcaagatcacacgtcaaatgagatccccaagacaactccccacttggaacctaacaatataatcattcattttaaaaaggctagctatcaaaagtaaaattactcaaattcaaaggctttaacatagaagaacaggtttcaactgtgttgataaagatatataactgaaaacattctcataaaaacaaaatgtaatggttaatcaaagtagttactctataaagtctgatagatagtacgcaatcatggcgttgtttattcattattacaataatatataggtcaacaactcaacattaatattgataaaagtgttcagtccggtcaaactgaattagagttgtgtcgagataaatccgtctaacgttgaatctctgctttaaccaatggtaatcaaaaccaaaaaaaaaacaaaaaaaggtttaatagagtcaaattcaattttcttcacaaacaatcaatacaaaagaactgaaaccgatatcaccatgccaaatcgatggatatgaagttttcatttggtctatctacttcttatatcaaaatcgtaatataaaaaaatcaaaaacaaaagctatacacataaccagattggagagttgttatattgttatgatcgatagaaagaaaatttcgagcacacgctaatgtatcaagaacatatagaatggaccataaagacgatattgtagttatattttttccaacaaaaaaaaaaatcacagatcggacggttggataagcaagtggatagagaggagagcctagagatgcgcaaaaaaataagaagcttacgtcacaaacctaagcattgatctgacggtgggaaactcacgagagattgagaagaagatggtgggaaggtgctaggatctggtgtgacatcgtccttttagagtattcccaagaagagtataaaacacacgtgtcgttaattcattagttgattggtacaaagtttagtaatgatcggacggtctaaataaagctgagttgttgttgtactttagtttcgatacgcactctataaaaatcttcttcttcttttcgcgaagtacaacaatcctatcactttgactctctgtgttctacgctcaagttctatgcgcgttggtcacacgcgtacttgagacagtggaagaatttttagttttgtcagaagaatcttcttactactaaaagatatgaataacgaactcataaagcaaaccagaaagaaaaaaatatcaatcacacaaagtttaaaaatgtaaatatctaatttggtaacattttcattaaaaactgtccaaagctgttatgggctaggtccaacaactatcagaacattcaaggagaaaacaagattttacaaatgggcttttaaatggatatagtaaacttaaaatacttttcacagactacgttcataacattgtgtagggttaacatgtttaaacaaagtgggccttaactaataggcccattttgttcaaacgatgacaagtcattttctcttattaattgaaaaggttttaaggttttcttctcacaaaaacgaaaaagctgagacttcgctttaattatcacggtctaccataagtcctgtcattttattgaattgttttcttcaataacgtgatgaaatcaaactatacaaatccacaaaagcgcagacacaatttcttgggaataagcctagatttgacttatcatccatagattagcaattgcaatcctgagatctatgatttcgcaataaattctcataaaatacgttaaacataaataatcatgaaccactgttgcgtaggtacagataatacttaaaattgttacaaaagttgcgttacttaatttaaaacaagatttctctaagttgatattattttcttttgattgggttgctatttataagaaaattgtataaagtataaaacgtaaagtaacaactgtataatacgaaatgatcaacatcatctttcctgatttggatatttcgtagttagtattttgataccatagtctataactcttgtatatatataaacgcaactataaaattcgtaagtgagttacagaaaattatgaaagggattgaatatggagaaaaagtaggtacgagtcaccatttgtaccctaatttgggtggttcccatgcttatcacgacatttttagatggaccacgagattttctacttttatgtaaattataaagttgtcaaaataagcaaacacacaaaataatatgctttttcccaaattggaaactcgtgatagtttttagtctctaataacacgaaattgtgtgttttgataacatgttgggatgtgaaaacacctttaagactttgttggtgaagtcggaaagcaaaatcgttttatttattgcctaatcagtgttactaattttaatcttaataattatttgtttaatctggtctttgtatcagattttttgtttcgtttttcttagttgttggtttatagaatacaaaaaccactaccactaggataacaacttttaatttgttcggctcgaagataatttccatttggttaatgggaactatttcagaaaaaaaacgagtgttacaaaatgaatgcaaaaaaaacacaaatacgatgagagtttactataaatggaaattgtgttgaaagcgatgggacaaaacaaaggcaataaggtaagaagattgtcggcgaaggacgacaatatatgatgaagctgtgtgcgttttaattgattcttcaccacttccacacaaataagagattcttcaagcacaaaaatacaagaaatataatttaaaaaacttgaatttactatacaaaagctctatatacctttactgtggcagcaaaataaaacaaaaaaatataccgcttcagaactaccaaatcaacaagatggcgaaatagttgcataagatagcaacaaatgatgggcgagaatgtggcaaatttcaaacggcataatcatgaatatgttttaatagatcaaagatatgactaaattgtgcaagaaaaaaacaattacatcttcaatacacttctcttttcctcgaaattaatttactttttttgcctttttcctatcgatgtcttcgggcaataagacgcatcggactaatattctaaatatggaaactgacatcttgaatggcaatacataataaaaagaaacaaagccgaaaagcagcaacaaagaaaatatggcaggaggactgtaaaaagtaagagttttctttttaatcttgcagagtaaaaacactttttacaacaagaaaaatgtgatttgtttcagagagttttctactctcgtgataagaggtcgaatctatcgtctacgtgtctctgcagaatagacagtgcttcgtcgatacgatgcaacaaaaaaaaaagagagatcttaaagtactaacttattaataagatcttattttatatttctggctgggtttactaaagttgctgcagaacatgagttcgctcatcgctggtaataataataatatctacacagtctaatgtttcttttgtgtttagagtttttctcgacaaagcatgagagacacctgtcctcttttgggaccactctaattttttgttatttcacgatttttatgcggatgaatcatttctaaattagtgggcgtattccgactaatgttcccaattttaatagtattaggttttctcataatatcttctttatgattcggtaccaagtggagatatttgattattttcctttggattcacggcatagtggatataaaatttattttgtctttttaaggtaagagtctaaaagtgtgtcgacgaaaaaagggggtcaataattttttttttaaaacgcaaaagaaaaagagagttgaaatttatcattcttgcaatgttttcaaaatattgatgatgttgaaatttatatgaatcaaaagtgttcaatcgaagtaacttgaatcgatttagtttacattcacactcggaaaaaggtaactgaacaccaaatcaaattaagttcaagtttttcacatttacatttaaccaaaccaaaaactaaaggaaaaaaattattgtcaaagcttttttaaaaaaaagagtaaattgtatagtttcgtgtgaagaagtcactatgcaccgaaaattaaatatacaaagtcaaattaattacagtctcgtttttatgtcgcataatcctgaaaatataaacagaaatagattgaacacttaatacaaaccagttatctactgagtaatgaatatatcatttatacacacgaaatacaacaataattaatagaatttttcaatggcaaatccatttcagatttcaaccaaattagtgacatacctagtccaatatcacattaaattgtgaatctataacatacaaaaaatgcatataaccgtcttcacaaccacattcttttatgattggttttaaaatatatgaatatgaaatgatattctgaaattgtcatccaatgagtaaacagatcatagtttagaaagtggattataaaagaatagaaaatatcagtttgagattctagctaggtattgcttgcaagttgtttgttttctaggagactccataagcaaaaaagcatatccactaattatttaattatatctatattttattaattggtatcttaaacttttcgattgaaattaaatattgaagcactaagaacaatcacgaagttgtgtactagcaagttgggttatacgattatcctcgtgagacaacaaatcttgccccttatagaaatcaattaaattaaaatacaagccctcatgaccattaacatattaacgaagtgacgacttcagtgacgaaattaggttcatcttagatttaataatccagaaaattcgtacttaataacttatattacttttaaaatttctgcagacagtttctactcatggaccgactgattccttatcgtatgattaaaaatattatttgactaaactaattataaagtttcgaatttccccatgaagtctgcattcattggtctatcgtaccgcttcctcgtacactaatctccacttgccttcaaaccctagacaaattttattttcttgacatgctcaaataattacatgtacaaatacgtatatatactagtagtatctatgtctgcttgtacaaaaacatttcttgcaatacttgaaatgttttgttacttgatgtgtatataagttttgattggtattcttagaatgatgattagttttagctacatgaattaaggatgaaattatctgtttatcaaataggtgatcatttgatggaaatttttgttgcgacgtgatccacgtgaactacaaatttcgttggaaataaagaatataagtaactcgtcgtggtattcaacagccattgaataatttgtggattcattctagtatttcacaaaattattgtatattctatattttgtgagtttgttacataaccaatggaagacaggattattataaaaacgcataatagtaggtagtcatgtaggagccaagtacaattcatgattaatataaggtgttatatagctcaaaaattataaaataattaatttgttgattttgacttgtagattcataaagaaaatgttgttttcttgattaatgtttatgccataaggtactgctatgacatactgtgaaatactaaatgacaatcaacgagaggatgtttcaataaattgcgtcgtttatgactcgtttaagaaaagattattacatgcctatactatataacgttgtaatagtatatgaacaaaaatatttattatgttgaatgataaaatcataaaagtgtttcgatagttttgaattcaagtctccactctattaaaaaaaaaaaaaagaagcagaaagacagttgctataaattcatacaactccatctcattttgtatcattcaattaggtaaataaccataatgtcattgtaaggcaaaagtgtattgtcatagttctccatctatatatttttcgttagtaagaaaattccgaatctaaatatagatataaaaaaagggatagtcttactcacttaaaatgtttatcctagcataaacaatttttgtttgcaattctaatgcgattataaaataacaatatcatcataaccccattgtaattttaagcattatacaaatagaagtttttacctagtattagtaaaaggacccaaaggtatatatgataaagactattatgatgtaacgtaaccaaatagatgaaccaagagtttaaggaggaacaaattatacagagtaaaagtgaaatctaggaaaggattcatgaataagtgtaagagtatgaaacatttaataaaatctttaaacttttgaattaaaaagagaattaaaagaggagaaaggaagtgaagccgagaagtctctctcaccattataacaatgtctgacttcttttgggtttctgtgagagatagagagagaaactgattcaaaggacacattacttgaaaatgaccactcatccctaataatccccaatttttatttgcctcttttctctttatacctaattttctatttccaagatttttttctctttggaatattattcatatttttttttaactaacggtcgcatagcttgtaggcattatgattttttatatttcatagtctgtgaaaacagaagaaagagatcttgcggttgatattcattttaacttttgttgagatcgcaaaataactgtgagtattatttcttactccattagggaaacatcagaaccaatctacttctgtttctctctctcgtctcaccattaatactgtaaaaaaataaaatatcactgtttttttcttctgtcggtaaaatatctacaaaatggacaaaaccaaaaatatcattttatttttttcccgtgatgattgatactgcaacttctaaatagtataaactaggaaaattcgtaatttttaatggttgactaaaattctctaattcaataaaaggttagataatatatatatgcaaaaaagctttaaaataactgaacttttctatttggcatttataagcgttgctgaaccaaataaaatttgttcagtttttttttttttatcaaactgattttatagatatagaaataatttagtctccattacaagagtaaaacacatcactaaaaactgaaagaactgcaaacacaaacgcagtataagagaataatgcaaaaaacatggggataaaccgaaggtgaaagaagcttaaaacaagcagaattcttcctagctcaacggtgacttcgagtgacttgaaagattttacactgaactgggagtccatgaacaattgcaaaaccaaagagtcttcgttccacgccaacaagagggcgttattcaatgataaggcagtcttcgctacaatatcttctgctaccaacgtgtaggtgctagaacgataagcgatagaaatgtctcgcaagggaacttcaagggttttagaagatagcatgtccaaacaagatgcaacagcaaatccataaacaccaaagaagctttcattccctgcaaataaagatttcccaacaacaggggaacttgatagaacatagatctccataaaggagtaacaatggcaaacaaagcacaaccacaaacaaagcatacaattagtatccttgtgaataccaaaagcaattgtgaacaagcgagaatcacaattccaactccatgagttagctgaacatttacccatctcaactttagagaacctaatttgttcagtttatcagattttatttacgaagtgaacttaaagtattttaggattcggtttatgctattcaaaccaatgttagcacaaggaaaccatgtgtatacccacctgtcaatttttattatatgtaataaataaaaattatatatctgaattaacgaaactataatgggtgttgaaatatatttcacacatgaatgtgtttttttcatgagagattttcaagaaaaatgtaaaatgaactaaggctaggaaaacattaattgaatagatatgaaagaggaataacaaaacaagttaggactgaacatatatgtagataggtgcaggtaacatataaagaagtaatgttttaaaatcttaataaatgtattgaggagaaacaacaaaagacaactcattgacaaatctcttctcaacctttttagtcagaacatctcaaatcacaaacttatccaatttcccatatatccaacaattatatataatattatttttgtaaccgatggagggaaaaagatttccattaattttttttgttcgcctaagttaacaagaggatttaggggaaaataagcaaaatataagccgatgattaatgaaatgaccaagaacatgtggggatttcaaaggttcatttttgtttttcttatataataataaaccttaaaaatataaaagattcaagaaggtctcatgagaggaggttggaagccatttgtctgcagccaattttgatgaggagtagaagtagaattaaaaatctgattgtgatgatgaggagagaatcctgatgatgctgcagcatttgtcaacacttggttcgtcgaggcccgaccatcaaaccggtggttctcagccgccggaaacagtgagaatccgcctccgctaccaatgttgctgctgcccggaaactaatttaccaaaaaaaaatgcaattctttagataaaatatattcaaatgaaattatggtatttgcatttgtggttatttactcacttggtggtttgaattgggagtatggttaagcattccggtttgacctaatccaagaacttcattagagtggagagaatcttgttgttgttggttcatctgaaagcaaaacaaaagaaaacatgtttataacaatataaactatatattaagatataaattattgttaataatataagattaaactctaccctgagccgcatatcttgacttttatgcttcgaattagccgaatttcccaagctcaaatcgaggttgtgatcttgtggagtagtaggattccctgatgactctatatacaccaaattcaaaatctttaaaccaagttcgaacacctaagagatgaaactaaggaccaaaaaatatataaaattactcgattaaatgagacaatttaccggcattgagttcctcatcgtaaatactcggatcaaagttggtcacggcgtctttgccgttacatttgattgcagctttatcgtaagctctgtgattatatataaaataatgaaaatcaattagtaacgagaaaaacacattatacaacaatgtgtgttgtagaatcaaacaaaaagacatttacctagcagcttcgacctcggtgtcgaacaaacccaaataaacatacctattttataagattcaagaaacaaaaactcaaagttaaaataacaaactaaaaatgaagttttcgagtgaatataaaatgagagaaattatactttttgcctaagaattgacccattcgagcttcccaacgaccacacttatgcaaagtgacacctctatacttcgaacttcctcgagggaagcctgtgctttgtcggcgaagtacgtgtacgaactcttccttggttaaattagtcatctataaaattcaatttcaatattaatctcccaaacctttaaaaatcgttaataaaaaccaatatagtttataatttatatttacctgtttcaagtcatcatcataatcgtcgatgttgaaattgatatccgcttctactccacggaatttaatagcagctctatcatatgctctattaaataaaacaaaattaaaattaatttttataaatttcttccggtattttttaaaaaataaataaataacaactcaatatagagagagtcaaagagagaaaaataccgagctgctgcatgagcagtgtcaaatccacctattcagagattataataaattaaaattatgatgacatttttcaacaccaaaatacaaaaaaaaacatgaggaaaataaaattacctaagtaaacttgtttcccacagtccctgaaattcagaagaacaaacaaaaaaaaaacttaaatttataatctaaagtacgatcgattaacgaaattaaaaatatgagattattaccaaatatgagattcccatcttccggtacgccggtaaaacgtaacacctctatactgagaacttcttgatcttggtccacgccgactctttttcaacggctgtgccggctccactacggcagcggcaacgttggtagctttacccgcggacgatccggtggctagatccgactgacaaaacttaacaccaaaccagtgagcccgaggaaagccagaagcaacaccaccgccgttagaatccatctcagggaagaactgatgggtgacaagtgggttattgggtctgacccggttaagttcatcgtcatcggatccatcttcgataacaacagctgaagagcttgaattagagaaagatccaacccgtttacttggtgaagaataacaaaactcttcagattcttcttctctttgtgtttggtgtggtgcgtcgtttagatcccacattttttttgtttttttttggtttcttgattttgatctttgaaggttcaaacttcaatcctctggtatgattctcctcaaggttagaagctaaataagagaaaccaaagagaaaagcttttggttggtagaaaataaaataaaaactttaatgaaaacaaaaaaaaaagagctaaagagagagagagaagaaaataaaataaaaatttgatagattgcttctacgaaagctttcatttttatcctttcctttatatttacttccactgccctttctctctctctcttctcttgtcactgttttttttgtaaaaatttaataaaataatattattctctctctaaccacttgctttctttggaaaaaagattatattcgaaacaattcctcgtattggagtttctttattttttttatttttattttaaaaaaatatttccactttcatttattatctatgtatacaaacatcttctttgattaatcaaaagattcctttaatatgtaatttcatgttttaagaaagtgaagtccacggcttggttcggtaagcaattctataaaaaggtgttttttgcaagaaaatgaataatctagtagattacttcaaaaccccacaattttgccaattttgatatactttaaactcttggaacaaagctttttgtttgttttttcctttttctatatgaataaaaggtaataagatacaaatacaaatagatcacgcatagatctatatttgttaaagatgtatatttatgtacaataaataggtgttttcatgatcgggcaaattcaaagtagatgggatattaagtttttgatactaaatagattatttatatgtttatttaaagtggagttccataaacagcaattccttgaacacaagcaagcaatagggttctcactatataaggagttataacattttctaaatggcaataacttgttatcaagtttgtattctatttccattaaaatactttgcccaaacttatactatgtctgaaatcataattcaattgattttaaactatctgttttcttaatgagttattccaaccaaaggcttttgaactcattgatcaaactatattaattgcttactttggttatttgactatttttctttaccataataaaaagtctttcttaaccgtagaatttaacgatctagatttctttgttttcttaatgaatgataactcccagtcgcccatatactttcagacatttttctacacttgccaatataatgtgaaacttccaccatttgcattctctgttcatatttagtaaagttgctgattttaacaactgttgacaatattcattgatgattaccagattttaaactcaaatatcaagagagaaactttttctatatagtaataattgatagaagaaacacaaaatgttttgaactgaagtttgtgcaatggctttttttctcaagaaaaatacagttgtacatgcagaacatgtgacacgaagattttagacctaatcaaaattaattacaaccaaaacactcaagagaacgaaatcgtagtggaaatagctcacaagttgcttcatcaacttgctaggaacaaactaattttgagatatcataagctagtttccatctaatttggtgcaaaatgaggcattgctttgctttaggttaggcattcaattcttatgatttacaaccatttggttcggtttaatgaaactttttgctttttgtttttgtttgttctaatttgaaatatacaccaaaccagattactaattattctatttgggtttattataatcgggcttgatcggtaatgcccagtaaaagatttaaaaaatcgattaagaaagggagagattacataagaatgagtggcccatataaaacccttgaggttaatctgaaaatatgagaggactacgaggatataaacgtaaatactcaaaaaacaaaaaaacgttgatttgttattagagagaggaagaggtatcgaaaaaaggaaaaaggaattatgagagaaaaaggaaaatgttaccagaaaagatcaatcctttagtacggacaaactatggggtccactttttccctcttccatccaccaataacctttcgtttctctctatacctcgtattttcatcttcaggcgctctaaaacccgcgtgtttatcaccctttcttataaacgcgcgtgaggaacacgagatacgactcgagatgacgtttggtttctgactagaatgctggagccaactgttattacattttggtgttttatataattataagatttggattgttagattcgtattttatttgtttgtgagcaaattcgtcatcctttacatcaccataatatttttttaatctttatagatattaaaactattactaactgaaaaatctccacaaaaataatcgaatgaaagatgaaggagatggacttgtgtcggaaagggaaacatgaataattttattttcgtgtatttgttgggtccaagaagaaagatgggctaacaaaaaaattgaaaccaaaatttttgaggttgccacgtcactatccactttgtgattttaccatcgagttttttttggagtttattgcaatgatttattctaaaggaatgaatgaggaattgaagaattctgtgtcttttttcagtgtattccaaactcatcaaatatttccatgtagtggatttatcatatcataactaaagctgctgatatattttactaatcccatatgtcggtcaaaatcttaaataattttcaatgaacataagatatgtttcaaatgtaattaaacatcaaattagttgatgtaggaaacaaaaaaataattagaggaaaatagagtaggacgatatgaatgtgaaaataaaataagaaaaatcagtgaaactttcaatgaaatctaaaaatctaagctcctcaaaagctttttacatgacacgttgtacatattttgagtgggatgatgcaataacaaacattccaataatggctttcgttgaacatgttgctttcctcaagtggaaactactgctcttctctctctatgtcccactatttctctctctacctatatatatatatgtgtattattattagcatattttgtgatagatagaaggttgattttcattgagatgtgatatgtctttggcatgatattatatatacataacacatacataatcatatttctatatatacacatgtgatatatatgtatatgcgtttgtgtttgtatgtcaataattattaaagcccacggcccactttacagagagatactctgtctcttatatctctttccaaaaaaacaggcccacaaaaactattattattcccatttacccctttttttttcatttaattttacgtttctgaaaaatttctacaactattcatcatatgtgctcatataaaacaaaaccaaagaaacacaaagatacaattcctaattttggctgagtttatttgacctttatactccctcgttatgcgacatatatgatatgacaaaaatgtactaaaagaacaggtattattgaatataaacaagtaaagagtacaatgataccgtagaaatcatttctatacaatctatatatgctttcaattttcggtttctatgtccaataaataaaagttgtatccccacaagccccaacgatgtcatatgtggttgttaatatgcctagtacattaacctaaacataaataaatagaatcaatgcctatatctacttcaatctacttgcctatgtgtccacatagtgtggacgagtaacaataaattcaattttctttttgtaaacaattcaagaattcgaacattaagtaataaacaaagttattatatgttaatatctttgacatttttcatacatatctaaaaatatgttcaaattatgttatgcctttcttctataaaacataagttaattgttgtcaatcatattttaaataattttgttcattttttttattttatttttcatcattgttcatttttgttttgacatcaaatatgtatttttatatcaaaaatttactttgaaagtaaaaaaaagatgtttattttgaaataaggataacataaaactagatatgaattatatgaaacattgagagtatatattagaattctcttcctcctttaacttcttcagaaactatgtcataaatgatatatacacgttttcagctactgaaacaaaaatattgaccggtagagtatatcatagttacatgtattaatggttatgtccaataatttttggatctacttgtttgaatatgaaagcaaatcaaaactgtggatcttgctgtatgaatactataatcatctctggcagtctgacatactatgaataaatatcaaatacaaatgttattattttgatagaaggtaaaagatatacaactgctcgtatctaaattttaagatatgtctacttataaaaaaaaaactgcaattttggaatcgcaatcaagtacgagattaacgaacgcgtggaaaacatcggacggtatcgatagaatctcgatttgtgaggttgtccaaatcttgttagtcttccaaaatccaaatatcgttaagtaggatcctcttttgatcaaggttacgtggcatcgtattatttgttcaaagtgggggccatgcgagcgagcggctagtggatactctcctcgatgtcttcacgagatttatttcaatttgtttcgatgtggtgatagtatttttttctttctgaaattggattcgactcgagtaataatggccaaaatatgaaagtaaattagaaagaaaaaaaaagactcaatttaaaaaagaaaagcaagagagaagaatgttttaagatttttcaaaatgaagttttaagttacaaggcttaacttatcaaagaaaaagataaactgtcgaattagagacatatgattaagaatttggatgatgatatttatatatgtgttagtacaaagcggatttacgatatggcttggggacaaatgaatactcagggttaaattattgagaagggaaaaaatctaaaggagatgacaaaaaagggacaaaggggaacacgttaatgtacaaatatagtaaggagtcaggaacttaggtacgatgtccatacgttttgcggtccaaagactttccatttttgtaaatctttgaaattaaccccacttggttcccaaacatccttcgacaccgacgacacacacaaacacaatttatttcttttaattaagttttactttttaaccttttttggtactatatatcgaaaccacacccaaattttagtacggtcccatttgcaataattcacgttagttaatggagggaccaacgaattattccgacttttcaagttttcatcaatatgggaatcatttccatttttcactttaatttctgctttaaaattgtttcgatgtttcagacaaaataaattaatttataagatgatggacgataggtcgggcctaactgaggcttaggtaagagatacattatgattcttcggtttcaagcttgaagaaaatatctcattatggttagttgacaagaaaacgacagcgtttgatataccattttattttttagagtacatattattatagtatgaaagcaccaaagactatatagtctaatttttagttgatctatagattttttaaaaagtttgcagtcaaaactgttgatatcggaaataagataacacacgaaaccccgaacgttagtcatgggaatctattatcaccaaagtaaaagatggaatgaagtttagtcggaatgatagacactgagacacccaacgatggtattataatagattaagaccttgaatgttttgtacattttgtaagagtttttgggttttgtttttcaaaaacttattttcataccaatcaagattttaaaattttggtttctctatagtttagaaaaactattttgttgtaatttttcattcctcattttagttttttttgttctcttaaaattttgaaaatctagtttatactcaatcaacgttatttttttcaaaaccaaaaatcatttttttgaaattttttaaacaaaaatataattacaaaaatctaaaactaaaatctaaaatctaaatccaaaaactgaatcgaaaatcaacctccattcagggcctaaattgtcctcttacaatacatttttctttccatatgtgatatcataacggataggtaaaaatgaataaaataaaaactttggtaaatggtaacaaaatatcatcaaaattttaccatttaccataccccaaaaagcaacatagcaattaaaaaacaacaaactatcatcaaaggcattataagagaaccctttgagtacaatgaaaggttcttgaatattgaatgcacgaatcaaaaggacaaaatgctaagtctatgtaatttttatgtatttacatttaagtttgaaaacatatcgttaataaaagtattttgtatgataaaaaacttttagataaaaaatataatagcgatttacttaaaactttgaaaaagtttaaaattaaatttaaatacgtgaaaatatgatgaacttatgacaccacaatacttacggaccaaaaggacgggatgctaagtctaaccattttcacgtatttaaatttaacatttaaatttgaaaatattttttattttacaatattaattaccaaacagcttttatttattttgaaactgaaaatttaaaacaaaattattatttttagtaaaatcaattgttatctataacgttaattaataaagaaaccaaaaaaaatatttttaaaaaaaagaaattaagaaaggaacatacctcgtgaaatagggagacgtttgtcatcagggattgttgtttgctaaaaagcccatacgctgttttgcgaagcccatatcatattgggccaagattgcaaattgtagatgagagatctgagtcatcttcatcttctctcctagggcgagtccttaacggtctgattctgagtcattgaaactccaaacctactcgtcggttgttgatgagagtttctttgcgcttttcagaaagaaaagacaggtccgcataagatgcatccatggttggctagaaatcaacatcgattgatcaaacacgagagaccactccaagtggcgttggtatggatatgatctctaaccagtaaccttgtcggattaatcctccatgattgatcagagattgtgaaatattagagagacctctctcgacatggcgttggtaaagatcggcgacgtatatggatcatcaatttcacggtttcgaaatcgacgatcgtctttgtaaaacagtagcagagaaaagaagaattttgtttttttgtctcttaaagaaaaattatgatttcccaacacaagacagatgaatatttataaggaaaggctcacgcaaagaaaaaaaggaaacatcaggttgttttccttttttcatatttggaccttaacaaaaaaggaaattgaatcgcacaattaaggagcgtttacaacggtcttatttttctaatctcaatttgcagatttcgttaaaaggccacgtgttcgatttttttttaacgcataaattgtattgtaattccaaaactacatcgttttgaggtttagccattaaagtcacagtcacactttcgcttttcccaatacgaacaagcggtgacgcatatctcctgtatcatcactcttttacttccggcgatctctctccgacggccaatggacgccgtcctttactctgttccactctccttcactcccctacgcgcatcatcctctccttcctcgccgtatcttcttctgccgaggtttctctccgttcagccatgtcacaaattcaccttctctcgaagcttcccttccaaatcccggattccctcagcttcttccgccgccggttccacgttgatgacgaattcctcttcggtaagctccttcactcaatttccagttccaaattcctctttccgttttgggaattttgttatgcatgcgaatatctgatcattgggtgtcttagattctgagaattttcgtagattagcttcttgtaacgattctatgtaacgattgaatggtatactagttactagcttagaccggattcttcgagattgcacattttagatacgggattcgatcttagcctagtggaaatttgaggaagcaaagtcgcttactcgcttaagtaatgagatagtgaccaattttgaatcgagattttgagaatttaggcagccactggttggaaggttaatcaatattgtacaagtagaggattagtttgagttttgtatatgactattactgtagccaagaagtggagtgtacactgttggtgagttcatgacaaagaaagaggacttgcacgtggtgaaacctacgactactgtggatgaaggtagctctttgttatcctttaaagttcatcagattctttggagcataagatactgccttgttttcatacttatggcctcttttgtgccttctctacagctctggaactccttgtggagaatagaatcactggatttcctgtaattgacgaagactggaaattggttagtatcaacttttgttattcaggtcttaagttttgaaagggagctgaatctaatctacagatggaggttggatgcttatgagggattctttgttgctgcaggttgggcttgtttcagattatgacttgttggctttggactccatatctggtaagtgggccagctacaccacttaattaatgtatttggtttcctttgctttcaagagattttataaacatggggatttctctttgaagtggagaaagaagaaagctacttgatcacatggtggcataaagccagaaatatctatgttatgatgaccttctgtctcattctttgcgagatagcacgctcaccgtgaaatgatcaaaaagctttttcccttaccccttgaatcttattgctggtttttttgtgttgctaataggtagtggaagaacagaaaattccatgttccctgaggttgacagcacctggaaagtatgtggcccttccttttcctattaacattttgacctgaatgcttttcaaaacactcaattcaaattctttcccattgtgctcattcgcctggttcacattatcagcagtagatagtgtgtattgaaagttacaaggaacttgttttgatttacgcaattaccatgcacaataattcagctaattgttgtgaacctgttataggatcttctgattgttatgagtgtatgcactaaagaagtacctcatatgaaatatgcatatggtagagttatgttaatgttacattcagttccctagtttgagtagacatgattctgtaaagtggattcaaatctgatagtgtaaaccatctcaaaatgaattggttctatagttctcttttttggtaacttttgttgttcttgtatcatatcatgttgaccaataaaaacatttgcagactttcaatgctgtgcaaaagctactcagcaaaaccaatgggaagcttgttggagatttaatgacaccagctccactagttgttgaggaaaaaaccaacctggaagatgctgctaagttactgtctttcctttttttcagtgccgtcatttcttttctcatctctatctaaattcttctctaacttaaagcttattattctattttccactagaatattgcttgagacaaaatatcgccggctccctgtggtagattctgatggcaaattggtaagagaagagagattttacatttacacatctcgcattgaacttttaaatacaccatgtttcgcatcgcttatctatttttatatttccttttgaaaaaaggttggtatcatcacaagaggaaacgtggttagagccgcgcttcaaataaagcgctctggtgataggaatgcttgattaaggtagtatatataccaaacaagaaaatggctttgtagaggaaagcaatgatcaaacattctccagagaataaaagtgagaaaccgcgacaattgtaccatgtattagaataagagccataacttatacgacattttgcaacgaagttaaacctggtaaactctagaagcatcaaaggtaagtgcacatctaactttttgctattttagcagaatcagcttctctgtttgtttgataagttaggttatcagatgctttgggtatttgactctcatccaatatgctttcatttcgagaaaaaaaaaaattgtttcacactttctacatttggttaaccaccaaagtaacaaacctttttaaggtattttaattgattttggttcaaccaaaaatatctttcctttaccttcttggtttcgtccgtacaaacgtatatgtgaaattggaatcttttcttaacgtggaggctctagattggtaatcaaatttcgttaattgtcatttgtcaagaacttccatgatctactcgattaaaagtaatattaataatatcaagttacaagagtgttagttgcaaggtcatgctcatcattagctgtctaacgaaaccttaaaacaattgacctttagttgtggtgatctgatggcgaaaaacactgatagatctgaatttctagtgatttaattaggtcaaaagaatttaactcttggtcaaatttcacgtttaagctctctaatggagaaagaaacacatgtttgagactggtcttttcaaaacaagaccatagcacaagaaatgatcaagttttgtgatatgtgagtttttgctgtctttgccccacaaaacagattagaaaacagagaagaaagaaaagagatgactttagtagttaggatagagagctttagttgttacgatcggacaagttaaagacccacttaccatatttgttttgtaggacactctttgtctctccaatatctctctaactctctatacactcccacttctcaatccttagtctcctgtttctgctgctattgactcaccgccgtgttccccatccagattttatctataacatcatactaatactacctcctacctataaccaaactgaaacattgaaacacttgtgtaactgaagtacgagaatagaagtttgagggggattgagtaaaaactatttatggagaactatcattacactagtaataataaattagtaatcacaaacaaactcatggaggaggtggtgcatgttagcaacctccgcgcattataaagacaaacattctctaatcttccttgtacaacttttttttttgtttggatgaaggaagaacaaacttaacgaaaagtgaaaaacaaatcgatactattatttgtttctattttttgctttcctaatcgtcatctgaagtttccggatcgggtaatttgtttaaatcaacccgttccaacgatccattacacctcttaaacccttctttactactacactccataagatcatcattaatacgataatcactatgattatctacgtaatcatgattaccacgttgatgttgatgatgatgatgatgacgattccctcccgcccccgccgcttctaacgcatccacttgtgctccaacctccgccgcttttctccttatatacgccgccgacatatctccaccaccgttcactcctcctccgcctcctcccgtcaccgtcactccggctaaaagctccgggaagttaagccgagcagaaggacctcggagataaaacaccgccgtgtcgtaagcacgcgccgccgcttcaggagtagagtaagagccaagccagatccttgaccttttattaggctctcttatctccgccacccacttcccccacttcctcatccttatccctttatacggcttatctctcttcctcgtcgccaccgccgcaaccgtaaccgccggagttgacaccaccgtggccacttcagtcgccgtctccatagtggttttctccggagatttcaagaatccacaaaagaatcgatctaaagagattttaaagataaagaagaagaaagatgtgatattgacggcgaagcgattacatgcggagggagagattgatgaacacgtgggccaagaagagaggagtggaacacgaaaccgcaaaagagaagaagtttcaaaaaattcaccgacactaaaatctcttaataactctttctcatatatatattcttttttttttttttgattctctctatatatattctaagacagagacaacaatctcatcttccctgacactatatatacacatatagataaatcgtagttattatattttgtctttattatttggacggaattaaaatattagtgttaaatacactcatgcatcttatttaataatgctcgtcggctctttccattggacggttcttaaattaatttccgatatatcagcgttactatatgcattaaaacatcctcaactaaataaaatttgaatgcaacgatttatcatagctcaaatcacaattattttgtcatagcctgttatggcctctaatatttttctccgttggcatctaattaattactattattggaaatcattattgtataatataggtatatttaaaattgttattaaaaaataaaggagtatttaaaattgtttatacacacgttaatttaaggatattgtaatttaaaaatggatagggatagattgcgtcttgatattgtgtgaatcttgtgattttaatcaacaatataagagttaacgcctcactttggaaaataaaacatgtttcatcatcaattacgtcaattttattttagtattattatcccctattatcctagggtttagataaatctatgatatatcagtcacatttcatgatagatgttgcaaatgagttttttacatttcttagactgtctagtatctcagctagtggtaaaatacaaaattttattctagaatttatattcttaatgttgcacggcaattcgttcaactattttaaataaccttaggttataaaattctacgatatattcaatttgagttgactattggactatatatgtatgatatatgtatgtcgttcaaattgtcaaatcgtcaataaattgaaaaactcttacccaaataaaataaactgaaactacaagtaaacagaggatatttattgattgcatggaagaagaatagtatcgacgtaggaaagtgggtcgttgttgtggaatttgggaaacaataataaatggtatttaacttaaactgatttaggagtttaaaaattatacagaaatgttcaagcaataatacgattaatttacttatttattgcttttatgccttaaaatgtttaatagggaagaggcggtaatgacacgcgtgtctccttctgttctggggacaagttaagtgggatttttgaggagctttgtctttccttattttctatgttattcttcttcttcatttttttttgttttactaatattactacatttcaaaattttaaagatataataaacgaaactttttttctatagtagttgtagattttatagggaatttcgacttctcttttcaaacacatcattactatatatttttggttaagatgagaaacttactaaaaaattccaatttttcttacatttttgtctataattaaataccaaaactttgtgtgggtgaataggtgatccaaccttaaaccgttcagctgataaaagttgtattcttaattccaattatgaacaattttctaaataattacaaacaacaactgacattagtcacaataaactctccaaatttttgttacaagaatagaatatatattattttttctattcattaaaaaaaaaagtttaggtcggtggtcggtggatactgtatggcgtttggaaatagacgttccatccacgcaatagcgatgtacacttatttattgaaatacccttctgaatatcgtcattaaacaaagggatgtagggctaaaactgtaattcgagtccatatttatacttcacaactttggaagattaatttgtggcaatttctcaaatggaacctaattatttggaaacagtgaaagtacctttggagtctaatgcttgagccacacattaagaataaatatatttaatttaagcctgaaactattgcataaaattaaacaaaaatagtatacgactataggtaataaaactcttaattttataaaattgtacgtatgcgttgtagatggactgttttatggaatcatgcgattgacgtgttagattacttatttaaatttttaatataaattttatgctagattggttattagtatatagtataatggtttgttatttagatggttaaaacttaaatcagtacatgaaaaataccaaaattctatgtaggaatttaatgtcagtattaatcaattatttaatgacatgtatacactaatcttttaattcagaagcaaacatttctggtaacttttggtattcgggtaaggtgacttaaacgaataattatcttaattccaaatttctgcaaatagaatatatttatatattgtttagcaaactttcctcaataatgtatatatatcatttgtttagccaacatgacatcaaagcatttttcatacgtgtgagtatgtcataggatagcttggattactcaccaaaagatccaataataagaatatacatacggaaatgtttcaatacgagatgtacgtaggtccatatactgtatgatatatatatacgtaaatcttatagatgcgaccgacatcgaagtcatgaccaacgtaaaccgtatatgtaaagccatttattcactacaactctgaccacaagattttactcgtgagctactatcaaattagtgttttttcataacaatgacctaaagtgtccaaagcttgttagttgttatcaaaacatttttagtaaactatttattttataaaaagtttcgatcctttcatgcatacatcaagtatctacaaaaaactatctaaatcgataacaaatttatgataatatttgtttaacagacgtttgttcaaaaaaagaagatttttttttttgtttaacaagcaaaaatcatattttccaaacgcaactttaattggatcggacctatagataatatatctctataactaaaccaatcatcgaagataaaactgaagaaactgaggctgactttaaatagatattttgtcattgataatccagcttttgtctgtactattaaacaattctctatacttatcatttataatctgccacttgttgcttgtttagtgccggaaagcgatgcatgacattttttagaattactcaaatgactcctttgtctgtttttttctctcatttccttcgtttttctaaaaaaatcctccttgcttcaaggatatacgaccaattatattctatacaattacacagtactcaattttcattttcgtattttggatacgatcgagtagtcaacattatattcgttctcccatgtataaacttaatctctagctattttttggtaaaataaaaataaaattgggccacttttaaatttatgtgtcatatgtgcgtataatataatatggaccctatttatcgtctctgtagattccaaatttattggatatccctagaaagcttatatcatgatttttgctagaatgaaacgtatatcgatcatagataattatgcagtggggattagctgtgaactggttggcacatgaacgtgccaattaccccaaattcaaaattttaatttatcttttgggaggacaaacaatagaagcatacccttgaatcgataaaggaccacagacatagtttacgtcccttatcgatctctacaatttttactaaaccacgataatttcattatttcttcacagataatttcattatatatagaaagtttgaagaacactcgagccttttcttaaatttcattagccaaaatatgcatggaaggtatctatatatacatcttatatactcaattcatattaaaatatttgaaaacttcctgctttcactgttaataatatatgttatatagtctatacatacaaaaggaaaatagttctctttaatcgtggtgttatattcgaactcagagtcaacataactaaaaaagtttgctttacaacacaatcggttgaactaactcatggttcaactatttttttaatacatgatcatcgataaacgctcgatctaaaattcaagtgaattgagatgtggaagataaactcagagtcaacattctttaaaaaatcatgttaatgcatttccccccaaaatgtatgggtcggccatttttttttttttttttttctgaatttgtggcatgtgactaaaaacatggaggattagccttgatttacttgatgcacgtaatgaataaaatcgttagatcacttaaaaaacgtgttgttatgatacttacaagcattgaaataagtattattatagggacgtgttagacaacgcgtcgaggtcgcaatttacgtcaaagcgtggaaaagaagaagtctaatagatagattttcatacattgctcctcctatcgagaaagagtcgttattataattaattagttatgcttttttgcttaagagtatataaacaaggtaagaaaaatataaccaaaaaaagaagaagaggaaagtcgatttattgttttcacgcagttagttcgtacgggatttctaattggatcttatatatagtattgtttttctttgatgaaaaacctatgtatcctactaatgtatgacgcatgtgaaaattaaagattgttctatcaaaaacaaaattaaacataacaattttttaaataaaagatagaactattagagataaattcttattacaaaaaaagaaaagcttagattgatgtcgggaatacctcgtcctaattctttttcatttatgaatttgaaagtagttttataatagtattaatttaaactactactactagagcaacaaattaaactttgtacaacaatttttttgactttattaaagccgaaaagaagactttttaaaaaaacaaaagggtaaaaacgtcatatgactgtaaaagtaatccacctgaggtcaaaggccacatgtgaaaattaatatgactcgtgagtgttaaagggtggtgaagttttttttgttttttttaatacaattattggacctcgattagtcaagatcgtaggtaaagtacatttatattgttcaaaatcttgttattcggcgtttactacttaacttattacatgcgacaactgaattattgaaattaaattattgacttgtttttctttctctcttttttttgtcaaattattgacttgttatagacctgcatcgaatttatataaatttaaaacacattatcatcatctctaacttgaacttttaaacaagtttatctttttgtttcacaaaaaaaaacaagtttatctttatgtccctcctgagacatataaaacaagattatctttcttcttagtagggatatagcaagtccggacgagatcaaaagtagattgactcttaagatcttactaagtttgagcttgctttggttcccacctctaaaaaccagttttgcatagtctgagactcgtgttaaattcgatcaaatctctctttcaacgacggttaactatggacgtattcgcaaaacatcacataaaaacatctctaaagtatttggctatttgcataaatatttcactcttacagacgtcaaaagtatgaatgaactctacatatcggcccaatatgaaccaatttgtaagaccataatggaaagcccatgtttctcttgtgcttgttttagttgcagaatcattagttcacatattgaccggattatattagtttttaaaaacgcatgtatgatgtagtcactgtatcatacccaagttactgtattcattacccaagttcaaactcgataaaatgcataaactaaacatacgttctttagccttttgttttcacttcaattaactcattttgtgcgttgtatattttttttctttccaacagctacttttctcacgtctatattttttaccgtttgtgatttttgagtctcaaatatatggaattgttttttttaaatggctactttccaaagtcttatattttttaccgttgtaaatgttcagtttcagatatatatggatttctttttctaatggctacttctctaacgtctatatcttttaccgttgtaaattttaaattctgaaatatattaccgtttgtgattgagttcacttgacacaccttcgttaaaaattacacaacaaaaagcgttcacaataagcccaatgggcctaaaagaccctaacaatcgaacatacccttctgaccaacacattttcttaaggagacactgttggtccatttactcatttaagtaggattcataacacttgtcatggtcgtcatttcttgttcaaatgcctttttaagtaataacgcaatggaagcatatatatactttaaacccacaaattaataatgcatatgtatctatttttcttgcatatactaaacatgtctaagtatgatataaactttgacactttggtggtgctgagtaatcatcatatttatgctttgtgtgcaagtgaaaacgaaccgataacaatctttaagacttccctaccaaaccggtttaaccttcacaacaaacaaacctagatcaattatctctaaaccaaaacccttcaaaccatgtcttttgtcggaccaaactgtactcttatatatgacatgcagatacgtcgttttcatgggccttactaatggcccattaaaaacattcgtaatcaattattttggttagtctttcccaaattcgtctacattcctcctcgataatcacttttaattaaaaccatatgaatttacgaaaaaaacaaaaacacaattatcattatgcaaaacatttaattcaataaattgagggatgtttaatgttaacaccaaaaattattaccaaaaattgacttcaattagagacatattaaaacgaccctgattttactcaaaacttaattgaaagatttaattatccaataataaaacgacacgtgtacctccttgtcgctttcctctgctttcttcgatggcgttgcatcgaagcatcagagagattggtatggtggtggtggtgagagagcagcaacaacagcaagaagagaaagcgataatcgaactgattaagatcgtgaaatccaagtaatctctgttgcttaatctcagatctttttgataaggagaaggaagcagaagaaagaggtcaacgaagaagatgaagctctctgctttacatcagagttacttaaatcgccggagtaatagcttcagatctccgacgtctcttgattcttccgttgatggctccgggaagtctttaatcgctgtgttttggcttatcctgcactgtctttgttgcttgattagtctagttctcggctttcgattctccagattagtcttcttcttcctcttctctacttcttcaaccaatctctactctcttccgtttcgtcctgacttacctgtgaaacacctcgatgttcacacaatcggccgtactctcgatcccggagctaacggaacgacggtggtggcgacggcgacgaaaagctctcgtgttgttgttggaagacacgggatccggatccgtccttggccgcatccgaatcccgttgaggtaatgaaagctcatcagatcattgggagagttcaaaaagagcaaaagatgatctttgggatgaaaagtagtaagatggttatagctgtgacaccgacttatgtgaggacttttcaagctttgcatttgactggtgtgatgcattctttgatgcttgttccttatgatctggtttggatcgttgttgaagctggtggtgctactaatgagaccggtttgattattgcaaaatcaggacttaggaccattcatgttgggattgatcagagaatgcctaatacttgggaagatcgtagtaaattagaagtctttatgagacttcaagctttgaggcaagtcaatttctttgcttttatatgctttgatctgttttgttttgaataatatgcatctagagctgaaagtgatgttcttgttttgttgtgtgtttagagttgtgagggaagagaagcttgatgggattgtgatgtttgcggatgatagtaatatgcatagtatggagttgtttgatgagattcagaatgtgaagtggtttggtactgtttctgttgggatattggctcattcaggaaatgcggaagagatggttttgtcgatggaaaagaggaaagagatggagaaagaggaagaagaggagagctcttcgttacctgtacagggtcctgcttgtaactcaactgatcagttgattggttggcatattttcaatacattgccatatgcggggaagagtgcagtttatatagatgatgttgctgcggttttgcctcaaaaactagagtggtctgggtttgtgttgaactcgagattgctttgggaggaagctgagaataagccagagtgggttaaggactttgggtcgttgaatgagaatgaaggtgtggagagtcctttgtctctgttgaaggatccttcaatggtggagcctcttggaagctgtggaagacaagttctgctatggtggcttcgagtagaagcacgcgctgatagcaaattccctcccgggtaagcctttttctctatacatagtaaaattaatcatcttgcaatcttgttgaagagtggaaaggcattaaaccgaaattatgaatagcgatttaggaagcaggtctttagtcacaaggaatgtaactacttttgcgtaagttaaaattagggattagttagtaagttttgactagtatcatattttagttgggagtgtgaaatcttaatcttacattgaatgtatctctctagtatatactcttgttgttgagtcagcaaacaaaagggtttgtgttttctgagttctgttctctttttgattgttgcctggatacagatggataattgatcctccgttagagatcacagttgcggctaaacgcactccatggccagatgttcctcctgagccaccaactaaaaagaaagatcaaatgccattatcccaaggcaacaccgtcgtggtaataccaaagcagcaacaacatccaacgaaaatccgaaaaccgaaacgcaaaagtaagaaaagtaaacacgaacctagaccaaccgatacaacaacacaagtttattcatcttcgtctaagcatcaagaaagaaactgagaaaagaagaaaaaagcttttgagagttcaagagattttcttctactattattattcatttgttgccaaagtttttagagaaaactcagagatcatcttctcctccagataccgcaaatattacaactaacggagaggaaaacaaaaccgggacagtttagattatgacaatggagctcccaaaaaaggtatacagggtttttcggggaatgatgatcattcgtttttcaactatcgttttattttttggtcctttaaaacttgtctttattagtaacaaagattgtttgtttcaatgttcttgagggttacaaaaagtgtagaaacaaaactttgggttgtatagttttgtaagcatatttctcaattcatttatgttttcttctcatggacccaaaacgtgaaagccgcccctcaattttacttatactgatgatataaatcaaatttaccttctcacaagttcatatttttgtgaatatattatatttgattttttcttatatccattatgacacatccaacatgatgcaagtggactactaccggaggacttagatagctaagattggttagaagctactggtgactttcgaaaaataaaaaatctttgagatgaagacattggaaaagatacttcgtgagaaagaaatgtgaagaaagttgataaaacaaacaaaacagaatcatagaaaaaaacagaggaatttaaagggagagacaaagactgcaaacagatttataactgaaataatggaggaagataaggcggttttgtcagaagatcacatgtcttctttaaccacttttttccttttttcgttttttttttctttttcttactaatttattgtcgtcgtaacaatgggttcgtgtcctttgaccattttacaattcatatcggtatgagtcggtttcttcggattaggttttttgaattcttaaggaagaatcaaccaagccataaatgttcccatgcttcgtgcgtagcttagctagcttcccatacaaaatgatatcccaaattgaacagaactataaagaaacagaaacggtcacacctttttcctctaaacgaaacggtcacctttagttgtcacatgtcagaaacacgagcgagacacttttgtttctttaaccttatcaaaagccacttccgtttgaaacttggttaaagacacctctttgcctcccatttcctccaatcccaatttttctcttcttttcaagtttcaaaaaatatgaatgaatcacttatatatcaagtatatgaaaaattccaacggtcaggatggggcgccgcctcatgaccaaagaagctgccgtgaaatgggaacatctcatccacccatcattcaagattccattctctttcttatttcttctatgaatcttcttcatagagatctacagccaaaaatgaattatttcagacgtgaacttattaaaccagactacagtttcttggaaactgttgtaacgttttgatttcagaagttctcagacatctatacctagttaaactcttcacaaaccaatgtcaatatgcttgcatgtatttggattaaacttttcgacttactaaactcctctgaataaataaataaaaaagtttaacaaaaaaaaaactcctatgaatatacatgcgtatataatgtgaataattcgacgtaaataaatgagatcactaagaagatactcgtaaatattttcaagtgacatcattctgttttaatggtattcaagttcccatgtgtatggttagtagccaataaacgtttgcctgattgactggaatcaacatatcagagggaacaataactacataaggcgtaagccatgacagctttttttgaatatttgtatgtgaattttgattgggttcaaaaagatcaaattagattgcgcgaccatgaaaaataaaatcattttaaattatttgaaataacaacgcaaagctgttggggggagagcaaaaaaaaaagggggtttaatataccacaatcaatatcgttttgctaaaactcaaaatgagagtgtttgtacgtattatacgctatatcttctacaataagatagttatgtacgtcagatatgaataaatatgcgatttttaatgaatacgcaaattaaatctctcgtgatatgctgatgtaaacaacaaaccacggaaaagtaaaaggaacaaaccatcttataatgtgcattttaatatgtatgaaaaagtattacagtataaaagataattcagtcaaaaagttagaagagaatagtaaactatttgaattacaagcgaatagtttgaccccacacaaatcttcgaagtttgatcgagttatttttttggtgaaatatatactcgcaagggaaggggaatttgtttcttggtcgactatctcacgaatctgcttagacgacatgtgctttattctaagttgttatgttgtattccatacaatcagaatggttgatatttaatccactttcttataatattcttttgcctaaattcttttatgtgcatatgaactaatttaggaaataagacgtttatatttgttgatcaagtaaaaaaaggtaaactgaataatgaataatattcaaacgaaagtgtgaagactgaaatcgatttttcaatgacatattattagtatcagataatcagataaatggtacgtaatatatataagtatgttatgtttttcttgattctatttttattagtgcgtcaaggtatttgttggcgttggaatcgttggatcatggatggcaaaaaccgtttaaatgtacatatgaactttacacagtataattcataaatactatttacaagtaaaattagtgtacaaattaaaggttaatcatgtgtaaaactaaaactttaagtacttttaagactcaataatttaacttggttgagacttactttcctctggagccgacgtccaacattgaaacgaaaacaaaatctcttctactcttctaccatagctttgatgcatgtgaggatgaaatgcaagtaaacaattagtgatataaggttaggacagaaatttaagatatactaaaactcgttttggagaaattgtagatccataagatgcattataatctcgaaatatattatttagttttaaaactaataaaaacagataaatatctcccgttatatagtattttgtgcaatatataatgttctttaatgaaaaatttgatgatgttatagataaataatgggaaataaaaagtattcaaatttcggattaaaaaatccatcgaaccgtccaccatcttgcatgtccatcattcccatttatttgtaatagaaaagtataccaacttgaaatattaaataccaaattttttgttataaatagtcccacagttttctcatcctccagaaaaacaaatcatcccaagtaatcctaactatacaaaacacataacaatatggctccttcaacaaaagttctctctttacttctcttatatgtcgtcgtgtcattagcctccggtgatgagtccatcatcaacgaccatctccaacttccatcggacggcaagtggagaaccgatgaagaagtgaggtccatctacttacaatggtccgcagaacacgggaaaactaacaacaacaacaacggtatcatcaacgaccaagacaaaagattcaatattttcaaagacaacttaagattcatcgatttacacaacgaagacaacaagaacgctacttacaagcttggtctcaccaaatttaccgatctcactaacgatgagtaccgcaagttgtacctcggggcaagaactgagcccgcccgccgcatcgctaaggccaagaatgtcaaccagaaatactcagccgctgtaaacggcaaggaggttccagagacggttgattggagacagaaaggagccgttaaccccatcaaagaccaaggaacttgcggtaattaccaattatgctttttcctttataatcaaactgatattattaacgaacgtctaatatttacacatggttcgtaacagaacaaacttttgtgttatattttgtgtaacttaacatgtaacacatgcagcatgtgtattgatgttaatatttgtgtttgtgtattgatcaacacaggaagttgttgggcgttttcgactactgcagcagtagaaggtataaacaagatcgtaacaggagaactcatatctctatcagaacaagaacttgttgactgcgacaaatcctacaatcaaggttgcaacggcggtttaatggactacgcttttcaattcatcatgaaaaatggtggcttaaacactgagaaagattatccttaccgtggattcggcggaaaatgcaattctttcttggtatacactcaaaaacagagttgctctgttttcactttattttcaagaattgcaaaatctgattatttttcctatctctttgtgtttttgcagaagaattctagagttgtgagtattgatgggtacgaagatgttcctactaaagacgagactgcgttgaagaaagctatttcataccaaccggttagtgtagctattgaagccggtggaagaatttttcaacattaccaatcggtaagcgaaccgacattgatttgtgtattaagtaacaaaaccgggtttttggatttttattaacctgattggttttggttggcagggtatttttaccggaagttgtggtacaaatcttgatcacgcggtggttgctgtcgggtacggatcagagaacggtgttgactactggattgtaaggaactcttggggtccacgttggggtgaggaaggttacattagaatggagagaaacttggcagcctccaaatccggtaagtgtgggattgcggttgaagcctcgtacccggttaagtacagcccaaacccggttcgtggaaatactatcagcagtgtttgaaatcaagacgctcgataaacatttgggattcttataactgaatttaatctcgtattgttattattgtttgtatgtatagtatttcaacaacaatttcaaaaattagttgattcatcataaggatataaaatttataaatccttatgtcgatcaatttcttttttattcaaagaaagattgtttgcttgttttatgtattaagagaaatataataaaatgatatatttcttaagagccattggttttcactccttcatccaactaacaacataacaaaagtcggtttcttctacttctcctcaatcttcttctcatcaattttcattatgcacctcaaaaacaacatttgtttttcttcttgttttcacctgctctagatgttaactaagtgatctgataaaataaggtttaagccgcatgttcataaattcattttagtcatatctagaaatgtcggtgagaaatttataaaaaactgcatgaacactgaacacatctatagaaacttgtgtgatatctatacaaaaacagatacgctaaagcccaataaaagaattttgggcctatcactttccttattgatggcccaaacaattgggtcacctcttcaagcttgtatcatggattcatggtaagtgaatctatatgattgtaaatcagtgatttcgaacgatttgggactgttatgttataaagtgaaggttttcattttgaacaattaaagaaatctcgagaaattaaataaccaagaatacagatatatgaaaacaataagtcgtacaacgtacattagttttcgaagggatttacgtatcgttttcttctcttcacgagatagaaaaaaaaaagcagaggagggctagactaatgtattgttttgacttttaagagacaaaaatagattttcaattaaaataagtaagaatggaaactataattaattaattaaatggagtgacaaaagcaaactaaaaacccccaaactctctaacgcagaaagaagcgtctttgtcaggcatgtttccagcgtggcgtaaaccaagcgtgagagacacgtcaccagtagggtttgtcccaaaccttataacgttaacaccatccatgtcagcatcatcgaacccacctacactttgttgacacgtggcaacggcggaaaacgcgtctgagccaccgtaacgagaattcaagtcgtcagaaacagcggcaggagcggcggcgttggaataagaggaagggagtagaagtgatgaagcgtcgttttcgtaagcattaatgttggatcttagacggatggcctgtcgctactgctgcgtctgcgtctgatgcgtctggtgcggttgtcgttggagtttgtgaagtggtccgaacggcagtgaagttgctttcattgttgttggattttgtgctcttgtcgtcgttgctgttttttgtttcttgatcttcttcgttctcttctaattcctcttctctttctctttcttttgattcttgttggtacatttcttccaccattggtttccataaacgaaccctagcatttatgaaccaatttgatacctgaataaaagagacaaaattttcactagttgaatcattataatatcgaaataaaattgagggctctttttgtttatttgtcatttggttatttaatgtagggatacaagaaattgagggtttctttgggacaattgaaagctgcaaactttgatgtacttgaggaaaaatggacccttttgcgtctttaatgtcgatctctttctctctctcctatgtttttgtatatataaatatgctataataatttaaagacgaatcccaagaaaagctaatggtgagtggaaggcaaaacacatggtgttcctctgtcatatcacaaaccaaacaaagataagaaacaaaaaccatgcaatagagtcatctcaggctactagttagtgtactcgtacatggtgtcaaataattttggcttagtcaaattcgttttgagtaactactagtatttattatttgatgtttataacaagcatgtatatgtttatgaaaattatgaaatgggtttgggtgataaattaatattgtagttatatatataactgtgtactattgtggagtttatttataaacatagaatgatgggtttaaaacaaatctttaaaacacgcggttaagaattcgtaatccagactgtggtcatttgattgtctgattaagagtatactcagctaacacaacttggtgaagtagaggcatatgtatttgattcatggagattttaaatttcattatatcgttggctatatgtatatatgtagactgacctgatttctggataaaccagtctgtcgagccaataggtgtttatctgcatcacttggatacctgagaaagagaccagaaaatgacatcactctctatctttgccctaataaactcaatgtaatttattttctttatcttttcactatatacaatacaatcaagtagacgcaagaaaaagtacagactttttcctaacaagggcgtgagaatctaacagacaaaagaaaagttgatgattacatatcatcgatccagtttttttttttttacttggcttttttggtttggttttactcttaaagcaatttgtcagagaggtgaaaatagtacaaaaacactactcttttgctttatttccattttttcgttcactctcgttaacaataaaatagcaaaattctagagacatagtactaaagaaagtagaggtgaaataacgagaaaataaatactttttctcagcttttttcaaaattcagtttctctataataattaataaataacgagaaagaaagaaaaaattgacttacgggtgaaggaaatgttcgaagagccaagctctaagtatattgacggagcgttcaggcaaaccgcgttgtggccgccaagcttcttgttccatacccatttgatgaaacgcacggttctgacgcaaactttgctctagcaaacgcaaacgcggagtttcaccttttgttaacccggaagaagagattcccgctgcatctttgtccccaagaagttcgcaactctgcttaagctgagccgcaactgcatctttaaggcatctaaaatgtcttgacatagctttttgagccaatgcggtgtacggtaatgccgcaccgtggcccattactatgtcgaaagagttcacaaccatctgcatttgctcgcagtaatggttgtaccgtcggtccacctgccaacgaaacaaaactatacattatacaatccataaatatcaatatttgcctttttcttttaattaatgttattgttaactcgtgtgtgttgtgttatatgttcacgtgattattatttagtgtagattttatcacgggaacctatgcttgtgtacgagcatcatctaataaataaactaatgagattaattagttacctttaaacgagacaaaataagaaaataagatattatatagacaaattattgaccagagaatatacttcaatgtttgcgcaatcctaccaacagcacattttatcgtatcctcgagcataaactaaaatatttatttctagtgagaaaaaagcaaggtcaactaaaaagtagataattcaattatgggtaaacaaataagtaacgtcaagggttagctttaggacgtaactggagagtagcttatatggagaaggaaacgccaattacataattaatcgtaattatttaatgcattttctttgattaatcgattccaccaaacgctaagcatcaaaatattcaatatactttctaatacgaccgtcacacgagcaaaatgattaaattaattttaattttaaacaaatgatggtaggattgcgcaatcaaactctaccaaaataatcaaaaataagtagttaatcgagaaaacaaaagaccaattcagtcatatcaggtttcttgtttctttgtcataactcttggatcaatttatgaatcttatcgaaatgcaacgaaaacaattttacgtaaaatgtatgaactaatatcactgtagagtatagacaaagtcaaaatcaatattaaaagttaatatgaacatacctcttcaagcatggtgagtagtttcactttccttctttgatgctcaatccgatcagacgccgataaaggaggatgctccttgtttgctccggccgacgaaggagagctgccaccaccatcaccaccgcaagtattagggtttgagctgttcccaagtttgttcttcttcaaaaatcctcttccaacactacaaaactcttccaacaactcttgcgcggccgttgtgtacctcgagtttcttaagatattgaccgctgccatggaagaggaagaagcagccggagatgatcggaattggtttaatacttgatggtgatgttgagaagaattagcaagaagagtcttgaattgattgtattgatgatgaggtgatgcgttagaagaattggctccgtagtaaatgtttctatactcttccgcttttgctgcagcctctaaagacgatgagagagataaggacaagccttgtcctccgtgtcctccgctgttttccacgtggacggtcccaatctccgtttggctgttgtgatgatgatgatgatgatcgggagaagactgccacgtcgatatctgctggtgatgctgatgtggaagctgatgcatagacatatgattagtgtagttctgatggtgagttgtgttggtggatggacttggaagtaacatgtgaagagttgaagaattgtggtggctccttggggaagttgtggatgacggagacggtggttgttgcggtggcggtggattcatcaagaataactgcatggcggctgcggtggcggtggctgaatccgtagcattcatagccggaatattctgatgttgctcctcaagcaactgcctatttgaccggaaagattggccgaggtcgagatctcttcctccaccgctgcttccggggaaattaaacatttcggataacataccggctgattcgtagaccggaatcctacctccggcgactgaagattcctcgtccatctctaccctttgatgctcttgcttctgctgagttgttaaattgggagaatctgatcggtcgaatccattagagaagttgaagatacctccttggtgttgattatgatgatgatgatgatgataatcttgggacatagaattattgtgaaaagtcttcaagagaattgtagtattaggagaagttttagttattcccatatcaatacttcaatctttttcttcatgatatatgttaatatcgttccagagctctctctctcggatcctgtaatgattcagacaaagaatttaaaacatatgtaagtcagaaactaggtcttacgctgtttttttgtccatctatctacatcacctatataactgatgatgaacaaagacatagagatatatatatgtaggtatctatatatatgtatgtatgcaaagagagagcataagaagataatacctttggagtttgttgcagagaagataattgagcttaggtatcgttttctctctctctttctcgctttctttttctggactctccttttctttcttactaagagtttattcagaattcacaaatattataaaagatatatatatcggaaagaaaaatatgcgagagagaggtcactcttctttcttcttcgtcaccctttttagcccaccaatcttctttattagttggtttcctatatatatataaagctgctcgtgcaaaaaaaaaatcggtgattttttaaactatggtttcttatgaaagatttagttgaaaaggttaatagtaggattgaaggatagaaatttctaagatgcgtctttttttcacgtaaatgtcttctgccattaacaatttgaagatgtttattttcgtaattttttttttttttttttaagtgagtacaaggtcatatctcaatgatacgaaccaccaccataaattttagtaatactatcgtgacaaaaaaaaaaaacatatataatatttaaaatactgccatatttatatttcccataataccctcatctgtcattcttctgatttcactggactgactcgcagatagggtcaattaagtccatatttacgtaactggtcattgttggtgcatagctccccagtcctcatcagcataatttaaagtctacacatttattttaaatgtagcatatctctattatcttaacctggaataccctaaaagatcttcgtaaataaaaaacttcataaaaaaaaaaaaaatcttcttaacgtttgttaattttttttttctactacatcaaaattgaatttacttactttatgcgagaatatgactctctaaaactccgtacgactggtcgtaatcacaacaccacaacaaattaatctcatataatcaattgattttaagttctaaccacaagttaattatcccttccaatcgacttttcagggaaatgacaaattagttacatattaattagcattttctaatgataacataatatatcccacatacatatataccaatacagtgttaaataaaatgtaagctgtattttctaacaattagcatggccgaagtaataatactcatgcaaaataatgcaaaggctagaaaaagtatatattcaaactattttttccggccatcgatcttgtgatcataaattaaattttactacttgagggtcgagtacgatgtaactatgaatggcttgaaggataatgtaatgaaattcggtgtgcattttttttgtttggtgtatcaaataaacaataaaagatgagagttcgcacgagcgggagttgtggtttggaacgtgtgaaaggtaggaggacggttcagaagtcaagtgctcaaaatgttaattaggtttatgtgggggataatctagaaaaccgatgaaatcgacacataaccgtttttttggttcaacagctttgagttcgagtacttgagtttctttttttggtatggctagactatatttttaattccatggttaatatatagatatcggaatttctttcttaaagcggtgacatatttcgtatcacgtctgtcttgctaaaaaaatagcattcccaaattcgagttttggtgcatatcccacaaatggttagagaaagtattagatatcgcaccgtaggcataagtccatattgggataaataattaatggaaatgtcgaaagcacaagtgtaactccacttatataataacattgaattttgtttattgtgtgacaccatgtgggaatctttcatgtcaaaatcatatcagcacgcaaattctgttattttttattttttatttttacacagttaattcatgtcggagtagtaattaaaataaaataaaataaaaacactctgtttttccattttaatattccctagaaacgtaaaatttcataaaaatacgttgcaggttttattttaaaattatagctacaaaagttttatgttccaactacaaaacctggaatgacaattgacagcttaacctttctaccttcctaccgatattttttctcgttttctattttttcctttctgaaatagaaatggttcaatctctctcacgtgaatcccaccctcctttcacacgtatgcacaactatctgttacgtgccgaaccttcctttttcgtacgtgtggagaggatcttcttcttaggcatttatactctttacccaccaaagccaacttgtaatggatcctttttcctctgctttatcatatcttcaatggtgtcaattgtctaaccttcaacatatttattagtctcttcatttttatttcgacacgtttccgcttttcgacctcacatgaacattcaatttcatagtatcgaatattttgattgattttttaatttctgcgtcttataaccaaagctatgtaatgtgtttaactgttcattatcattgaaatgtgttcgtagtttaatgtaaccggtgtattttggatagctcttggatcagaaagtgtgatcatgttgtgaggttgagtcatttcgacaacacaaaggagactaatttacttgctatgatcagtaagaatgtaaatctttagttgatttttttaaggttttagatgaatgtataacctataaatttggtcctacgaaaaacaaaaaacatgaaagcaaagacaatgagtccataaaacaaaatgtttgctaccaaaaatcacaaacttataaagaaatatttacacaattagtttttcacgaaaaccaaatgattatatatatacaaactcgtggtgataaattatgattaaatatgaaatgttattatatattgcaatgatctgttatatctgtcgtgataggtttcatattacctgactataacaacgttgatttccagatcctgttttcagacaaaaggatcatgaactaagttattgttgaaaaggctttcatcgggtttggtcttttaagtacgttgaaggaaaaattatgagttatcatccagattcgataaaattagagttaggtttgatttgattaaatgtggtgcaattgcaatttgttagaagattaaagtcaccactttctctaaaggagataaaaaaaggtttgattagccaaaagctattacaaggactcataatatagtctcatagccacgtaggtttgatttattgtctagtcaatataccatatggtttcatatccatcaatcgtcgtcatatgaaattctgcaaaccattattatgcctcatgagtttgaaagttgccggaattacattcttttttactgattttttttttggtaatttctaattagtggtaatctcctttgtgagcttaagattcatatgaaagttttgttcattcttaactctgtaagaagttttattatacataaagttgtaaacaataaagtcgatgagaaagaaacaaataaatttgattatttgtcatgagtaatgggagagtgagaccacaaagggagttgtgaaaatggcagtgatggtcccttcttattccatttcttgtccttttggtgttactcaaattgttcctttcgtatttacttttttttttctttctcatcttctattttagattcttatttcattggtttgatgagtaatagtagttttcaactcttttactctgtttctatttttgctttttaaccattaattgttattttacaatctaacagtgttttactgtttttgcttaatcgtttgacttaacaagctcactactctttttaaggtttgcttttgagaactgttttaatgtttttaatacaaacatatacacatatgtaacgtatgcgtgtgcatgaaaactgtcaaaatctaggaacgacatgtttctttaaatttgtccccgactactatgtcagtgtatttgtcttatcaaggttcgaataatgttacttcccatgaggtacttgcgaaaacttctgtgtttatgtcaccatgaagatcacaacgaatctgaattaggtcacttgtaatttttttttttggtcacttgatgatagtgtaaatgtaatcaaataactaaatccttatacaatgatcaaacgttgagtcttaaaagagactaaacttatgcactaattaattcaatttaagtttgggaaatcctcacctaatgatgttaacttctaacctatcatattttctccgcgaacaaccacaaatactttgtatatccaaatcctcacgcgttagaaattaatgaaaaaaatagggcaaggattgattgaagatgtttttttttgtctttatattctgattattatatataaaagaaatcacatctcagctagtgaattgatgtgccactcatgactatgactcagtagtacatgcaactgtaactatgtgagactgtatagaaaatgaccattgaattggccaaacaggataaactattatatcaaatgaaataagttaaaattgatgattcgtatgagatctgaaatcatatatatattcaagaatatgcaacgccttatcttgaaaggtttgttaagttcatgattcatgaataatgtatatcaaaactcactaatcgctcatctaaattaaaactgtatatggaccatcgagtcaacggacctttcttccaatttcatcaatatagaagtaaaaagtatcaactattgataatatatgtgtgaacctatattagaagttaccattgggcaatagttggttaaataaagcaaaaattgtcatcaaatgaagaaaaacaaaagaagcaaaatgtttttatgtgcgaaggtccaagggaccaacattctcatggtcttctgtcaccacattttttcaatattatctttccaattattattgtttatttctttatttattttgcatctaaagagtataatttaaaccttaatacaattacaacaacctctacgaattcatatcatttatttccttgtctagattcatataccaccaataattagctaggaccatttgttatagtagctttttggatatcttgaccattttgttataatgtttttgtatatatatatataaatacataagaaaatattatacaaaacacttaattcagttcttttatgtataaggaccgtagtgttatatctctaatatttatataaatcgtagatgaacacggagtaacattttttgataaacatgtttaggagatatctgtactttgcaattaaattatgatgaatgatttattggtagtgactaaattatagaggtccccaatggaaaaaagaagcagcgaaccagtcacaccgtcgttgtaatctacaactaaaaaaatgcttgatttatttttccttatcaatatgttttcaaaatgaaaacgtgtacatataaaaaaaatggtcctaagagacatattaattttgattggtccacctggaaaaccggcaagggatggccatggccacgtgggatttgtggtccatgctgggatcaacgttcctcaatgtgccacgtgttttgatcatccagcgtgacagcctgtgttttcaacttttcatcaccaagcttcaaaatcttttttactctttttatttttatgcttaaaaataatttagaaattgatatggtcgaagagtaataataacttctcttgtcaaaagggagtaattatataatatgaaaatggatttttgtcaatacataaatttttattttctaaattaactgttttgtttttttcaacatgatttctctgttttctatttgattcaacggcgcatttttttaaaatgaaaattgtttgtagctcaatattaaagatattatcgtcaaaaattgttagacaaaaaaaaaaaaaacccagcccacaatcattatatgatatatggccactgataatacaactatctgtaactgatttaaacttaaaaattattctacaataagggttttgattcgtcggcccaaatttaccatatgggccttaagaagcctggttaaaatatatggccactggataatacaactatctttctttctttttttctttagtaatatatggcatcagtattagtgtcaatgatttatagatgtgaataaagtgaaatttttggaaagctaattgataactttgatgaccaatatataacaaataagtttgtctattgcagtactttaattcattgcttgcgtaagaagtgagtgggatcacaatttaaagaacgtcacttgattcaactactactaaaataaaacaatcagaaaaaaaaaatattaacagaggaaaataaaatatcctggagtagttgaatcatcttgctaagcacctaattttgataaaacttgcggtggcacagtaagtttgggcacctaaacaactaattgattggctaatcacaatatacacgttttttttttcacatgtggttttatattgaacccaccgaattctcttgatccttctaacaaaatttaatctcaaccacaaaaataaaataataatatatataagaaactgtaatgtacaattgtgattagcaatgggtcatctcatctaattatccagataatattgtctatatttttccaattaatttggtcgtatgtaactaaataatgcattaggttgagctaaataaagtattagataaccttacctactaacaattttcaatgatttttttcagtttctatatttctgctttgtatttttgtgtaaaattgggtttacagaccaggggatttcgaacagggtgatgtgttggacacaaaatttattccattcatgtgcgagttattattcattgaagtatattaaacttttgttttattttacttttttctattaattttaattaaaaatttgatgtgaaagaaaaaaacggtattttattgtgaatagtaaaagtcatgagcaaaatcatcaacttaggagtgttgaaaaaaggctaaagaagagtaaattagaggagagtcaaagattgtgtgtcactagtgttaatgctagtaaacatcagctcttttttttcttctctcttaatttttcaaacatttgatttctataaaccttcttaataatttcttccgtaaaataatatgattagtttttttttttgtaaacaagtgcccacttgcttgaccttcccaaccaaaaaaaacgtaacaatttccatcatcttctccataaagttcttacctttaagtgtgtttaatggagatttatcctctactcatctctctctctctattctgttccatttattaagctttcttcacgctttttaagataattaacagtcacgggttctaaaagctaaagggttttgcttcgaattcaagtgtctcccttcactttctctctctctattgctgctctgtttctgctgtcaattccctaagaaagtcctgatttttagggtgatcgagagaagttgaagaatcatgtttattgagtttccttttttgatccatagggtcatctaattttgctaattttattgtcatctccttcaggtaatttgcgatttctctttactctgtttttgacttgtacttagattccttttctttaacagtaataaacttcataaagatttcatttttcttcttatgggtatttggaatgatgaatgtagattaggttgattgttttgaggatgatgtggataatctttttctggatattattacaatttagggtcttgagattgtttgtaataagctccgtactttggtcccttattttcaattcagtctttaagatttcggtaacccttttatatttgatgcaatctccctataataataccttcttcaattgctgttttgccatttgcatattatttaactttctttgttggatcagtctgattctttcttaccaattattgtcttaatccttgattaagaaaaaacaaaaaaacaaaagac

SEQ ID NO: 679 - DNA, 101009 bp, Arabidopsis thaliana
gaattccttgctccaacggcaagtgaattattcttttgcatctattacgactaagcatttatgatcattccaatctaaaaagctctaatgctacatgaatccattaccaaaaaaagaaaactcgaatccaatctcaatgggttcatctttcggatcgtcgtaacttgaaaccgaaatctaccaagaaacccctaagccaaatctagcagagagatctcaattcaatgaaaccagttaattccgtagtcggatacaaccaaaacccacgtgaaatacaagaattgctaaattaacacgaacaagataatctctagaattcaaattatgcgaacatctgacgatgcacagagaaagagagagagagagagaggttttttatttgccttggctccgtagacgcgaggaccatggtaagcgagaacacgctcgccctccgagaagagtctgccgtcgttggacggtgaggcgccaccgctcgccgtatctccgtcactcgccgtctcttccttcgacgagcttcccattgtcaccgaaagcgagagcgagaggcaaagatcttcacatcacaaggcacccctttaaccgtctagataaatgaatctacgacaactgctgaatgactgaatcgttgcgaatagtttttcaattgagtcccttaactttcacaatagttcgattaaatctcttaaaccttttaaatatactcgtcgcccatttataaagcattgtctttttaaaaaaatttatgcctttattggtcgttgagcagttggactcatatttcactttggacactgatgtttattaactattattacattcaaataaatataaaaaaattgattaatacattttatttgtatacttttcaagtaactttatttcactaacaaaacaataatcctaaatatagaaaaatgagacaataattattgtttttgccattcttcttcctatgtatcgatcagaaacatgagacatgtataatattttccactaatgaaactggaacaaaaaaatgaaataattttctcgacctagatgggtatgggcactttaaccggcccggtttgaactaaagattgaaacattagtggcccggtccgcttgggcttggacctgagtgcttaacaaatcgaaacgtatccttcctgtccacgaccttatgaccctcgcctggacttggacctgagtctttgatcgaaccaagtgataagccatcgaataaactagccacgaacttctcctcggtctttgttagaccaagcggacgactctcgacaagaaccgaaccaatcaacatgaagaacagaatcgaactcagaacgtttttgttcatcatcatgtttaagaacaatttaactctgtttataaaaaatatggttttctttctctttggcagataatgaattttgttgtgagtgttttgtgagttgagaatgtgactatatagtagtgttcgtggagatgcaaagtttgaatttttattcttgactaagtttgaattgaaaagaatgtgatcattgaaattagttagtatgctgcttcctgggaaaataccaacttgtttcttgagcattcaattttgtgtgtatttattgaacacaaaatagtgaaagccatcaatgaagaaaaggataaggaattgaatattagaaataaagaatttaatatcgtagaccaaacatgaagtttcattgtttggagcagacggcagctaaatattaaggtagatttgtagttgtgtagaccaaaaataatgcttgaatttcaaactcgcaacgtatataaagtcacactcacatatatcgttagccggtttagatttggttttcgtaagtatattatggtatattgttggtttcagattgaatttgtttactttattttactttactagaaaatgtacatctctagctttggtttcgtttcaactttcagccaaattttttatatatagaaaataaatttaaaatcagataacttgaattttttttaaaaatttggttagggtttctggttcggttaaaccagctgatttaaggagtgacataagctaaattgactatgagtcggatctcatgtgtttgttttataatattgttagatacaccaaacctaatcatcaatgcttcaaaagttcaaacactttggtgttatttttcttgcacgaccaaaaatagttccttctcacgtgatttttcttgcaaaaaacattgaacaaccaaactttatactactcaaaattcaacatccaaattttagtttttgttaggtagaaataagaaatctatcctatgaaaagacaaaaccattaatttttatttcaactcttgctgctatatgacgttgaattatgataatttttccgtctcaagttcataaacgatttttcaaacagagttgtgatgaaatttatttattttctaaaaaaaaaggaagattgatagttttgaagaatatattattgatggtagccaaataatttaccggaataaagtgtaatatcatctcaaactgttcctttttatagcaaaatcgctcctttttatccgcagttagagtataagacaaagaaaccaaattccagagcatcaggaaactctttcccatattttaaggtgaaatcactattttgaaattattaacttagtttaataaccaattattgaataatacaaacaaagtacttaaaacccggtttaatgttttatttcgattttataaatattggtttggccaaaataatatagtttataagtggcgtaagaccacgccagaataatacaagaagaaaaaatgtttaactatgtatagttcggacgtggtagtccattaataatggaatcaaattctgcattaataaattcattatcaagattccagtcttttgtattccttccaattacatgaaattaatataattcttgaacaaatatctttggacaaaagaatttcaattatttacttaaatctatataaaagcaaatctttaatccattcaaatagcagatatgtatctctagggattaaggtagtatacaactataacatctcaaaagaaccaaattgtgactgcacaatgcaatatcataatttgtatatcgaaaacatgatatgttcacatggttcgtccataaacagtacttatattcatatttgaccactaaatatttcacattaaaaaatcgaaattagaaataattatggatttagttctgcaaactcgattttttttaaaaaagattcgaagatgcaagattgataatgaaataaaattgagggtacatcatacatgtgggggaagtgacgtttaaaaacaaaaaggaaaaagaggaagaagatagatgccaatattgttatcatgacaactatgaagcagagttagagtccgtccgtccatacaagtattttgtgtgagtaccaccgaatttgtctgtctatgttatctcccttctttttctcatgcccacgaaccaacatgacaattatgttttgttcgttttttgaaaaattctagagttttcatttattaattatcgttgagttatgatttagtatgattttggtttaaaaattccacttcttaggactcattgtttgatctttgtgtttcttatttatttctttgcacagtactaaaaatcatgcattagttcttaccattcacaaatcttcaaaacttaattagaaaaagaaaaaaaaaaatcgatcaatacaatgaaaacgttctcctatgcactatgcagaacaagtctcgaggattcgtatggtcaaatttattccgatcaaattattcgcgaaagtgtgagaaacaaatacgtactttatttctcttacctcctcctacgtcacttctacgcattcgtgccctaccttcatcagtactcttccagtttctaaaggttaaaaccgagtcgatgatccacgaccgtagagttaaatcaagtaatcaacttaagtcattgtaataagaaagcctccgctcaaaaaaaattctacaatattagtttgacataaaacttcaaatgatagaaatatgaaatcaaatagttgtagacttgtagtctagtactttcatttggctcatttggcaattgcaaagtttacgtggtgattactaaactccttgtcggtataaatgtttttgatcatgaaaccatataccgaaaatattggtatatatagtcctgcctaactccactaacaaaaagtcaggatttttaaattaccaactacaacttgaattgtcatttggaagattgattcattggaatattgtgtatcttaagccataaacaaatcccataatttaatagtgtgccagaattttgtattcatattttaagcagtaaaaacaaaaacaaaatacatatatatattctcaatcaaactataatactttagatttaaagctattaagaaaaacatttagctagtcaaaaaaaacaattaacacttttcgaaaggtccatttccaaggaagctagagaccgtccttttttactaattcgcctgcaccatccccttgtatcgagggtctaattctacaccttattccattttatattccctaacaatttttttagtttttttttttatattactttaattctaatgaaaactcctatcttccttcctctccatcctttttcatctacctttgaatcttttgacacttgtatataaagctttacttcctcctttgttactccttttctatcaatcaccaaaacacattcattgtcttaaaccctaaacctcaagaaccgaacaaccacaccaaaaaatgagaccggttggcttgatctttacggtcatgttcttggtctcggccttttcggaatcaagaaccgcggattgcagagttctccttggtggttcgacggaggaaatcgatcaatctaaaattcatggggtcgatttacgaagtgaagacttattaggggtcgtgatacatggttataagaagctaaggtggctctcatcggccggggagaggatgcatacaatggcttcaggaccgagcaggagaggtgctggtcactaaaatacgaacccaaacaaaacattatacttcgatatttgtttagctcaggtcatagaatcatatttttcattttttatagattattatatttattcagtcgctaaagatccatgtaaagtttagaagggtgatattctttgatcatacaatagtcggtttccttctcataaacaccaatttatagtacgtgcccattaatcgatatttattttagtttaacaaatttcaattttgagatctacgttaagccatcaaccatgcaaattgtatatgagtcaataatatagattgaggagatatgttatcggccattctggtgcaacttaaatgatatacagccacatgattatctcttttcctttttggtaaggttgataccacatgattaattataaagaagacattgattagttcatgttttaccacataattggaattaaaagtggtcgcaaattataatcaaacgtggtcgcaaatcgaatttcgatgagatgcaaacgttttttcagctgtaccttttaattcttttcttatttgttcgaaatgttggcctttggggaattaaaaggacatttcaaaaataatttattgtctttccataggagccggaaatggaaaagcttcaatcttcatgcacactatgttttgagtggacccaatttcgacaatctttttttaaatgaagaagataaaagttgttttttttggtaataatgtcgagtatttatagttttataccatgtttagtgagtatattgcagtttcacgttatgaaatttgtaatgagaaaattaaaggactaaaaaggcccactaaaagcccatatacattttcttttaaacacaactaaaaaccagtgagcaaatcctttctctttttgcatgtgtgtgttgtaaagcagtggacagagacgacgatgagtacgatgaagccaagccggagcgacgaaatatccgacccggaacagcagatcaagaacgcgaaccagatcagagctgatttcgattccttggctcccaaacgacccactaaacccactcgaagcgaaccgggatttcctggatctttctctgcttccgacaaaatcaccgaccatcctgaagctgacaaattccaatctctccagtcacaaactcatgttcggttatctctaaaactcgctcttttctcttcacataaaccaacatctttcgttaaatttgagattttggtttttcagggtaaagttctaggtgagggagattcatctgcagttcaagatgagttcctggaaacagagtattactcaaatctcaccgccattgataagcaacatcacacggttccaattccctctctttctcactcttgcttataaaatttcatcagaagaaatctaattttgttttaacgtgctctgtttctgagattagaccggaagtgggtttataaatgtggtgaaggaagacaacggtgaagaatccgaggccgtaaccgccgccgcaatcggagacggaggagaaaaagcggtttacagaagcaatccggcgacgaacgaatggattcctgcgacggaggaagattttgattcggaatcttcgtctaaaccaaaccggagcgagagttcttgaactgatctttcgaaaatgttttatcttcttgtttcagatgttctgtttcttgatattatggcaataaaatattaaataaataaattttcgaaggagacaacaaacaagttgcagacctcatgaacaacaaaaaacaaagtttcgggagatacaattggatcagagaaggaaggacttggcagaaacgcttcgaggagactagtttcaactggattccaagaacaaataaccaaccagcagaccttctagcaaaacacagtttaccatctcaagatgatttttattttcattactatgtaccttcttacataacaaaagccttgcattgtaatcactgaatttatcaatacaaatgcagtcgataaaaaaaaaaaaaaaaaatctgttgacaataatttaattgtgataagaacaactttctaactttcaaaatatccatgataagaacaaatttatgtggacactgtttttttctcaaccaacattgcatatgacattacatgattacaataaagtgatataaaaagcagtcccatattgcttggctgccaaaaaaaaaaaaaaagtgtctccaaacattttgctgcttaataaatcactgaatcatatatgcatgtaataatgtattaacttacaaatttataaaatcaaatctagacattcttattgcttggctctgatccgaagaacaacaactcggaagccatctcacgtgttctgcacgtgacaaccaatggttcagccttaggcaaactaagtcctggaccttcagtcatatcaacctgacctcctgagccgctttcccactcaaagcactgaatcatcgaacccaataataacccaacaacccggttagccaaactcaacccaggacaagcccgtcttcctaacccaaacggcatcattttaccattgtaatgtccaaactgatcactcccttcaaatctctccggcttaaatgacgttggatcatcccacacgcttggatctcgatgtatagcccacaagttaaccaacacgatcgtatcacgtggaacgttgaatccaccgattacacagtcagaagatggcacatgaggaaccataagtggtgccacagggtaaagtcttagtgtctccgacacaacatttttcaagtagttcatgtttaccaaatcttcttctttcaacaaacgacgactacttgatgtttccatttgagtatcaatgttttgtctcgtggtctctagtatttgtggatgattcaataaatttgacattgcccattccacggttaaggccgatgtatctgtgcctcctactaccatcatctaacaaaagaaataaaaaatattatgaaagtttttatttatatcaaaaataaaacacggtcgtctagttttttttaataaacataaagtttagatataaaccttaaattccacaatataaacattataaacataaacctaaacactaacattcgtaaatcataaacctaacctataaaacttaaaattttgacccaaagtataagcaaaatggtttatatcctttatttgctcaatctattttttattcttttaatttatctttcaactattccataaaaaccgagtaattaaaatgggcctttactgacataaaatgggaccaatattaactttttctttttttcgtgtttgtcgttgttcaattatttttagcggtagttggagtggtcaaatcaagattggtaggtggtttagtcgcaacatccatcactaaaatttctgcattatcatctccgatatgagattttataccggaaaataagattgaatatggaaaaacataccagtataagacctttgatggtttgatcactgtagttatgaggctctttttcttgagaatcaagtaaatgagcaatcatggtgttcttaaactccaatctgtctttgttagctctatgctcatccaaaaacccttgtaataaactatccatcctttctccaatcctctttgctctcttgaccaaacctttgtagtcaaaccaccgtagagccggcaaaaaatcagctggattgtccgccgcagagagctctagaatctccgccactagttcccggaactccaaacttatccccgcctttccgccatcatcttcctcgaagaatctctttccggtcatcattctcattatcacatttagggtaagacccgttagtaactgtcgtaactccacctagataacaaaaaattaaaatgaagttcttattttgttatgatttgatattaactggtttacgagccattatcacattttgttattatgtaacctaagatacattaaaaaaaaaaaaaaaaactaagagacgtttaaggatagatagtactttctagtttctataatttgatattgatagcaacggaaagaagatgaactgtttgatccacttactaaatcgagcaaatttagttctatcatgtatccatatgtaatcaacgatttttaacaaggttaaagcttttaaaataaaaaaataaaaaatcattgtttatcaattcatggattctatgtagttatttttttcttaaaatattattaattacctgaatttcatgttttctcaaaattttattcgtagtgtaagctatttattgtcttaaatttgacaatctataaaaaaatataaacaaaaaatgcaacgtgaaaacatatgattatataacggcagttgaatttgttttccagttaattttctcatacctatataagtataaaatatcatatacatattgtgtggtttaaacatttcaatgaattaaatataatataagattttaaggtatgatgaacctactttagccgggcgttcgacagataaatcgtgaagcttttggagaagcatcttaacttcgtcatgtcggatttccgctgaagcgttgagtcgatttgtggagaagacttctaaagcggtgatacgacggaggtttcgccagtggtcaccgtaaggagccgtaaccatggaggtgtagtcataagccacatacttgcccatgatgaaacgaggccgatttgctaaaacgatgtcgtttttcgtcaagaagcattcttcggctgccgttggagatgagatgataacggcaaggcgagagccgaggcgtagagaaaagacggggccgagggagtgggagagatggctgagagtccggtgtagcagtggctttttgaggaggtgaaggtgtccgatgatcggaaaacatatatttggcgacggtggaaggtttttgttaggtttagtgactaggagaacaatcttgacgatgaaaatggcaacaagagtagtcagaataagtaaaatacaatccatatataactccttttctcttctttttttctctaactttgtgtatattttggtttctcctccgtgcgctattaaataatatagtataagatactgatttttaaacactctttaattcatgcatttacaaagtcaaataacaaaatagtgcatacaatagtgataaaattagcgtactaatttggaaaaacaagcaccaattttcttttcttttatttcttttgtttttgtaaaataaggaaaattcctataagacaagtaaacaatgaatttgacaaacaaacagaaaaatcatactacattggagtgtcgtgaacaagtctaatgtataaccacttatgtctctttcatttgatcaatccaaaaggttttgttgaaagttctcgataagataaaaattcaatcgaaattcttagatttccatccattattgtctttacaataatattgcttggttgacattttctacaactataatcatcaaaacgtggcagattcggtaccaacactaacatgaaatccaaacttttcgtttttaacaacagtccttttattaaaaaaaaaatattatacttttagcttatgctgaattactagttcagacagtgaagaacatatgtatacagatttgttaatgggtatttaatttaaaatgcagagaaagacaacattttgacgaggcccaacacatgcccactacatgaccaagtcaccaaaccaattctaaatttcaagaaaccaacattggagagatggaaacagtgaaattttggttctgttgaactttctatagaagccgtgacattgctctgcatccaactaattgaccacagaatacttttattttccatgaacacgtggaatgtaagaaactatataggtttctacacaatagatcctacatacgtcaattatatcgttttaccaacaatggcacgtgccttgcacatagctcgcaacggagtagctttaggcatagtgatcccttcgccttcagtcatgtccacaagttctgcaccaactctctcccactcgaaagactgaatcaagcacccaagagcaaggctcactaaccgcttcccaagctcagctccaggacaagctcgtcgtcccatcccaaacggcattagctttcgagcctctccttctttctcgaacctctccggcttgaacctctctggctcttcccataaacctggatctctatgcatcgcccatacgtttgttaataacaacgtgcgacgtggcatatcgtagcccgccactttacattcatccgatgagaaatgagggagtagtagtggaaccgcaggatacaaacgtaatgtttctgacacaatgttttggagataatggagatttacaatatctgattcttcaactaaccggtctgaaccgattttatcatcgatctccgctctcgctttctcaagtatctctggatggttcagcaaatttgacattgcccattccaacgtcactgaagatgtatctgtccccgcaagaaccaaagcctgtgtatatatatatctctaataagtaaacccactccacatataaggaggataatattagttaataagaacttaccagtatgattcctttgatgatgacatcagtatagtactcgggttcggtttcttggaaagaaagcaaatgatcgatcaaagtttgacccttttctttctctgcacgtttctcatcaaccagtttttgcaggactctatcgagtcgattccccaagattttggtctggttctcaaagtttgtgacccaatttatggacggaagataatcagccaaatttccagaaccggcgccggccattatctccgctataagttccctcacgagcttggcttcatcattgtcttctgtaccggtaccgtaatatcgttttccggctaccatcatgatgatgttgttgaatgccaagttggttaataacgatttcaactccacttcaacaaatccctgcagtgggacgattactagtcaagtttattacattgtgtaatttttaatagatctatatcaaaggtgtatagttcagttccatctatgacgactgagagcttttattttattttctgtcgtgacaaatttgatgcatacaagtaacctaactgataaatatattattttccagccaataagcgacaaataattaaatatgcgtgttaatataataaagaagggcggcttgaaagtggaaaatcctactcacatggacaaattcaaccgcaatagtcgataaataaaaattttgatttttgatattttgttttttggtaaattttagtaatgccaaagtaaataaaagataaataatgagttaaataagaaggtggttacgtacgtgcaaggagtctctagagagatgtgttatgagccgtcggatctcgtctttacggatagaagaaaaggtactgattctatgagaagaaaatatctcgacggcggcgatgcggcggagattcctccagtggtcgccgtaagatgctgcaatcatattggtaaagttatagccgacgtgtttggccatgatgatatcaggacggttcgcaagaacgacgtcgtttttggtgaaacattcttcggctatggagtgtgaggagatgacgtaaacgaggcggtttcccaggcggaggtggaagattggagcatttccaagggacttagagatggagtggaatgttcggtggaccggttgcttgaggaggtggaggtggccgataaccggtaaagggtaagccggagaaggaggaagattaggtttccggttagattttgtgagcaagagtttgatggagatagtgagaaagagaaaggagaggagtaggatttgggtgaggtccattttcttgttgattgcttcttttgtttttgggtttttctttctttttgtgtaaagttgtgtcgtgtgtgggatcgagatggaccagatgggtactttgtggcctttaaaacacgaaaattaattgactgaaaactaaagagacttgaatttttggaaatggttggatagagattttgatctgctttttgaaagagaaggtaataactaattttcaatgagaaagttaggtaaatttccttttttagtatagtaaatatactaaataggatgtagaaggtaaatttccttttttaatctaccctttacatatctaccttctacataggacaaccgaaatatctaaaagacagtacttgccgacttaaaaaatctattaaaaagacaatttatgtccctgttattacgtagcttaattgggggcgatgaatagaaaatatagaatcacaagactcaatgcatttattatcgaatctgtagtgactttatgtgatgtgaattttatactatatgatagttctttttttacgattcttcacgttttactggagaatacgggtcaagtataaaatacgggtcaacgactcaacgtgacctattgattttacaacttcattaaaaacactatatttaacctaactataatgcaatcacattaaaaaatatatcaatcaataaaacattggaccaacaacgcaagagccagcccactaacccggtgagcaagcccagcttcattgacccgatgatattaagcaagattcaaagatacaacaaaagattgaaggacgaattgaagaccaaaacacataattaaaaacatgtcattaaatagaatacatttttcaacgtaaaacatttatatcagtttatcaacaatagaacgtgctttgcacatggctcttaatggtatagctttgggcaatgtggctcctttgtcttcggtcatgtccacaaaatcctcaccaactctttcccactcaaaacattgaaccaaacttccaagagcctggtttattagccgatgagctagcccggctccaggacaagctcttcgtcccatcccaaatgagattagcttctcagcctctccttctttttcaaatctttctggtttgaatatctcaggatcttcccatacctctggatctctatgcatggcccatgcgttggtcaataccattgttccacttggtatatcgtagcctccaactttacaatcttctgatgacaaatgaggtagtagtagtgggactgccgggtacatacgtagtgtttccaatacaatgctttggagataagagagatttacaatgtccgattcgtctactaatcggtctaaaccgactttttcatcgatttccattctcgctttcttaagtatttctggatggttcaacagatttgacattgcccattctagtgttactgatgacgtatctgtccctgcaattatcagggtctaaacaaaatttcaatcattaaactctctctatatatatataaaaactttcttattgattgatacttacaagtatgattcctttgatgatgacatccgtatagtaatcaggttgaatgtcttggagagcaagcaagtgatcgatcatagtttcacctttttccttctccgcacgtttttcgtcgactaatttctgcaaaaacgtatcaaacctatttcccaaattcttgattcgtttttcataactcgagacccaacgtaaaatggaaagataatcaatggggtttcctgcaccggcgctggtcaccgcctccgacacaaggttcttcacgagtttagcgtcatcgttgtcctcaccgaaatatctcttcccggccaacattctgatggtggtgttggatgccaaattggttaacaatgttttcatctctacctccacaaatccctgagagtacgaatacaatattagtaaacagataagagttttggtaagtatgtaaaaatttgtgcatttccatattcgccaccttaacatattagaacaatgtgtttattttgaaccaaataattattcaaccaacttaagacaattaaaacctacactgcatctttttctataaatttaaaattaagcttttctgtacatttgtaatttgtgaataaactatgtaatatttatgaatatagtgatcagactttcgtgaataaatagctagtatcgtaatatacacgcaatgcttcaaaaaaataaactagtcacatggacaatttatcaccacaataaatataaaagtatgtactatatgaaagtagtcgtcacgagtaatgaataaataataaatttgttagttgacaaaccaaagataaagtaatgaatacagaacaaataataaataaaaagaattgaaggagatcatacgtgtaaggaatcacgagagagatgtgaaatgagccgtcggatctcgtccttacgaatatacagaaacgaattgagtctatgagtggagaatatctcgacggcggctatgcggcggaggttcctccaatgatcgccgtaagatgccgagagtaagtaggtggcgttgtagccgaggtgcttacttatggtgaacttggggcggttcgcgagaacgacatcgttctttgtgaaacattcttcagcgatggaacgtgaagagatgacataaacgaggcgatttccgagtcggagatggaagaccggagcatttccgatggatttggaaagggaaaggaaggtacggtgaagcggtggcttgaggagatggaggtgtccgatcaccggcaaggagatcgccggcgacggaggaaggtttagtttccgtttggatcttgtgagcaagaatatggctaaggtaaaaagagagagaaatgagaggatcaagatttggttcaaatccattttgtttgtttgtggggctctctctctttctttcttttcgtctctcttttttttactattgttttggagatatatacatgtggtcaaggaaatatattatttttaaaaattatgctctataaaagataatgtactattgtcacaagttcaaattcgaacgttggactctaattaagaaaaaccttttaaaaaagcagacgaaattataattctagatttcttctcaagattttctttcttaaaagtaaaatataagtgtattaatatattatttggatgtatcacctcgaaattatttcctctttttacataataacaaaagtagtacaaaagtaaccgttactcaaaaaacacaaattagcatttagtacaaaagtctaagctcaagcggactcgttgaggatcttaccaacaacggggcgtgctttgcacatggctaccaacggtatagctttgggcattatgactcctcctccaccttcagtcatatccacctcttcttctcctatcctctcccactcaaaacattgaatcaaagacccgatagtcaagctcgctagccgttgagccagaccggacccaggacacgcccttcttcctagcccaaaccccaatagcttctgagcctccccttctttctcgaacctctctggtttgaagctcgttggatcatcccatatcttaggatccctatgtattgcccatgcattagtcaatagcatcgttccacgtggcatatggtaaccccctactttacagtcttctgatgctacgtgaggaaccaacaagggactcgcagggtataagcgcaacgactcggacacaatgttttgaagataaggaagatgtgagaggtctgattcctctacaagcctgttgaggccaaccttattatcgatttcatctctcgccttgcttagtatctgtggatggttcaacaaagctgacaatgtccattccaatgttactgcggatgtatcagtccccgctagtataagagacttcaacacaatggacgcatacacaaaaaaacaaacataactaattaatcccataccaaatgtgacaatagactaatgaacttaaaatgttactcacgagcatgattcctttgataatgttgtccgtgtagtactcgggttgggtttcttgcagacaaagcaagtgatcaaccattgtgttctgccttttctccttcccttctcgtctttcatcgaccaatccctgcaagaactcatcaagcctactagcgatcttctttatccgtttctcggaacctgtgatccaagtcaggatcggtaaataatcagcagtgtttccagcaccaaaacaacccattccctctgctataagctcccgcacgcgtttagcctccgggtcatcctctgcaccatctccgtagtaacattttccagccaacattcttataatgttgttgaatgttaagttagaaaacattgatttcatctcaacctttgtaaattcctgcaaaatttattgtatatcatatgttaaatatttgctacaattcactgaaattcacctataagcagagattgactagggactaaggattctgattataataaattttgctaattagcataaaattggaacaaagaacaaagaacaaacttacgagtgaagagttccgtgagagacaagctataagccggtggatctcgtctcggcggatagatgaaaagctattgagacggtgagccgagaatatctcaacagcgccaatacggcggagatttctccaatggtcgccgtacgaagctgtaacaaccgttgtgcagccatatgagatgtgttttgaagcaagggagttgaagcggttcgcgagtacgacgtcgttctttgtgaagcattcctcggcgagtgagtgtgaagagacaacgaaaacgagtcggttgccgagacggagggagattatcggagcatcgcctagggactcagagacggatagaaaaactcggtggagtggcggcttgagaaggcggaggtgaccgatcaccggtaacgcccacgacggactcggaggaaggttaggtcttcgcttgattcttccgatgataaacgtgagagaaagagatatgaaaaggaatgtgaaaattagggtttgaccttccatatttgacttcttcttcctcaaggatcttcaggggttgtaacagaggatgatgtggtgcaaaatctgcttgaactactccatagacgttgacttcgaaaacagaatcttatttcggccaaatcacatgtgcccattagtcgtttagatacctaatcattattatttatttattttagctaattatatgacatttagcatagcaatgccacacctagatttttttatttttttttcacacctagaattttgtttgattgataacactgaacattcatatttgtaagactgtaacataattaacaatgggttattggaaattagaatatgatttttgtctctgatttttattatgctaatacgtttcatttaattcgttaccgttgctaagcaacgtattagcattttacatacaaaaactcaagaggagtcgggtaagattttaccaacaaagtcacgtgctctgcacatagcttccaacggtctagctttcggcattgtgagtcctggaccttcagtcatatcgacctcttcttctccaatcctctcccattcaaaacattgaatcaaagacccgagactcaaggtcactagccgctgagccaaaccggatccaggacatgcccttcttcctagcccgaacggcattagcttcttagcctctccttctttctcgaacctctctggcttgaagctcgttggatcatcccatagcaggggatccctgtgtatagcccatgcattagtcaatagcatcgtcccacgcggcatatcgtatcccccaactttacaatctttcgaggctacgtgaggaagcagcataggggctgcagggtacagacgtaacgtttcagatacaatgttctgtagataaggaagatttgggatgtctgattcctccaaaagcctgtctacaccgatcattctgtcgatctcgtctctggccttgttcagcacctcaggattgttcaacaagcttgacaatgcccattccaatgttaccgctgttgtatcagtcccccctgctataagagactgcccattgcacatatacaagaaaaataacataagctagttccttcacaattcataccaaatgtgaccatgactacttaaaaaagctattctctgttacttacaagcatggttcctttgatgatgcggtccatgtagtactctggttgggtttcttgcagacaaagcaagtgatcaaccatcgtgttctccttcttctcctttccttctcgtttctcatcgaccaatccttgcaagaactcatcaagcctaccagcgagcttctttatccgtgtctcggaatatgtgatccaagtcaggatcggtatataatcagcagcgtttccaggaccagaagaactcatagcctctgcgataagcgtccgcacgcgtttggcctccgggtcatcttctttaccgtctccatagtaacactttccggctagcattctaatgatgttgttgaatgttaagtcagaaaacattgatttcatctcaaccttagtaaacccctgcaaaaataacacacctccataaaactttaatagcacaaaaatttacaaaaaaactttgctaatagcataaaagaaattataaattagtattcaaggtctaatccttttggaacaaagacttcacttacgtaagaagagttccgtaagagacggcctataagcctcctgatctcatcgcggcgaatagaggaaaagctattgagtctatgagccgagaaaatctctaaggcgccgatgcggcggagatttctccagtgttcgctgtacgaagcagagaccacggtggagttgccgtatgagatgtgttttgtagaaatggtggtttgtcggttcgcgagtatgacgtcgttcttcgtgaagcattcctcggcgattgagtgtgaagagacaacgaataggagtcggttgccgagacggagggagatgatcggagcgtcgcctaaagattgagagacggagaggaaaacacggtggagtggtggcttgagaagacggaggtgaccgatcactggtaacgcccatgcaggactcggaggaaggttgagctttcgcttgattcttccgatgaggaatatgagagagagaactatgaaacagaacgtgaagataagcattagagcttccatattgatcacgttggattttggtgagtgatgaagttggcaaatctagtgtgcttaaatagattgaaaaacagaacaaaaaatagactcaaacaaaaacccaattttttattttgacaaatggactcattgaggaaaacgttacatgattttcttgtgtcacatttattgtttgttgatatttggattttttgacttttttaactcagtttcatttgttaattacacattattttatagtaaaatcactttgatacacctttattttggggaaattgtatattaaggatcttttccaaaagtttgtcctctatactttatatagataaaaatttggtgaaataggttttaaggaaaattaaaaaccaattatacccttaatataaaatgaattaaaatacagaattgaagaaatatgattttatatctccaatccaaaaactctcaatagaatagaggcttacttccaaatcccaattataaaaccatctctaatgttgagaaccacatgaaaggctctcacccttttttaagtttaaattttgattttatcaaacttaagaacttgaattaagttttatctcctcaacctatcacggctccctcagcttccaaaatctctcttcaaatagtttactctctcaaatttaatcagttttgatgattttattttaatcaccaaaatcaagaaaactctctcaaattatcaagagaaccttgcattggagatacttaatatctaattttttcctttttttttggtttaatgcttaaagttaaaacactttgttatttattgctagtagatttccccgtagcaaaatttagttttggttttgtatcttcatcatttttatcgctcgtatcagcatcgttcaacgtgtgagagaacttaaaacattaaatttcaagcgtccgctagaaaccaataacatacaagcctcatcaaccttaaatattttaaatcacatacccaaaatatcatctaggaatataggttaaatattcacatatacattaacatacaaacataatattttcaccaaaaaaaaagaaaacatacaaacataactagttatctaatgtatacatagccattaccaaaagtctaaacgtcaaacggactcgttgaagattttaacaacagagggacgtgctctgcacatggcttccaaaggcttggctttaggcattgtaacacctttgccttcactcatatccacttcttctccaatcttctcccattccaaacactgaatcaatgatccaagagtcaggtttataagccgatgagccagtccagaaccaggacacgcccttcttcctaacccaaacggcattagcttctgagcttctccttctttctcaaacctctctggcttgaagctcattggatcatcccatagctgaggatctctgtgtatagcccacacattggtcaatagtatcgtgccacgcggcatatcgtatcctgcaactttacaatcttccgaggcaacgtgaggaagaagcatgggagccgcaggataaaggcgcaacgtttcagacacaatgttttggagataaggcaggtttgagatatctgattcatccataagcctgtctaaacctatctttctatcgatttcatctctcgccttgttcaatacatccggatggttcaacacgttcgacaatgcccattctaacgtaaccgctgatgtgtcggtccctgctagtatcaaagcctgaaaattgcacacatacacgtcactaaactagcatgtttcataccaaaatatgacaaggagtgatctaaagaattgatcgaaaaagggtacttacgagcatgtttcctttaatgatacgatccgtgaagtaatccggttgggattcttgcagagtaagcaagtgatcgatcatagtgtttcctttctccttagcttctcgtttctcatcaaccaatccttgcaagaactcgtcgagcctacccgccaacttcttaacccgtgtctcgtaatctgaaaccaaccgcaaaaccggtaagtaatcaacagcgtttccagcaccagcacaagccaccacatccgctataagctgccggacacgtttagcctccggatcatcctcaacaccgtctccgtagtaacgttttccggccaccattcttaaaatgttgttgaatgttaagtcagataacattgatttcatatccactttcacaaactcctacaatgacagaacagagagtccacaaaacagagtatagttagaataaaacagagtattaattaaatccaaattcgtgattaagagctaattaactaagttttaaagctcgcttacttgtgaaaagttccgagaaagacgaaacacaagtcgtcggatctcgtctttacgaatagacaaaaagctattgagacggtgattggagaatatctcgacggagccgatgcggcggaggttacgccagtggtcaccgtaggaagctgcgatcatggttgtgtaatcgtacgcaacgtgtttagcgaggatgaagtttggtctgttcgccagtacgacgtcgtttttggtgaaacattcctcggcgatcgagtgtgacgagttcacgaaaacgagtcggttaccgagtcggagggagaagatcggagcattgtttagggattgagagagggagaggaatgtgcgatgaatcggtggtttgagaaggcggagatgaccaatcaccggtaatgaccatgccggactcggaggtagatttggctttcgcttgagttttccaattaagtaaatgagagagagaacaacgaagagaattgagaaaattagggttttggtttccatgttttagatctattttggtgagtgaagcagttttggaaacttttgtggggttaaatagattagaacaaaattaataaacaaagttcaattttgattttagtattgactatttgacattttgactcattgaccaatgttctcgaagtagcaaaatctgacttgattctatctttatggttacaaaagtcaagtcttgttcctcaagaaagtttgaaaaatagtcctcgtttcaacttcacaaataatgccctccacgtgttcaacataattcccatgaaagaatgatatttagataatccaactaaatttgttcactttgatcttcttttcacgtacaaattacaatgtgtggtgtttggttttaccagaaatcgccacaagagcaagaaccatctgtgaaatgatggaacctattccgatctctcataacgattttccgtcctgtgattttcgatatcagttttgtcaccgtatgacaatcagaacatactcgtaggttcttgaatattttcaagggacttcccggtttggtgctgattagaccgtatgcaatcgcgagtctctcgctgtgaacttgtagagattgctctttctctgtctcttcaagatcctgcaagactgtgtttgtatttggaacataaccatgagacttgatccgctcgctgatctttcttagcattgtgtaaatttctttgcttttcgagtgttctctatctccagctcggaattcatgaactttgttttcgatttctatggtgcttataccaggctccttcactattcctttctccttcatcaagttcctcacttttgcaacaccttcataatcacccaccgatgcatatatgttcgaaagaagaacataaattcctgagtttttgatgtttagtccaatgagatactctgcaatttccttgcctaacacaaaatctccatgaagtttacagcttccgagaacagaactccataagacagaatcagcatccatgttcatgttttttatggtttcgtaagcccgttttaactggccagcacgaccgagtagactgaccaagcatccataatgttcaatcttgggtttaatcccatactcttgtcccattgactcaaagattcttatcccttcgtttactaaaccagcgtgagcacaagcctgaagtgttcctatgaaagttatatccgttggttgcaaccctgtgatcccttgcatctcattaaacaatctcaatgcatcttggctataaccgtgcattgcataaccagcaatcatcgcattccacgccacgatatccttccttggagtatcgttaaaaactaaaactgcctcttccaaactcccacatttgctatacatatcaatcaaacccgtacatactttaacattgagcctaatacgactgctcttgacaaaaacatggatccaacgcccagtttccagcgctccaatctgcgaacacgctgaaagagcagctacaacggttatttcatcaggttttggtttaccttcggccaaaagtttctgaaatagcatcagagcgtcattagggaacccatgttgagcgtatccatcaatcatcacgttccaagaaacaatgtctctctcacacatactatcgaacaaagctctcgcagcctcgacgttcccctgctttgcgtagcaggtgatcatagctgtagaagaaacgagactcctctcaggcattctatcgaacactttctgggcagataccacatctcctcctttcgcataaacgtcgacgagaccagtcgccacgtaaggatcaatccccaatccgaatttaagaacatgggtatggatcaattttccggacttagttgagcaagatttcaaaagcgacgagaaagtaaactcattggggttgatttcagaagaaagcaattgaacataaagcaggaaggcttggtctttgaggccgttaatggaggcagtgttgattgcggcggtgaagaggaacaagtctggatcgatcgtctggtgaaataaagccaacgagtggcgaattttgccgtgggaagcgtatgcacggtggagcttgaggtttagaactgggtaacgagggtggaggaggaggttatgacggagaatagctgcgtggatttggagcacttcatctactgattgcgatttgtcgattagaactgcaagtttctctggcggcggaaggcggaatctggcggttgcggtggtggataactgattctgcggtagtgacgtggcgagaagtggtgacgaagccatcttctaaatttccaataaaatgggtttaattcattaatgttgctttgaaaaacttcaggcccgtatgttaatggaataggcccattattcttgatcaattacaggcccatcttataaatttaaagatgaagacgagacgagtaaatgtagctaattaattaaattatactgtatttttaaaattcacaagccaagacaaatcgtggaaagaaaaaacagcatatagagcatatagtatagtaaactaaagggataaaaaagattttggttggggcaaagagatcaaagaaagattttggttgagacaaagagatcaaagaaattttacaatatatgcatgttcctacaactaaagtaatagtcaagaagattaaaattttacatttgtaatcaaaaaaggaaagaagagggacaaaacctagaggggagtgaaaagaaaaagaaaaaaagtgggaacgagacaaaaggtgtaagaagaagagacatattaattgtgtctacagaactaaagctatgttctgtgttccgaccttagtcatgtgacgttcccgtcaacttctgttttaattaaattctttttacttgtagaaattacgtgagaaaaaaatatagatattgtagaagtaaattctagagaaaatttgaactatatattcgtttccggttgaagttttaatgttggaatctaatactatctaaaattccacggtaaccatccatttatatttgtaacacgagtgtaaaagacaacgaccaagagtccaagactataacaaaaattgattttagatatttacatcgaaaaaaaagtagagaatattagaaagaattgaacactgaaactggacgtgtcgcgaaaacgaaagcgactgaagagaaagtgttcggtagttggattgctacggcctaatttgccgtaacactctaccatacttggtccattcttgtttagtataaattaaacgtatatataacgtatacgtattaatgtttaaaaaaacgtatacgtactaatgtttgaaaaacattgtgatgaagtttgatttattaaaaagtcaataccttttcaagccctctgacattgaaacatattaaacatatatattggcaaaaccattagctagaactaaggttatgtaaaattagtcactttataatatagattatagaatacttttgtgtgcggcgttccaaataaaaaaaatttatgtcacggactgatattaatcttgtcccctcgaccgttttttttgtttaaagaagacaatattaatcctgcattcgaatagataggtcgagttgttaatttggaaaaccaataatatattctagggggtttcgtatacgagtaaaatttcctgatcatagcttgtaagaatcttttgattgttatatcatctaggaagtctaaattgcacccaaaaaaaatctaggaagtctaaagtcttagtagataagttgttttttttccttctcaactttttggtcaaaataagcatatataagtttattcaaacattttgaagttcccaaacaggttaaattatcatggtatttaactggccagtgtatcagcggctttgatcataacccaattccatgagttgatttctttacatgaatttgttttggaacatatttatgtacaatttgttaaaacgtaactagatctatttcaaaatatatcagctttgaatctcttatagtgagaacagcatgattaaggtttcaatactgaacaaatatatactgaatttttgtaaaatcaaagaagttatttaacattttatgagttgcgcagtctatcctacaaaaatttcttatattgtacgtaaaacccttgtgtatgtatatataataaaactatgtttgggagaaataagacaacttcttactactggttgatggatacctatcagctcgaaattaaagtatattattgtgtccacggaaaaaaaaagtagaaaacgcattatttgtttctccttgtacagaaaaatcagcaaaaaatgtaagtaagagaagagagaacgaaaaaacagaaatgacaggacaattgtaaagaagaaacaacgacagtgtttgcccataaacttatgcttttgtctttacggtatctttgatatcgaaacatgtacaattgtttcgaaataaaaataagaaaaaactcatgcttttgccttttaaatgcattttatgtttgttctttacttttattgaaagctcgatcattatgggtttttttttttcattcaaattatatcgaaaataaatctcctaaattgcgaaaataatagtgacatatcaacgtaaagtgtgtctacttctttaaacaggatctgttcacatgcatgcagtaaagatatatatgcatatatagattgaataggaccaattatggcgacgtacatgcatgtgcctataaattatcttctcacaatgcaccaattatttatggattatcacttcttttaagctatgattatggaacgttacttaattatggatagagtcctgtttaattcgaaacactctcaattgcatgtaataatacactcaaattcagtgattatttctcctttttaacataattgctggtttccatattttcactatgcatcacgtaaacacgtgaaagacttggttgttataatattgtaaataagtggtgaattttcgtatcctcccacctcgcatgcggtatattttgtttgtgtgttgataaagttgaactggaaaaatcaaattgtcgtatatataagtacagaaaaacttaaagctgtcgaaattattggcggaatggttgttgccaagaagggtcccaagtctatattatccaaagatatcttcacaaatatcgtcagcaacgaaaaaccataaaataaatagtaacgacgccatgccttctttggatctaatctatatatctctctctttaacatagaataatcgtgttcttttttctttttttcttttttgatagaagttgaattggtcaaattttagtttgtacaaaactaaattcgcttactagatgtttttttttatgatcaaggaaatctcaggcaaaaaaagtaaaccaatcattaacatatgtaaaaaaaactgtaataatatgttgaaaaatagtcacacattgaaaagactaatcatttttatttttatcctctgtttgatttttgttctataaaatctaccaaaactatcgccaaaagtaatctaatgatcatgacattatcactcattcaactatggcgtccagtaaatgggctagattgaattaaatgtgcgagttataaattttgattgtcaaatttggattttaaaatggtcgtggaatattatcatttatcagtactattgcctacctaattcaagggtcaacttgagtactgtataatattgactttaattatatatggacaattgacaacaaattaacgtaaaaaggaccatataaaacaccctatgttttactgtctatatgaacatctatttcaaatttgttttgaaatttacataatatgttacatactaattaattgaatggtaattttgtacaggggacaataaatatcttttagtgaataagaatcagccttccaaaaatatattgataataattattattatagtagtcagcagccttcgaatatatctactattcatataagaaaaagctaatgccgttaaaacaaaatcctactaatatatgagatagttgaagtgactattctaatgaacaatttgctccagaagaaaatttgttcccgaaatgtctaatcaaagataatgcattatccgtgcgattagcctcttcctaaaatagcgaccaacgtctttttatttcgttaagttatttataattattggtccctttggctttttaatcttattgttaatattagtactatttaatcaaggcccacatgtcgagcgacccaacgccatgaccgaatttatattctatcaaatatgcatatatcatattgtttataaatggtcttggtgttgaaacataaatgtatatacagttgatgcattcgtttaaaaaaattccagagtcctattgtggtaaagaaatagactatatataatatagtgaaaactagtgttgtatgtctataacttcaaattagtctatttcagttttgacaaatcgttatccaataaacaaaatttagtaatcataccaaaaatgtagaaacctaattcaatctgcactgcggcataccatttaaaccccgaatgattaaactttattcattggtgattttttttttcttagtttgaaaatatggtttacctaaacaacggaaaacaaagaagaataaagttttgatgaattattgcaaacacaactacacaaggaacaacaagtaggagattaaagtctcgaaaccatattaaaaggagattggtgacataagtgctctgtaattaccgttgtttgtaaaaagaacgaattttcaggaaaaaaataaaatgaattaaatggagcaagttggggagggtacagcacgagcgacgatcatgaagccaattaccaaatgaaattgtgatttagggtgctgatattcataaacttgggttaagtcgttgtttaaaattgtgttttggctgttagcgatgaattatagtaaaacaagaaagagttctagtaaaaaacaaaaattgcttagtactaataaatttcacaagaccattcacactatacaacaataatccttcgttgccagcagtctaatgggactgtgttataggttaatctctctttcacggactattaatttttggctcaacctcaatgtaatttatttaaattatatttcaacgcatacacgtgaatttatacatcttttcataggatttgcaattccggattctcatccgtcctaggaggttgtatatgtatattattggtaactacagcattaaacaactttaacactaagtacgatgatattatatgtacatgtacgtatgctatagattgatataagaaaaaagtaaagagagagcggatgattgttgattgaactaattaacaatagtgtattaggtaggcttgtatccgacagtcaacttaaacttcatagttgaaaccaataaaaccagaagaaaaaaaatttatatactaatcataatcagcatgatgttagacgatttgatatctaactttcttcgttatgatagagaaataatattcgcaataaatcacatataaaaaaaattactttacgtcatagattatcaacttgcctccaaacacaacaacatgatcccctacgctacaatacataatatgaaaaataaattaatcgttgattaacttaaagtcactccgttaataacgttataagcaaagcttattagtttttttgaccgtcattatcgacgaccaaacaaagaaagagtcccaacaaattatgccacgtaagtccagaacgacgcctatgaaaccaataagacaaaaattcaaaaaccaaaacatccgtgaaaactcttacgtggcggtgacatgtgggtcccttatgtctccattaactaacataagcttattgtcgactgtaccttttgtcccccgtctcggctacaaccctgtgacaaacaaagatcaagtcaaaatatctaacctaaagtactctcgtccacgtggacattgctgacgtggaacttctcccttctataaatacaggcttctcttcgccgaattatactcatcaaacgagtaaaacatttgctaatattaaacactttttcttttagaaaaaaaaacaaatatggccgttgattcacctcttcaatctcggatggtttcagcgacgacttctgagaaagatgtgaaagctctcaagttcattgaagaaatgactcggaaccctgactcggttcaagagaaggttcttggagagatactgactcgtaactctaacaccgaatatctgaaacggttcgatcttgatggtgtcgttgatcggaaaacgttcaagagcaaagttccggtggttacgtacgaagatttgaagccggagattcaacgtatatccaacggcgattgttctccgatcttgtcttctcaccccatcaccgagtttctcacaaggtataataattaagtcaactttatcaatgattaatatcgttgttataaacaaatcaattacgtgattttgatcataatattaaattagaaaaatacttatagaatattgctgttgaccgtaattttttttttttaattgtatgtatctgcagctcaggaacatctgctggtgagaggaaactaatgccaacaattgaagaagacttagaccgacgtcagcttttatacagtcttctcatgcctgtgatgaatctgttagtatatatactttaaacatttaattatatctattttcgtaacgatttattaaaattaaccaaaaaatgtttaactacagctacgtgccgggattagacaaaggcaaagggttatacttcttattcgtgaagtcggagtcaaagacgtcaggtgggttaccggctcgtccggttctcacgagttattacaaaagcgaccacttcaagagacgaccgtacgatccgtacaacgtctacactagtcctaacgaagccatcctctgctccgactcgtcccaaagcatgtatgctcaaatgctatgtggtctcttaatgcgccatgaagttctccgactcggcgcagtgtttgcttccggtctcctccgtgccataagcttcctccagaacaattggaaggaacttgctcgtgatatctcaaccggaaccctaagttctcgaatcttcgatcctgccattaaaaaccgcatgtccaagattttgaccaaacctgatcaagaactggctgagtttttggttggggtttgttcacaagagaattgggaagggataatcacaaagatatggcctaacacgaagtacctcgacgtgattgttactggagcaatggctcagtatatcccgacgttggagtactatagcggtggattaccgatggcttgcacgatgtatgcttcgtccgaaagttatttcgggattaacctaaagccgatgtgtaaaccctcggaggtttcttacacaatcatgccaaacatggcctactttgaattcctcccacataatcacgatggagatggagcagcagaagcatcattagacgaaacgtcacttgtggagcttgctaatgttgaggtaggaaaagagtacgaactcgtgatcacgacctacgcggggctctaccgttacagagttggcgacattcttcgtgtcacggggttccataattccgctccacagttcaaattcatacggagaaagaatgttctgctaagcgtagaatccgataaaaccgacgaggctgagctacaaaaagcagtggagaatgcgtcgaggttgtttgcagagcaaggaacacgtgtgatcgagtacacaagctacgcagaaacgaagactataccgggtcattacgtaatctactgggagctacttggtagagatcaaagcaatgctcttatgagcgaagaagtcatggctaagtgctgtttggagatggaggaatctttaaactcggtttatagacaaagccgggtcgctgataaatcgatcggcccgttggagatacgtgtggtacggaacggtacgtttgaggagctcatggactatgccatctcgagaggcgcatcgattaatcagtataaggtaccgaggtgcgtgagcttcacacctatcatggagctgcttgactctagagttgtgtctgctcatttcagcccttcgttgccgcattggtcaccagaacgacgtcgttagataaaactttatatgaaagatatcaaccggatgatgtgcggttttagaatataaagctctgtttctgatgctaattaagactccctgttagatttcttattaggctttgtgaatcgtacaataaaatttgaagtacgtaccgatgtttttttccttcatcttctgttggaatccagctaataactagctttggtccaaaaaccagatatttttaaaatcagcatttaattattactacgccctaaattttctttaaacacggaatgttaatcaatgtgccctaatacttccaacataaaagtttggaaactaacattagatcttaaattattgttagatcttaaatttcaactgtgtacaataaattagatcttagattgtggactaccccaaactcgggcttctctacttagatcttctactaaatatttgggcttctacaatgggttcaattactttccctctcagggcttttaactagtttcggcaattcacaattgtaaaactgttgcaacatggctcattcagagataaagcccaatatcagtattggtaaatacacaattttattttttacttctttttacacgagtttctagaaatgaatagtttttgacatgcaaacaattagtcaaatctcttgtcgaacaaattcagtgcgaaagcaatgtatacgaatcaatagatatgcccagaagataaaatgacaagttatcatgaaacgaatttgaaccagaataagaggagcacacacaaatgcttcgttaagcatatatgaacaaaacaaggccccacaaaaggaataaaaaattccttggtatgtgacatatcagggaaaccacactaactaaaatatttttacgaccttgaacatgttgaataattttttttcctttgaaattttaagatatactgcaaaacattatgagtacttgtataagatatatacacaagaaaaagagcataaaaaaacaaactacaaaaaaaaaggattatatattaaatgaagttatagataaattcataatgcaatgtctccttttttttttagaatgtttctatttgacttaacaacaccttaaaattttaatagaatgcaacttaaccgaactattgtgactcaaattaaatttattttggaaacaaagctaaaacttcgaaagttactggagaaacgattggaaaacaataaattaaacaacttaatatggcaaaacaatgaaacgtgattttaaaaataagattaaagtaattgaccagaagagtaaattaggctgagatgacaaaaacagcgattagaaaaagactatagaagcgaagctggttcctcgctgtcgctccaagactaaccacctcgactaaaactacttctggtggcaattttttagcattttatttagatcgtggttttacgtgcataatggcttttggctcaaaggaaaaaaaaaacacataaaaatatatttcgacatgtgcaatcaaatctttgacaaaagagatttgctgatttgcaatcgcaacgtgaactattatatattaccatggaccataatgtattatacatgaaaggttagttttttttaatatatcaataagatattaattaagattaactaaatgtataaatatcgaccgttatagacagagtgaaataacatagaactttttttcacaattttgacatgagctccatgcgctctaagacaagcttttcttttttttttgcttgtcgtttatttttcttttgttgaaaatgtcttttaatgttatagtctctccatttcattatatgtatagtttcagaaattttcacatatattatattaagaaaagaaaaaattggtttttgtccttacgatttttttcattgatcaaatacttaaaattaacagagataaaactgaaacaatattttaaattaaaacaacatttaaagtgtaacgaaggaagtaaaaaatgtttaccaactatatttgtcctatctttcttaaccaagctagcttatcttcactaattcaaagttgtcacgttgtctgtttgatttaatactatttcgagtaaaagcaaaagtatcttatggaaatatctgctaatactcgcaataaatatatatgggacaaatgtaaagaaagatgtagtatggttttaaacttttaataataacaactatatatatacatatatagacatttttatcattaaaaccttttcacaccatgcaggatggttcccattctagaccggtgaccctataaataatatgataatttccttgacaccatatcacaaccaaattccttagagaaaaaggaagagaaaggtcaaagatgttttactatgtgattgtccttcctttagctctctttctcttggcttacaaattattcttcacctccaaaacgaagcgtttcaacctccctccctctccaccttactctctcccaatcctaggccaccacaacctcctcaagccgccggtccaccgtctcttccaccgcctctccaaaacacacggcccaatcttctccctccaatttggctcccgccgtgccgtcgtaatctcctcctcctcactcgcaacacaatgcttcacaggccaaaacgacatcattctctcaaaccggccttgtttcctaaccgctaaatacgtcgcttacaactacacaaccgtaggaaccgcgccttatggcgaccactggcgtaacctccgccgcatttgctccctggaaatcctctcctcgaaccgtctcacaaacttcctccacatccgtaaagacgaaatccaccgcatgctcacgagactctcacgcgacgtcaacaaagagatcgagctcgagccgctcttgtccgatctaacgttcaacaacatagtaagaatggttacagggaagagatactacggcgacgaagtccataacgaagaagaggcaaatgttttcaagaaactcgtcgccgatatcaacgactgtagcggcgcgagacatcccggagattacttgcccttcatgaagatgttcggagggagctttgagaagaaagtgaaagctcttgcggaagccatggatgagatcttgcagcgtttgcttgaagaatgcaagagagataaagatggtaacactatggttaatcatttgctctctctgcaacaaaatgaaccagagtattacactgacgtcactatcaaaggcctaatgctggtaagatatacgagtttatgcaaattagtgttggtagtacatataagggatctagggctgttcaattagttaggttcattcagttttttttttggttttcagatcttctgtttttttggtcaacttcagatcttgtggttcacaaatatagaaaccggttgggttttaaaagttttataatttggatttgaagtttttcgcaaaatatatctttaattattttttatattaggtagttagctaggtacagctatgaaatgtaaaaccgaataggtctatttacttttattccatttaggggcatctattgatttgatttaagattagttttacagaattggtggtatctatagaccacaccataccggaattggtcttgaaaagttatttcttaggatttgggacccatgcggctgtctatagtacggacaataatttattcttaaaaagtagaaacaattctgactattcctagtttcctaattcctactatgtagaaactattctgacccattttttcaaaatcgatatatcaatatggtttcacatttatacggttctagtttaacaagatttgttaattatgcgtaaaacagggcatgatgatcgccggaacagacacttccgctgtgacgctggagtgggcgatgtcgagcttgctaaatcatcccgaggctttggaaaaagcaaaactagagattgacgagaaaatcggacaagaacgtttgatcgatgaaccagacatcgcaaacttgccttaccttcaaaacatagtgtcggaaacattccgattatatccagcggcaccgcttctagtaccaagatcaccaacagaggatattaaagtcggaggatacgatgtgccacgtggcacaatggtgatggttaatgcgtgggctatacacagagatccagagctctggaacgaaccggagaagtttaaaccagagaggtttaatggcggagaaggtggaggaagaggagaagacgttcataagctgatgccgtttgggaatggacggagatcgtgtcccggcgccggactagggcagaagatcgtgacattagcgttaggttcgttgatccaatgctttgactggcaaaaagtcaacggcgaagcaatcgatatgacggagactccggggatggcaatgcgtaagaaaatacctctatctgctttgtgtcaatctcggcccattatgagtaagcttcaggcccatttaaaaggttaggtttgttttcttcttaaagttctttttagttttctgttttctatgcatggagatgtgagattttgctgcgtttgtgtaacgaaggatatttgtgtaatgcgaacaaatgaaattccaatgttttgcccatatgtaatggtttataagatttgtttctctttaatggtttctaagatagttagcgggatgataaaggtttggattaacaaaacatgtcagataaatttctacagcaagaagatgagtatattatacaaatataatcaatatatacataaaattgataaacttcatttttttgttttggcgagggacactcatttctcatattgtgtcacccaaaagtcgaagcttgtgacatgtctattagagtttttaagcccatatattataatatgggcctagagcctccatagatttttaagatctttattgcaaaaatagatcactatttctgaaatttaaattttggtctcatgttttaaaatttatataaaaaccccaaacaaaacctatattccagattggccctgcttttgagttctgatctcctcccatctacgagagttttgttagagacaacttcccaattttgcattaaaaaatctgtacatttttatcttaaatgaaaagattatatgattttttttattaacaatgccttagttcagataaaatatcacatgcaattacctggcatcgggccatcacatattgtgttgattacaagacgataacacatttgccattaatttcttttagagtagtcaggaacacagtaagcgactgttttcttataatatagtatctcagactcagaccatgtggatttgctagagattctcaacaaatcataaatacttcttttgactaaaaaaatactaaaataggataaaaatatctgataatatacattaactagtgacattctgtgtttactactattcaaatacgtgtatcatgagggttagtaatatatcaattatttttttaaactaataaacacaaatattaaagaaatattttaagaattcaaattttattcatttaattacaattacaatgttggtaaatagaaatacattggtgtaaagtatatatatttattcaaattttattcatttaattatagaactcaatctccctccacctccactcgatcatccatctctttccttcctcttcacatatatttttaaaaatttcttgaactatgcttgttacacttacaaaggtaatcttatatattttacctaagtattcccagtgtcgaattcttccttaacgtaataaacattattattatattttttcaaaataatttaaacgattatagtaatttaattcagacataaataataataataataataataataataataaatcatagttcatatgtaatatgcacgtgtgcctatatacatattcgtgcataattttggatttccttatcatgtgcctagttttggagattgttttaattcggactatagaaatatataaatctacattaatttaatatgataaatattaaattttacgtaatattatgttagcaaatatgaaaataataaacgtttatttgaaaaattaatcacccaaaatattatattgacacatgtgaaactattttttcaatacatcattttgtgagttataattcttttcgcagttgattaattttccgtatttgtgaaagatgatattcttgtttatgaaggctttttaaaaaagaattcttgtttgtgaagttgataatcaatattggtattataatatatgatataatatatataatcaacgtctaaaaaaaagatggtaccaatcaagcaatatatattctttctttttttggttaacgccaatatatctttcatttatcaagatctcttcaccaaccgaataaacaaatcatggtgacttggcaatgattcaatattatatgtcgggttaactcatggatcatgtgacttctattatatctcattttccataataatacggtgattccaataatacgactaacatgatatctatattataatatatatatatggatcattgcaaagaagacatacacaacatgccatattttctccattaacaactgaacatacatcaaataaacttggctcattgttaaaatagtactttttctagctagtattctatgttatttaaattcgtaattcacaacaaaaacgaaatattaataacatgaaagcaatttgaataattaactatgaactatatatatattatgcatttaaaaaaaatatattaaaacaacccaccaccggtgagtgctcgggaagtttgtgtacaacaacggaaaaggaacaaaatgaccagaagagattagcaagatggatcaacaggatagtcggttaaaatctcccgattggtgtgttatgcataatctaactacaaagaaggattgaaagactcaaaaaaataaaaatgtcgctgaataagcgtcatggtgctttccattcttccatctcgaacacggacacgatatgtccctctgctcaatataagaacactcactcaaacaaaataaatgcttacttaaaaaagaattagttgaacaaaaaaaaaaaaaaaaaaaaaaagaattagttgaaccaatattcgaactcatctagtatacacaatttatggctgaacctgatctcttttgtcagcttgagtgagtttgtgtgaaatctcatgtttttctcgtttgatacaaaaaaacatttagaggtaataatctgatagccaacaaaaaaaaaaaaaaaaaaaaaaaaaaaaaaactgatatgatacatgtatccatgtatgggctaatccatggcttatggcgacaactgggccacatgcctaatgttgctgctagcgtcgtggttaattggacctgacgtgtaacaggcttggcaggtttttttttttttcaatttgtgtcaagcctgtgttttttttttccaatttattaacacctcgatacagcaagcatgtgaatgtgacttgttgccgcctattagcactactatcggaacttttccggttttcccacacaatatttttttaaacgaaagttccatatctaccatatctttttgttttgctaaaaaattctgatttgttttaccaaataaagaggactattaaactaaagctaataacaacgtaacgggttttcaacacccggaacaatctggaaaaaaataaagaataccaattagaaagaagtggtggaaccatatcaaccatatgttaccctaataaaaaaatcagtattcctataagttattcataattttagggtttatcaaaataaattattcataaagcttttgtcaagcttaggtttcgggaacacgtgatttacgtgttgccaggtaataatagcatacaataattcaaagattttcaaaggtaattttaatctaaaggcttgagggagtcgttgatagtgggggttagataatcctaatgaacccttagtttcgtggaggttgagacgtatctttatcctagatttcacagtacgaaaataattcagttttccagtggatatttcattgttcactcttctggttttgatatcatgttccacaagtcttccgaatactatacatcacatagtgatccaactatccaagaatgatgtattaactctgtaaattaagataacgttctttgtattttatatgtcattttaagaaagtattttatatatgatttgtattcattttaagaagtatacgaagagagtttgattttattttcctcgtgacgaaatttgtttctgataaatttgaaagatatgatttattttctgtcttggtaaggtcagttatcacattaaagactaaatagtaaattttatgtttttttgtttctgaattatttcagaatttcttgttttattcatttaatatttaataatatatgttaaatgatactattacactttagaaaaatgtgcttatttctatcgtaccaaacttctctttttttaccgaacttgttactgtttgttttgtgaacgatttttgtttataaaaacattactcgtttgtgataaatttaacacatttttgcataaaaatgtatcaatcatatacaaatgaaacattacatttttagtcatttttagtcaataagtagacgtgtgtatcatgattagttgatttaatcataattatgatatttaaaataaacatagtttaatgttattatgttggtttttaatatttttaattaacgtcaacctatttttttttatttttttttacatataactatgttgttatggaagtcactattaatttaactgataaaatatacaataaaatagaaaaaacaatagattttaataaaagaataaaaaatttgaagatacaaaaacagttcctttttcttaataaatcaaaatcaaagagatagtgtactgaagtgaagagccagccactatacgacatacgtatgtaattacgttttaataacctgatggcaaataataatatattttcgtcaaaataaaatggtcgtatctctttgctaaaaccaaaatgtcatgatgtgattactcaattttctactataaatagattaccaaatcattcgatcggagacaatcaccaaagaaagaagtacaaaatgtttaactatgtgattattcttcctttagctctcttcctcttggcttacaaattcttctttacatctaaaaagcagcgttactatctccctccctctccatcttactctctcccaatcctcggccaccacctcctcatcaaaccgccggttcaccgtctcttccaccgcctttccaatatccatggcccaatcttctacctccgacttggttcccgccgtgccgtcgtcatatcttcctcctcgctggcaagagaatgcttcacaggtcaaaacgatgtcattgtatcaaaccgccctcgttttctaacctccaaatacattgcttacaactacacaaccatcgcaacaacatcttacggtgaccactggcgtaacctccgccgcatttgctccctcgaaatcgtctcctcaaaacgtctcgccaactttctccacatccgcaaagaggagatccagcgcatgctaacgagactctcacgtgacgcccgtgtcggcaaagaggtcgagctcgagtctatcttgtacgacctaacgttcaacaatatcgtgaggatggttacagggaagatatactacggcgacgatgtcagcgacaaagaagaagcagagttgttcaagaagctttttactttcatcaccactaatagtggcgcgaggcatcctggagaatacttgcccttcatgaagatattcggagggagctttgagaaggaggtgaaagctgcagcaaaagtcatcgatgaaatgttgcagcgtctgcttgacgagtgcaagagtgataaagacggtaacactatggttaatcacttgctctctttgcaacaggacgaccctgagtactacactgacatcattatcaaaggcttaatgctggtaacgaatcaaaaacattcatatgtatttttaaaacaacgtaccttcaatagaatgaacagcaacatcattactatacaaaaccttaggctacaaaggtagttatgtctctaaggatttttaaaaatataaaattatatttactagttatacaaagatttttataaaagttgagcttctaattggtttcttgctttttttttttatgcactcgattttaggtctggtttatttgggttgaaaagataagttatttccactattatttcaaatttcagatacaatgttttagtatagttttaagggtattcgttttggagcagttaaacaaatctatgatatttaatgaaatttgtacgtgtatgtgagactagcatgaatcacgttttaaaatcctctgttttctcacttatgatacatgaaacagggtataatggttgcctcatcagagacctccgctttgacaatagagtgggcgatggcgagtttgttgaaccacccaaaagttttggacaaagtaaaattagagatcgacgagataatcggacaagaccgtttgatcgaagaatcagacatagcaaaccttccttacctccaaaacgtagtatccgagacactccggctacatccagcagcgccggttcttgtgccaagatcaacagcagaagacatcaagatcggaggatacgatgtgccacgtgacacaatggtaatggtgaacgcgtgggcgatacatagagatccagatctttggaccgaaccggagaggtttaaccctgagaggttcaacggtggagaaggagaaaaagatgatgttcgtatgctgatagcgtttggaagcggacggagaatatgtcccggtgttggactagcgcacaagattgtgacattagcgttaggatcgttaattcaatgctttgattggaaaaaggtgaacgaaaaagagattgatatgagtgagggtccggggatggctatgcgtatgatggtgccgttacgagccttgtgtaagactcgacccataatgaataagctcccggcctacacgaaagtttagttatgtttttgtatttttcaatggaaaaattgttacattatgttgtgtaaccaagactacgagtgtaatgcgcgaatatattgaaataaaatgctatatttagcaaaaatcaaccaataaaagtgtgtttattttattttaaatcatgattaacgtcagctttttcctgctattttaatggggttatgaatttttctttcttcatccaatcttttggttgtcgaaattttgttttcagaattgaaaagactcacataatgtaacaaatacaaaaactaaaaaaaaaattgatggatttttttatatggctacaaaagaagattgttggatacgtaatcgaaaatgacgttatccttcaagacttgttcttcttcttctcctcgattaacaccaaaatccatcgccggagcaggagacgatgcttctcaattcttccatcacaagacaagttacagagcacacacaaccacactcttcttcatcctcgtttctctttctctctttggtttcatctctctttattattcccccaacacgatttatcgagctgccttctttgccacgacacgcccagctaaatcaagattcgttagttacgtgatcaacactcaagattcaaatcatcatcaattatccaacggttcacgtaggatcagagccgaagctgttctctggccaggatgggagattctagtgatcgtttcaccggaggagaaagctaagccaccgccgtttccaggagagaattacatatgtttttaccctaacggagagaaatccacggcgagattcgccgcgattctccctttctcaaaccgtgcatcattcagatgcagtcttcccggaatttatcgccaccaccatccaattccgactccgatcctcgcctcttcgaaaaggttccaactttcgccggaaacacgttggcctgatctccctctatggaatttcgtcgttttcgaagccatttcaacagaaaccgacgtcgttctcttagtcaaggggccgaaccgtggattaggttccaataaaccaccggagtcgtttcggtgtgtgtttggtgaggagtccgatacagccattagaaccgccgtgactagctcggtccaagaggtgttccgatgttcattaccgaacataacgatcgatactccggtcaaaatctaccttgaggcggtggcaaccggtaaagaagagacaaagaccgtcccgtcggtggcgtattatagccccaagcgcacgttagtggaaccacgtgagaaatcgctattgtgcgcgacgacgatggtgtacaatgtagcaaagtatctgagagagtgggtgatgtatcacgcggcgatcggaatacagagattcataatatacgataacggtagcgacgatgagttaaacgacgtcgttaaagggcttaatagtgaaaaatatgacgtcatcaaagttttatggatctggcccaagacccaagaggctgggttctcccacgcggcggtgtatggaaacgatacgtgcacctggatgatgtatcttgacgtagacgagtttctcttctctccggcttgggataaacaatcacaaccgtcggatcagatgattaggtctcttctaccgtcggatcagagcatgattggacaagtgtcgtttaaatcacacgagtttggaccgtctaatcagacaaagcatccacgtggaggtgtgacacaaggttacacgtgtcgacgagaagaagatcaacggcacaagtcgatcgtgcggctaagcgcggtagagcactcgctttacacggccatccaccacttcggtttgaagagagagtacgagtggcgcgtggcggacacggaggagggagtggtgaaccattacaagtaccaagcgtggcaagagttcaaggccaagtttaaacggcgtgtgtcggcttacgtggtggattggactagagtctctaatcctaagtcgagagatcgaactcctgggttgggctttaggcccgttgaaccggaaggatgggctcataagttttgtgaagtcgaggatttgagattgaagatattaaccagaaaatggtttgggtacccagttaaaaacggttataggatggcatggcagagatgatttttttttttattagatgggttcttttgttaatagcatagttgttttggtaacagttttttttctgtttttgtgaacaggtttgaagttttttgttaggtgaaagtacggaactcaaaatagtttgaaatgtgactagagttatttttgtctagtaatcccaatgtcccatttaaaatatctgaaattcggtttcaaaatataatttttcttcgtgatacaagacaaaagtaaagtataaaaaggtacattcagaggcctggctaccttatctgtaacaatcattgtattctaatcaatgaatgtattttatgagttcaaagaaagaaagaaaaaaagaagattggaaacgtacgtacgtataagtttctgtgatttggtgcgatgataatagtttacgtaattataaaccttttaaccatcttggacctcatcaataaaattcagaagacaacaacttcaaaggatatgaatagttgactaactgaaaacgtacgatgaagaaaatgcaaagcaaacaaaagaatgttatcaagagcggtggaaaagaaatgctttaatgatgtgattcaacatcagtacatcaccatactcgtgtacgcaactttaaaagttgtcaaaaaaaacagacatgtgatcaaatatgattcgcaaatgcatcgtacacatgtgacatgaacaattatatgacagaattttgtttttgttagtgacaaattttcttcttttttttttctttctgtagcggtagattccaattagtatgataagaaaccacatacatatatatacacctttttttcacgaccacaagaaaatatattattgtttccttcttctgcctccaacattgatatgctttcaaaattctctaatatgagttgtcttactgtttaggtgacttttgattcaatagaataattttcttttaaatcaatttatgaacacctcacggaaaatcatctaagcgcaatgatgtatgaatgaaacggttgaataattcttgattttatgtttaaaaacatataagcacctcgatcgcagcaagcatgggagtgtgatttgcacgtttcatatattctcctagtccaattctctaagagaaagatatcgatctatgagatgagttctatttattgttcggtgagttttaattgatcaaataaataactttctttgttaattaattaaacaccatgcgactatagtattactccatatacagagatgtatgattagtgaacacgattgtagtatcctcgatttctttttgttatcaatttcttttacaccttgatcacaatctgagtggttgttactacttattagcacgtttcatataaagtaaataattttatcaattaataatacatatatgcttcaagttgagagcaattaacgctgtcaaaacaacacaaacaaacattaacaatgaattttgggaaggtgtctctcatctatgattgattttaagatttgtttttccttctatatttgcaggaaggaatagttctatacaatcatcagctaaacttcaaattctttgtaatcgtagatgttaatagtaaactcgaatattccccaagtcatactaataaacaatgaaaattgaagaaaataaaagtcataaacaatgaagaaataaacaaattgcaatataacaatttcttacaattctcgacttttgcgcctttgagacatggtcaattaatattatgtatagtaatggtagtggacgagtggttgatatgtgaatccgaatttaatcccacatcacgaatttgaatgttttcgaatttctatattaaaaagttttaaaatggttgccaagttgtattggttcgagtatctttattccgagactagcatatggaaaagattaaagaaagaaattctagagtttgagtttagtagctttattggtggagttttgaattagattgatttatatggaaaacgtgaaaacttgcatgtgttcgaatttccatgtgaaaggttaaaaaattgttttcaagctggcatgggttaatatctttaatcttcgacgagcacatagaaacaaatttcagagtttttatttaacttaataatggagttttgagagaaatgataatcataatatggagaactcgaaatcgtagaagatgttttttgtttttttcctctggtcttttaaaacgaaaagcacaactttcaagttccactactaattgtcacgttacagatatgacatcactactttgatttgagtaaaattttctctataaataaaagaacaaacaaaccataagccaaatcctcgcacaagtagaaaaaaacacaaacatcctgaaactagaagagagagacaaaatgttatacttcatccttctccctcttctatttcttgtaataagttacaaatttctctactccaaaacgcaacgtttcaaccttcctccaggaccaccgtcacgacccttcgtcggccatctccacctcatgaaaccgccgatccaccgtctcctccaacgctactccaaccaatacggcccaatcttttccctccgtttcggctcccgacgcgtcgtggtcataacatccccttctctcgcccaagaatccttcaccggccaaaacgacatcgttctctccagccggccgctccaactcaccgccaaatacgtcgcatacaaccacacaaccgttggtacagctccttacggcgaccactggcgtaacctccgccgcatttgctcccaagagattctctcctctcaccgtctcatcaacttccaacacatccgcaaagacgagatcttacggatgctcacacgcctctcacgttacacacaaacctccaacgaaagcaacgatttcactcacatcgagctagaaccgctcttatctgatctaacattcaacaacatagtaagaatggttacagggaagagatattacggcgacgacgtcaacaacaaagaagaagcagagctattcaagaagctagtctacgatatcgccatgtatagcggcgctaatcattccgctgattacttaccaatactaaaactattcggaaacaaattcgagaaagaagttaaagctataggcaaatcaatggatgatattttgcagcgtttgttagatgaatgtagaagagataaagaaggtaacacaatggtcaatcatttgatctctctacaacaacaacaacctgagtattacactgacgttatcatcaaaggccttatgatggtaaaattctataaacttctgtgagatttcaatgaagtgaattgtgagattcgattttaacctgattgtttttgaaattgtgaagtcgatgatgctcgccggaactgagacctccgctgtgacattagagtgggcgatggcgaatctactgagaaatccagaagtactggagaaggcgagatcggagatcgatgagaagatcggaaaagatcgactaatcgacgaatcagacatcgcagtgcttccttacctccaaaacgtcgtctccgaaacattccggctatttccggtggcgccgtttctaatccctcgatcaccgacggacgacatgaaaatcggaggttacgacgtcccgcgagatacgatagtgatggttaacgcttgggctatacatagagatccagagatttgggaggagccagagaagtttaatccagatcgatataatgacggatgcggaagcgattactatgtttacaagctgatgccgtttgggaatggccggagaacttgtcccggcgccggattaggtcagaggattgtgacattggcgcttggatcgttgattcaatgctttgaatgggagaatgtgaaaggggaagagatggatatgtctgagagtactgggttgggtatgcgtaagatggatcctttacgggccatgtgtaggcctaggcccattatgtcaaagcttttactctaataagatgagtagaggttaaaaaagaaaaaataacttattggatgtaactggtaattatctttaagataaagatgaataaaatgaatctttgcctcataaataacaaataaataatagataatttagattctttttattgttaactaaattatctccataaaatactttttatatatatataatttattccagtaaaattgagtttaggatgttattttactaagatgcagttttcttatacaaacgatttcaaagcttattttccgatataaaaattaattttgcttaaatcctcaagaatttttttattccactgacgaaatttccaggcttcaaatctcgctgaaatgaaaaataaagttagcaataagcaaataatcagtttaaaatacgtatcagaataataaaataacatgattttaaactaactagcattttctataagatactaaaaatgttagcaattgcgttttaacgaatggataaattttcattttaactagttacatttaagtttactctaactagttacataagatttagacttttttacaataattaataatcggaatcatgtcaaaactgaaaattttgtatgtgaattgtgaatgatacgtgactaaaatgctcgttgttgttctttaactgtgactttcataaataatcattgttatctatataaatttaccttccgagattgaactatatccaacgtcttctggaaatcttcctctcgacgtttaagttcagctagtgattcccactgatctggtatttccaggaaacgccttaaaaaagaaaattagagaaaccaatattaacgatttatccaaaaatacattatccatgtctattagaaatatttaataagcatatctataaaataagatatttactccaattgtttttccacttcggccagtcgtgcattgacttcttcgatctcatcttcgatctcctattttaagaaaaaaaaaagcatgcataagtactttaacttttttttgtttatatacctatatattgccaaatcatgagatttttattttattttaatcaacatgcctttggttgaattagataacgaagcccatcgtcaagactctcgtcactgcacttggtttctgaacgcatctgcatgaccaaccgttgtatattctagattctccataccaatcaagaaaaacaaaaaatttaggtaacgttaaacaaaatcactatacgaaaatcgagatgaattaaccgttagatagttttgatttttttaccggttcatgagggaggctgtgttcgatcagatggaccaaccgagtacaatatcaggagttcatgcatatgtataaaataagaatattagaactcatacaataaaattaaacaaacctattactttatgttcttatatataaatgcatgcattaacacaatgaatttaccgtgtgcgtacagcccgagcaagaaacttgcatataatctcttcgggtctataatcatgaacaataacgatgatttgatatcagatgatagtaataatatatatgatgaaataataaaatattggagctacaagaagaagaagaaaatgaaaacgtaatttattaatataatatacctctctttggcataaaagacgaagagtttaccagaaggagagaaaagaatgagagcaactggtacattacatagaacaaagagttcataagctttctttaaaagcccattttttcttttggcgaatgcaatatttctttgttgcctatcatttattcttttaatctgtatttttactctccccattttttcttgtcttcttttcacaatgttttctctttctcaattagctttcaaaatattttttataagtttatttatatagttatgagaaagaactttctatggctaaacttgtagattttccattaaattgtatcaaaattactaattactttaaattaaataaatttattaattaacatagaaccataatcttgtttgtcaatcaaaagatttagttttcttagttaatcttttcttctccagatatataaatgggtattatctattgcacatatattttataaattgaagtaaataattaatatatttataatataaagtaaatgttatattcattagattatgaatttggataagaaatctcatttattatggctcagtggcccatttcatcccatatatgaattgtgttatcaaaatttatgtcctggatgaattttttttaccaaatactatatgtaatgaaatgttttgaccaaatatatgtaatgaaaaaaataaaaaaaattgggtcaaaagggaaagaaatccttctctagaggataatggaccccacttgtgtaagataaaacagtctctctctctcccccacaagaaaaagcctcgaccacctaacgataatggtggctatgagatctccgtcttttctccgtcgtgtttctcaccgccgattataaaatacttatctactaccatctccttgtcggaaacggcgagctaagtcgattaggtatttattccttttatctcttttatctgttaaagctttcttagggtttttgtttttgttgttttgcatttgaaattgtgatctcatcgactatcaagcttcgaactttacattagggttttgtgtaaattcgtgttcttcttcactttctctttccaattcgacgcatatggatacgtgatgaaagttttcgaaaatttgttcaatttcaagtttagttctttatgactctactgattccggatttttctagggttttaattgagaagaaataaaaaggatattttggtatggaggtgaaggaatcgaagatagatatggatgattcagtcaataaggagattggggaattaccaaaagatatgccttgtactagtaactatgaggaccatagttttcataatcatgttgaagaagatgtcactgaggatcttccttgtggtggtgatgatattgatgctgatgcttctattaaaaaagaggttgcagagttcgacgaggacgaggttgatatattggaatgcaatgataacattgagattcaagtctcagggtgtgatgatgggactgatggatattcgagttcgtttggtggaacggattctgaacatgagaatgatcaagaagttgactccatgatttgtaatgagacttcacttcctctttgggtgaggtaagctctttcctcacgcttcttatttagtcttttatcttaatggtttccatgaaggtttgttgtgtgtttaaccaatagcagaatgagaaaaaaatgtcctcttgcttaatttggttttgtagagattttgatggttttggtagcttgtgtacttttactttttaattgaacactatcagttccatctctatgttgctggattcttaaaagactgaaatttaggagttacttgggttcctgtactaatgagaaaaacgtctgtagcttaatttggtgttgtagattttcatggatttggtagccttgtttactgttacttattattgaacactatcagttccatctatgtgttgtttgattgattctgaaaggacttaaatttgtgtgttactttactacgacttagctagctgcgtctttgatttatctccttttaaggaagtcaggagaagaattgctctatatcgtgaatggtatgcggtaattattatggtttgttcctttttatggcagaaaaaggaagctgactgatcattggaggaggtttgtacagcctactttaatgtggcgttgcaaatggattgaactcaaatacaaagaacttcagaaccaagcacagaagtacgacaaagaagttgaagaatattaccaagccaagaagttggagttagaaaatgtcaaatcagaagaacttggagtaaaggctttacctcctcttccatgttatactcagaaaacccgactcatgaagaggaaaacgagaaagcgagttgaagagaccgctgatgttacatcctatgcatcaaaccataatctcttctcttattatggtatggaactagtttggtgttcttgtctttctggtcgtgattaatgttcatctaccattacttgtctaataatttcttatcttattgtttctgatctttgtatagattgtcggaaatctttggccgatattgctcttaatgacaactcccgcaacctaggtatggtgttctaaaatctcaactatgatatgatattactccttttgaaaactttgatcttataaaatattttctgtcttgggtcatcagataagaagaataagagcgccaaggatgagacagctttctctgaagagacaccgcctctcgagtttagagaaggcgatgcgtacttggaacagatacttttgaaaattgaagcagcaaagtcagaagcccgtaacttgaagatccgcgtagacaaggttttgagtgaaaatccaagtatattccctctggctaacacagtgaatccacttggagctgctgatgtatacaccagctcagaacaacaaaagcccctgctggctatcaaaaacgaagatgagaaatcgatcatctctgaagaaaaaccggtgaaatctgcttcagtttcatctcatcacgtctcacctgaagacgacgagacaacagatattttactgtctgagattctagcatcaaagcgaagggaagggaaatctattattcccgataagaatctagtgaagacagaacaagcttcaattgaggaaggtccatcaagacctgtaagttttccgctaactcagtgtaactttgctaaacccttttggtctcatatgccattctaacacaacgcaggtaaggaaaagaacaccgcgcaatcgtgaaatcattacgaaggaagagagtaacccaaagaggcgtcgggtttcaagagagaagccaaagtctaatgctgtgatggcttctaggttttccaacaggaagagaaagcgaggaaaacgaaggtcaggctctgccgggttacgaagaagatcctgaagaaggtttggaaactttcaagtaactaatcggatcttgtgttaaaaagtaaaaattgttcattctaagatattcttaactcttaagcctttaaagtacaaagaaatatttatagtggctgtgttttgattcttcatgtcaacaatatattcaaactacatcaacttttgaactttacttctataatttagagtgtatatatttttctctattttgtattatcaatcaatcatgttttatatcttgtcggtgctaagttttttttgtttggaaaagaaagaaagcttagttaaaacactatttcaaatacattcgtctagagagtttggcagagacaatggctaaaatggtgaccgtagggacgaatataacatcaggtataagtttgattaattttaactgaggaacattctctcctgctctcttagccgccattgccgccggtggagatactattccggtgatcatagtgacatcatcgagtttacttggcttcacgctctttgacatgaactcaatgaacaattttttcttctcttcttcgtctttcgcttccttccaccgcgcgaaacaaacctgtttagatcattcaacattgtgttaaaaatatagagaaattattataagattctttgtgtgattttgatagaggagaggactcacctttatttggtccggggttgggaaatcgaagtgcctgcctggtaaagccgagttgaagttgctgcactcaatagataaaattccttttaaaaaaaaaaatgttggccaacataaccattgttttcgaatgatcaaataatgaaacaatccttacttaaagatgtctaaaacagcaacgtggaaatcgtcgaagttgttgatagctttttgggtaaattgtttgtagagtgaacccattaccatattcatcatctgcgtcggtggtacccctaggccaaatatcgaaatctatttagaaagatatataggacgaaaatttgtcaaaacggttatataacgatttgagtcgataattgttaggttaaaaaattgcaaaaccttttccgagaaagcccattgaactacccatattgtctagaagttagtctttaggaagaagaaaatgttatgtttatatacaaatttgtattggtgtgtggaatcagagacttggcttggtgggtttgtgtctttgcaaagccaagaatcttgaatctctacacaagaccttggttcaagtataacttgtgctttacttacaaaatcttagccatttcttcacagttgagtaatgtacttttaataaaagcatggggaatatgacttgtcctctattctcactttctttttgcctaccatattagatatccattaatttttttctttttcaaatctagttctctaaggaacaagacaaaaatatgaatctagctatttgaaaggtacaataaaaagcattgtattatatgattggttggatctatacatgtttagtaataaattttagacaattcatttatagcaacttggccacttgagttgggtatcagatatgaattcaataaatatttaccaacttcacattataaaagactaagatccaactaagtagctgacactttcattctcgcataattatactccaattgtaaatatttgtttaaagaaacacatgtaattggtttcaaacgtaaatatcaacatttgatttactaacactttaaacatttaaaagactaaaacaaattatgtaactgctttgcttattgttacatagacgttacttacacaaacattttattttagagtaaatgtccataattctgcattaaaattgaatgtgtcattttcaataaagaactcggacccatcactaaaggacttttgtctgcaaaagaaaagaacaatcaatgtgtaaaacagtattttcatcactgacagatatgaattcttattatttccatataaataaaataaaagaaaacaaactgtataatcaattaaataatactcattaccaaattcgtaaagaaagagacaatggtagggtcaaaaatataaaaactaaaaaatatcagaggtgaaatgataaataatttagaatgccataacgagaacggcccatgcggttgcaaccgctcccaccgctacattcctcaacacccttgtgctcgctgctccgctctgcattcaattccatattttcattttagttaatcgaatatgtaattactaaatcaatataacaaaaattgaaaatctatgttcactgttttgaaatgtctcattggttatttttaacattgatactcgaacttgtgacggtagataaatatcaacattgttgatataagctaatgtacctgatcgtcggcggaaggaccgggagaaaaagcgtcggagttaggtccgggagattcagtcggtggtgcaggtggaccgagaagttccggagccggagcaggtgcagcttgatgctttttcgatttctttgtagtcttcttatgcttgcttggagcaggagccggtacatcagcaaccggagcggctaccggagctggaggagaatcagctactggtgctggaaccggtggagagctcactggagaagaaaccattggtgcaggaaccggaggagagctctctggaacaggtgtcggtggtggagacgactcgctaacaggagccggagattttggtgactcaaccggtgaagaagccgaagcagttggagttttcgccggagccgtagtgggagaagtaacggcgggggatttagtaggggaagtagttggagcagaaggagtggtgggagatttggtcggagaagagataggagattggccaccgacaccggcgacgacaatgcagatcaatgtaactgttaggaggaaattgcgatccataattttgttaaaatttggatcaaacaaaaaaaaaaaaaagagtttgaactttgaagtgatggttaaagtactgatggagtttaaccaagcgtgttgtttgtttgatgtaagagaagtgagttttatataggcgatgaggagagatctggatcgttggattaaaaaaggatcacagacagatgtagccgttgagaaacagaacatcatatcctgtatctattaatgtaggattcaatacttttttcatttttattttacagaatagctcttttacttttttcttgtgcgtttttataaggatttttttttcttggcatttttctcctgttatattctgcaataaatttattcgccaatggtgggtagattagcatgtgttttgttgaacatatgatcagatatagaaaatcaattaatagtaattgtttttacgttagacattaaattggttatactataaatcactagtcttgtgtcaacataataattggatttgaaattgataccaatgtcgctcacaaattttatcattgtttaataattatgatattttatattatagattatatcacacggtcgagaaatttccaactactaaattgtcgggaaattattagttaaaaaaatagcacaatataaggtacatagtataattgagataaatttttggggtacgacacatggagtcttggattagtattattatgtgatcatcacgggtgaaattattatgacttgatgcatcatgcgtctataaataaataaccttaataatgaaaaatgattaaactcaagttcaatataatgcaatcaaaataagacaaggagaatgaggaaaagaaaacgtaaacaaaaaaaaagagagtctttgatcggaagttagagggagaggacagctggttgattgattttgccactttggattggtgcccacacggatttgttggcactttcttctattttggctcgttttaatctataatttgttgccaccgtcaccgtaattgcctgaatactctttggccttttttcattcgagtcgaaatggaatcaaaaccgttgccaatgaagaaacgtattgcttaggagctacgattttgatttctttttgttgcttctcactttgttccaatccttctttcaatgactttatgtagaatattgaaaagtattcataagcgtttccttatatttattattttgtgttttgccagactaggagaaaacacgtttcggtcttaagccattcttaatacttttttttttttgagtttttgaatataaagacaatgagtaagtggaaattctgagagcggcgcgtcggtggagagaaagcccaagctaatggtcgttcgttgactttgttaaagactttgacgaatgagacagtgagtgttataacgataataaatgaaactcgaatcttgtaatcattttttactatgaagcaattattttgagattgatttcagaaacatgcaacggttatatgatcatggtatcaatgctgtcaatcagagcagacagaagattgtattaaaaaaagaggtgtcagaataaacttaaaacaacataagatcggccaagggttgtaaactctcatgttggaacctctcatgttgagaccagagaaatcatatttagatacattattaaatctgtaaaattatattaaacacgagagttaataaagttaaaaccctaacaaagcttttctagctttttttttgttttttagatcagaaacagacggaagatgtttgactgaaacacaagttttcttactgctcatggtttagttagccttcttcacctcttatgaaagattgtgagagagacacagagagacagagagagaaggagagacagagagagagagatttgaatctcaatcgttgtaagtgctaagcgcagcaacaaccgctcctgttgtcgaaaaagccgaggaaatttccgtatggtctctccacgacgtattgattttcagggacgggtataaccaagacttaaccgaatcaacaaaggaacccggttcgacattaagtatagcttcccaatcgatctgtaaccctttcgggatagtctcagtgaactccatattagcagcaagcagaagtccaagtaacactacaaatcctgttacagcagttcctcgagctaatggcataaaattgtacctggtaaaaaaaccaatgattgctattaaataccaacagcttccgagtaattaatcaatcatacgttaggttgtcatagtcgtttaccagtaatatgtcatgcgtaagatggcgtctctaacggtttctaaagcgtcgagctcagtagaaccatagttctctccacaataggcagtgcataaagcctgtggattcagttagacttttgagtttgttttctcagaaacaaaagaaataccaattatttgcatatgcttaggtcttacctcccaagctgaggtcatttcttcatcaaagtcgctccaccttgcaggtgtacatggagttcgaattgaaaaatcataccccagccttcccctggataaacacgagagaaatttattgaagaaagtggtgtgattaggatttgtgttaatcacatgcaacaaaaagtaaaatttacggtttttgaatgcaggtgattctagttccttcgaggcgtttcctgaagatatgaacaaagaaagcaaaatcaacataacagaaaatcttcagtgaagagaattacgggacaaatcaacaaacccacccttcagatccggtactgtcgcaccaagtagccacccagaaatcctcaccaacaatattgtgtagctcatcacacgtttcagcacgcattatctgcatctcgtgaggaaatacagtaagagaacaatgataaaacgagtatcattcacgcgagaagaaagaaacactgactttttcgatcttctcatctttagaaagatcaataactttatctttcttgctgcgtacagagagtttatccttgatgatgctctttgcaagagtcagggttctgaagtaacatattaaaaactgatcagtccatggactgagacaaaatcatattgaatacatgaaaaaatctcatgttttctattatatatgcttacctttcataatttgggaaatagcgtactactttagcttgaccgagtaccattggtgtatgagaaccaaacccagaattaaactcttcactgcaatcagtataaacaatctcaactacccaagtaatcaaatgaaactaaagttcggcaattgaagttctacttaaacatagactcgcagatgctgagcctgcaagagtcactagacatcaaccattgacatatcatgggaaatggaacttgtaccttagtttgttaacccacaccactgggtcacaaggctctgaaatttgtctccatctgacagcaggggaataaacgtcttgccaagacaagatagagcggcctgatgatctatcttctagtgaggcatatccagttgaagtttcactgaaactgctactactacacccagcaccacctctattctggctaagaatgttggttctctctctcctccggtttttctttccattttttgtagtgcctttggttgaattcctccactctatgcgccaagctttggaaactttttgagcaatctctatcacagctaatcctgccatacggtgctgtaaaatcatggaaacacaaataatcaatggaatagaactatgatacgcctattcgtgtatagagtagacatctagtgattaaatgcaacaggaaccttctggcgcaagaaataaagagagctgctatgaggtttaaatgtactacagggaagaagaaattaaccgaaaaaagaatgttgaaaaggtagatactccaaaaatttgctgaaagtcacctggcgtttgtttggtaagaatccaggacaatcatattggatcctcttgcctattaaatcagcaaaacgaagaatattcgccttctgtttggttattgcaagatcttgctttttcagtttacccttcttaagtgattcacgtaggggaggttgtctgtaaaccttttcacatacattttttgggtgtaatcttttgcaccagtactcctgaaaaatcacaagaaattaaaagccacgttcaccacatataagagtggaaaaactcaaaaaagcagagtgacagtgcaatgaactctgagatctactttctaatttccacctagagcacttgaaagcactaataatcatctagtatctcaaaacgaaataaaggatcaattcagacttggaattggttgagctatttgatacttaatatatattgttttttgttaattcagggtaaatccctgaacctatggaagggttcaggagaatcaggactaatccctggggagagggtatcccatgggtagggtccccccaaatgttccttgatacttaatattgaagtcacattttaaagacatttaaatgttcctttccagcacattcagtatacccagttaaacttgaccagtttgttcccatatatttctttgacacgcaaacaaagtaaaagtccgactttgtggcaacattagaaatatcaagagagagagagagagagagagagagagagagagagagttatcaccttgaacattgggtctatgtcaccatcaatatcaaagcataaaaactcactactaactttggaagctgtatacaaggcaagctccttctgcagaagaaaaaagaataactttaagtgttattgtgaaggaaacgtttagggctgctacgaaacctccaattttattagatagactgatagagggaggttttcattgttcagtgtgatagtagtaataaacaaacagagaatcattactatcagataataaggccatgcttttacaacatagtattgcaatagcctatcattacaagttgctacaaacaacagtgtagaaagaaattagtcttgcagataaaacttcaaaatccagtcaagctaagttattaacaaagaaaacggaacctgataaaacgccaagcattgaagaacaaatttctccactgcatcaagttccacgtcaactgttgcatcatagtccttcacctgtgagcatattcaaggcaagtaataagagagtctcctttaaaactatgtaaccataaagttaacaaacaaatattcaccgcatctctatactctcctacggcgtgatagcaggaacctcgtaggtacaagcactctattgtgttctcaatgctcaagccaatagataattcttggatagccttcctgagaaataagatcaccaaaaacaactacaggtgagtaatatcactgctttaaagaccagccttgtacataaataccaaggtgtatgaccaccaaaagaaaagcttccttttaaaacatccttttgctcaaacgcagatctttatcaccaagagtcaggggaagtaatcttatcggatatcacattttaaagtagacattgagatatccttggatccctcatgaacatttaaggtaacatgcacatcaacatagacaaattttcccctttaaacaaaattcagtttccaacaatcctaatttaccctaacagaacatacctgtgttcgcctaatccatggaacactaatccacgcaagtgataggccttccaaaccctggtcaagacaggaaaattgccatgagtacgatggaaaagcagaaatatagtgcaacacgtggtattgcatcccaaataagagctacctgttgtcgacttgtagaacctgctcaatgcattccaaagccttgcagtggtcggccaactcttgatagaactgccaggaaatgccaggaaataaccatcgagtacagtgaataaaaaggatgagtgtatcataggtaactgatttaagcaatagactaggatgaacaatcaaaattaaagatataagaaaccaaataatcaagtaaagttggtccttcagaaaaatcttaattagccttcaaaagtcataatttaagctttcttcattttgaagtctcactagctttacataaaactaatgtttattcactattacatgcatgaaaacaccaaaaaaaaaagaaaaaaaaaaaagcaatggttataatcctattttcatcacagttcagcttaatagttgaaaattcaatagacaaagcataatctcatactatttattttattatttgtgtgttacctgggcgagatgaagccatgcttcaagataattactatccaattggatggactttaaatgcgcctcttcagcttttttgtattcaccaagagaagcaaatgctagtccctggagagatcaacaaagttttactacgaaaacatttgcgtccatggttactttggaaaccaagaataacgaataacaatagagaatagtcttaccaaataagtgtatgcagacttgttatctttctcttgcttcagacatatagataggtccttcacagcagcagtgaagtccttagatttgaaattaacaatacctgaatccattgtgaatgtcagtagtacttcatggtttttcaccaaagaaatcatgtattaagaaatgaaaactgaaataaggcgcaagattttaaaagaaacactgaataaagacacttacccctttcgtgcaatacatcaggtgagtttggctcaaaaacaagtgctttagtcaaatcttcaaccgcctatcacaaagggtattttaataaaagtgttgtacaagaaacgtttttggatttttaccaataaaacgcaagcactaaacaggcttaaacacagacatcaatcagcggattatccaaattatttgatatcaatcagacaatattattgattaaccaataaataatcaataaatgtgcagggcgaacattagtaacaagccttgtaaagtacattaattgtttatgcttttagctctgaattaagaaaagaagcagcgaatggaatcactaacctcaacatattccccaagagcagcacgagcctgtcctctccgcttccaggcctcacttgctgctgggttagattggatagcctgaccatcatcatcatagaagcagaattggtgaacttaacccactgtggtaacaactcttgtcaaatatatgaataccttagtaaaatcagctatagcactttcaagctctcgttggaatgcataagctgtccctcttcctataagtgcctcagggtaagttggttcttctttcagcacctgcacatagataaactaaatagtaaaaaaattgacccaataatgttttccctaaacaacctccgaaaagaagataaacagagaaaaaaataagcaagagacactcgccagagataaagatcaccaaatcaccttatcaaaaatagaaatagctttcgtatagtttccttcattcacctgttgacaaaacagaagctcagtcatcaaaaatttggaagctataccttatagctcttttcttttcctttttttctgtgtattgctatacctgtgcaatgcctctagaaagtcgaaaatccacacttatggaatgggttcccgatattcttgctatggtgtacttcttatttttcctggattcatcactaattccgcaacgtgcctcagctttatggctcattttgctagacttaatacttatcttgtttccattaatcgatagctccccgaaccgatcggaactttcagctaaattatcatgcaaatcagaaccattacaaggtttacatgattcataataaccattgatttggctgccacactttccattctctttttccttgtacactgatccgttacataagtcggaattaccatcagattgcttgctagccttggatgcaacttttgaaaagcttactatctttgattgctcgcccaattcgctagatgactcatgtgagttcccattgctacttgctcctgattcatggttgtccagcttgtcacttttttcatcagacttctcactatgataggcaggggtctcttgcggagactcggtggcatgactttttaaaatcccatcaatttctcgtcttgcatcttttaagagttcttctaattcaagtaactgcttcacatctgctgtctgctgcaacgcacttttatacccttgctccaaaacaagaacagcttcctgttttctccccaaagccaaaagagcgcgtcctagatggaaaagctgatacacttgagttcacatgcagtataccaatcaaagtaaaccatgatccggtaaccataaaaaattccatccccgataagatatataacttaacagatattcttaagcaaccattatatcgtcataactagcaggcactatagcattatctaaacccctaattctagttctgaagctatcccgagaatcaaactcaattcccagagaaactatgaagcactcaagtcaaagcttggaagtgaactaacctttgagaataaaagcttgaatggcaaaaggttcaagcagaagtgccttgtcacagtccttaatcacatgcttgtgaagctccaattgattataacaaaacgctctattgctgaaaccaaattcccaattcaaaaaaaaatactgagattaacgggagaaaaatcattgataccgatccggagaaattgaatgagagaacaaagatctcgaaaccaaaccatatatccaaaattgaagactccttagcaaggagcgaatcgagaactcggatcgctttagaccagttccgtgaactgcagtgcttggctaactcgaatcgttccgatgtcgccgtcgccgtcgccattttttgagcggtggtgtctccgatggagaaatcaatcgcctatttaatctttctcaattttatccctcttcttcgtggccgtcgtgtcacgggaacgatgggtttaggggtaaaaagggaaattagtacagtggagaaaatggtaaagagagaagactttgacggagaacgaaacggggaagaaaaaaaagtaacggggaagagagagatagtaaataaaaaagtaacggagagataagagcgaagagacgatgatggtgaatgtgaatgtgatactggtggtggtgcttgtggtgctgctgctgcttctcaataagtggtgctaatcaaattttggggcaagagtcgcacacgtatgaagtttcttgtcacgtgactttttgttgtgtatatatgggcctagcccacttattatttattacccttttacaatgggctagctctgttaatcgtcttgccaaagaaattctaagcaaattgaagttaggtgtgtgactgtattggagaacaaatttgaagtatatatatgttctcaattctttcatgactatgtaaacatttaaattgtatgacctgcaatgaattttaaaaaaatggaagtttaatcatagtatttgactttttttttgggtaggctaatcatagtatttgactagtgatgaagaaataatattgtaccaaatgatatttaaatttcaataataaaataattttaagaaaataaatagaagttttatataaagtgaattataaaatggaagtttaatcatagtattgactagtaagaagcaatacaatatttaccattttgttttgtatcactaattttttaaagctatttacttaccaatctataactaatttcataaacaacaaatcgaataaaatctgagcaggcgcgtcaataaaatttgaaagttattagtgataaatgataatatagaaaacaatatcttttgcaccgcatccctataataacatcaaacaaatccataatttcataagcaaacaaacctaacaaaatatgacttaactccatcctaattcaaaaccctaaattttcattttactttgtttaaaacttggctaatttttgttcacaaacaaacaaatttcaaaaccatcacaatatgtatgttttatggtttggattacccatccataaatgcaaactcaatgctaattcctagtatcacatgttaattactcttcacacagtatagcacaagcactcttgcaaagttgcaataattcactatggaccatcaattacgaacatcactattacatcaagcaataatgagctctgagcaaagctgtggacaaaagacagagacttttcgttaaacaagataagaacaacaaagatcaagatactcaagataaacgaatcagaaccaaacgacaacgaaataatgttctcaatagactagacagacatatcacatcagatattttttttcaacttttcttacatcgtttaataattaactaattaaatctcttacaatcacatagcaatgtcattacgaatgtgacggaggatgacaggaataacagaatctggtgagctaagctgaggaagatgaccatcagaaggaataacctcgacgacggattcacagccaagattggcgtgaagatactcggagacaacgactggtacagctaagtccttaacactttggagaatgtgacacggaacagtgacaaaaggtaagatctgtctcatgtcactttggaaaatggtctggccgacggagagagctatgtcgggacgcatattgaagagtgttctgctgaattcttgaacggcgatggagtccatgtcgccaccgacggcgagtggagcgaaacctaagcaccacgctttgtagttgcttcggatggcttcgaatagttggtttaagtcttcttgttcgaatccaccttggtaatcaacatcgtttacgtatctataaacgtaccaaaacaatataatttgattatatatgtttcttttgtcagaagaaaattaaaatatataatatactgtgtgagcaccgtttcaacaattttttttaaaaaaagtgtaagtaacacctcagtaaaaccaaataaaaaaaaacaaataaacaaatgggtatttcatgattttttgttcataatttacggatttttattgaaatatataatgaaatgcttcactgattttgagaaataggataattcagacaagaggataaacaaagaggcactttgtcgaaattatgtcagaatgagaaataaatatttcgaaataatagataattgtgtaaatttaaggacttaagatgatttttttttatttaaattgtaatgtttaatagtttttatgaaatcagacaagagaaggaacagagaagcccttttgtctaaactatgtcaggatgagataaaaagcaaaacatatttctatgtacaacttgtgaaaaagttatacctcggagaagcagagatcatgacgattttggagaagagatcaggacggttaagagaagccaagacaccaatcatggcagaaacagagtggccaacaaagatacaagactcaatcttgagatcttccaagattgcaatcaaatcgaaagagtagccttcgagatttgagtaacgatcgaagtcgaaatagtcagggttggtcgtaccggctcccatgttgtcgtagaggacgacgcggtaatcgtcgaccagatgtggaaccaagtgtttccatactgactggtccgtgccgaacccgtgacctaacacgatcgtggcttctcctgaaccaatcaccttcacgttgtgagcttcttctaccacacccatctctctaaagaagattcttctctggttttcttcttggtacctctcttagtcagttcgtggagaaattatgatatttgtgttgttttagagtgttacgtattattctttataaaaaaattcgtatctgtggaagaggaaataaattatttaaaatatcgcgatttacaggtggcaaaaaaaggtgaatggaaccatgtttgttggattgtcaaacatcgctattcgtgataatttgttttttggaatcaagcccaaaatattttggaacatttaatggagtacatgacgtggagttactgacttctgttcaacaataaaattgttacattgggttacaaatacatgaaccaattatttttaattttgtgcatgaatttcaacaatgcattaatgcgaaagaaaattagtttcaatcattcaaagagtggcagcaaatagtcaaaagctgatataattattattttaacaacactagttaaatttcgcatgtatacaacttgcaatgaatatagcatctaaaaacctcataatatttgtttttttctgcttgactttaacttgtcagtacttttcgatcatttagaagttagaagacattaattattcatggaatgccatggtgagtatacgaccacgtattcacatccacttcctcatcattttaagagtcaaaaatatctgtgagaggatcctggcccattaaaattcaaggcccatttagtgtaatatggcttcatgttctctctttcctaagaccgtttttactgttgaccaataaagtctgaactcgtgatgacgtggcgtgaaatcgagagacccacgtgtcatcggcgtgccgttatcctctttccacttccggtctccgttcccacctgagtaaaccatactggtcgtgaaatgacgattctcgccgggttgatacgccggcgttttagtagattagttccggttcaactgaattacggtttcgaaccgtcgcgaattctctttaacccgagtcaaggaagaactcggttgctgagcggcgaggctgagtccaatcggaacgagtttccggtggagaacgcttacgatatcttgaatgtctccgaaaccagctcaatcgcagagatcaaagcatcatttcgcagactcgccaaggagactcatcctgatctgatcgaatccaagaaagatccatcaaattcgagacgattcgttcagattctcgctgcttatgaggtacaatgaagaaagcttcactcttcactcttatgattagtttcaaaatcgaaaatttcaagcttttcaagcttttgtgatagagttatagctttagaagtgtctgatgaatgatttgtggtgatgatacagattctatcagattctgaaaagagagcacactatgatagatatttgctatctcggagaatggtaatgaagaagcactcgggacaaggttatatgattcacaggtataaaacaggattgacattgagtcaagagatggaagtagttgaatggttaaagtggtatagagaagcaatacatgatatagtattggagaagagagtagcaaatggtactggttacttagatgaacttgaagaagatttttattcagctatacgagcggcctactttgggcctgatgttgaatctgttgagcttcttcctgattgttttgaagctgaggaaaggtctgtgtatgatacacgagaggttttgcatttggtatcaggacgggatctttttggtatggtttccttggttgataacttccttgagctttcttctgcttgctcaaagaaattggctttgtcgtcgtttatggattcggaccttggtcaagcagttgagaaaggcaacaatgacatgatgtctgctgaaaggattggtcttcagatatctcatatacaatcttcaagaagtaaaaaccatgtttctgatgcgtataaagatattcagctgcatgtatctggaagagttgttgctacagccattagggttcccccaaaagggtatcatgaaaagaaacaaattgagggtgatcacgatcttatacacgttttcctcaattcagatgaaggatctaatcatggcactgaatcgcctccgggaaatgaaagtggtgccagacttcttgttggaactataagtggtcttgggacaatcccagatgaaggttcatgttatgtctatgatgggaatggtgctaagactcatgtgataatgaaacataggacatttctggtttgtgacttatatgatctagcatttctttttatgtacctttcgcaaattacaacgtgtactttttcggggaattgttctgtgatgcatatagagatatgatccgctagttatttgatggaataggcatgtatgaaaattcttcatccacactctacaggtgagacatttgcactggtacaaaattggggaaaaggtttccatttgtgaatgtagatgcagtagagcgaagttaccaccaagcaagtaagccaaatattatttttgttttattttagttctggctcacctttaactcgataaaataacaagattggacagccttttcactgttttcatcttcgttagaatgcaattcaataaattgatatctggaacacagaattctgtagtttcctttgttgaaatgctgaagtagtcagtgatctttgttggaatgctgaacttatgatactgatccctaacgtagccttcatctttcttacctcagtgacatgaaaccataattgcatggatttgaaaacaggttttggttgtttgagcctcgttgtggtttgcatgatgtcggaggatggtatgttgaaacttatgggaaagataaaaagagcaggacggtcctggcacaaagattctgggatggcctggaagaggggagtacactggatgggtaagcttactatacatatgaagagaaagcagcttaagatattctactggcatccttgtatctgcgttgaccacatttttcctcagtcaataaagtctggttacatctctgtattagttgttgtttgtgaagtaatctaacttatatatgactttttgtattctccaggagactgcacccaggtatctacttgcttacactagcatatcgtactcttgatcttgaagatgaaaagagaaggaaacggtcaatattggagatcctcgaggcacggttatctaaaacattggattggtgtaaagaattggttagaagaaagggccttggaacttaatatggtaaaccttctccctttccggatgaagatccaaagatgattggatttacaatttccgcatggatgctagcacttccatttagacttatgaggttgtggctaacaaaatgctcaccaaagatgggagtgcttagttgtttaaggggatcttgcagaccagaaggtggttttaaaacccagaatggacgggaccagaaggaacacaagaaatggtgaaacatatactgtgctggggtgtttgatcaaaaaaaagaagagaaattctgtgttggggaatgaatcatgtgtactaaagaagttaaaccacagaatattatatctaaggaaattaaacttctcggaagaaactgacttcttacaagatatgcagtgtttgggaatgaatcatgctaaaggactaggtttcaaagcgactcattagacttgttcaaaataccattatctaatgaaactagacttgattttcagaaggaaaatgaaactaggcttggttcttcagcttcttcgtcttcttaaagggtcctaactcctaagcagattcagttccggtcaacaaagctttggccggagggatcaaagccacagcgaagcgttcgtccttggagtatttctttcgtaaagctcccttagtactgctctcactcccttcttcttgttgcttccattgctgatacgccaacagctttgcacagtccctttttcatcattacaacaagaatgaatatccaaccacaaatgcaaaacgcatatgatgcaaatgaaaaaagaaaggaactttcttacatgagctgagtctcagaatagccagtgtgatgcttgagagtgctggtccatatgggaacttggcggagagaagatcttgctgcgtagattgcagaagcagctaccattgatggactgaacattatcatcgtatcgtaatgcattacgcctaactcagccaaatagtgcaccatattctccatctgcaaaccaaaacacaactgaatgttcaatatgatgaaatgtataaccatggaagaaactaaaaaaacgctctcttaccttttcgtctgcaatggaagctttgatgaaacgagctaggaagacataatgagtcggaactgtcaagtaccactcaagtgtagacagtattgtcttctccatcaccagaatctgtttgtgactgtatgcatggtctgcaatatcaactagatcctccacctgcaaaagaattatcttttcatttagccgaagacaaaaaagaatcaaaaccagaagattcaaaagttctctgtttttatcacctgtggtggccaaatttcttcatacttggccgacatgagaagagcactgagaccaacaagctgcagttcttttcgaggcactggcttaaccgacaagaaccgatccagaatgttaacagtgaggtaaaatgtttccgggtttagctcgaatcggacatgcacatcaatcaaccactccaccaggatcagtctcatcttttcattaatatcaggctgagatgccatgtaatctcgtggcctccattcactctgccaatccaaatgataatttaagtaaacaagttaatactacaacaaagctgcaaggaaagattcatgaatagtatagtatacaaacctcaacagacttgtaaaaactgtaaatatcttccacatattccacagctgcgaggtcattctcaacatcagcagaatcgatatcaacaatcttttctttctgtttcttctctaaaccacaagcagcctgaaaagcaaaagaagtttattcagaacagaccaaaacattttcttacttcacactaaagaatcatcatttcacaaggtaaaaaattaccttgcttctagcagtaagaacagatgtgtaagtggtcgctttcttcttagtagccttcttctctcgagcagcaactaaaccaagttcttcatcactgtctgaacttatctcaatcacgtctactacctttggtttcccagccactttcttcggctttggtactgcgtttctcttgactacaggtttctgcagatcaaagacatatacacatatgacatgagtttaacaaatctaacgaagaaacctaatttgttcaccaaaatacaggggaaaaggaacaaactttgagattatcctccacaagaagcgtgggattttgagatcgtgtacgaggacgatgattgatcttttccggttcgttgttctttgggtaatttcctcgaacaacattacctatatcaccaagaacttgacggtttcttcctttcgctacgtttttgccatctaccacaacaacatcatcttcaacacaacaaaacaaaaccaaagttaacaactttagattcaatttgcaacaatcatcagccatatcaaatcaagaaaattccagtcaaagccacggactttatacttgattcgcaacatattcgtttcgttgttcatagatataacaagaacagaaagaaacgaacaaaacccagataccaaaatcgaagatcacaaactaaaccaaatcaaattttgtccgtaaaaaccttaaaaaaagaaaaagcaaagatctttctcttacccgtggattgttgaggaacaatcgaacgagaagtcatcatcttagtgttctcttctctttctctcagactaaaatctcaggtttgtagtagaaaaagtctaagtagtgggggcgtcttctatataggaggcttcttgaggacgatgagccgttttataagaaataaaaacaaaattaaagaaaataaatgaaccccaacggtctgattgtttttgaaaaattagaggtcgtgggcttgttacgggccttacggctgtagagacacgaaatcgggctttttcactattgggattttgaagtcacaacggcccacttattctttttattgactgtgaaggatataggaaaaaaaaaaaaaaaaaagatttgtgtgaattagattgctagttaaatccggttagttagatgttgatctctgtttggtttacatggttttgaaatgaaaattgattttggttcggtttgcattagaattagtacggtttagagaaaaaaaaacaaaaaaaaaagtcactcgagactgttttggaaacaaagcgagtagatgtaaaataagcatgattttgtgggtttacccctacagaaatcgacgacacgcgctcaacgcgaggttggtgcgagtgggcgtggtctgtagcgcgtggcacgaggttggtgcgagtgggcgttttctggtgcgctctgattggctaaaaaaatgaaaatagtagtgatgctcctcctctattattttgtttttcgtcattcctcggttatgaaagttgtgtggttttaagatggaattgagtttattctgaggtttttagttattttgaaatcattgattaatgtcaccaaaaaaaatagaaactagattttgagatactaaaattttcattttcattttgttctgcaaccattgaaaactagattcagctgagcccctgaagaaatcaaagtgagttgaatatttttctataaatgtgaaaattggtaaaagtttgtcctcattttgttagtttaatgttttcttgactttaggagatgaactttcaactgcaaagatcccatcacacattaatctcactctcttccgcacattgcatggtgtggtgtagctatggttcccacacaattgtcatattcatttaccacaaagttcatgaatcatgttagaagtgaatcctttttctttcaaatttagtcatctctcgaggaactttaaaggtaaaagaataagatgaagcttccttggaaatctcagcattgcactacctttgcttgcaaatctagaatctggattttaagatacttactccaacacatattattattacaggccggtgctcttgttcatgtttgcaccaatgggactgttttggtgacacatggaggtgttgaaatgggtcaaggatttgcatacaaaggttgtgtcattccccttagttcagtttttgtgtcagaaacaagcacatacaaggtacatctaactcggttacatgcactcagtggactttttggccaagacaaaactgatattgttctctcttatcatttttgtggtctcttaataggttccaaatgcctcacacactgttattgctcccttgtcgttttgattgcctcttaataggttcctaacgcgtcacctactgctgcttctgcgagctctgatatgtatggtgctgcagttttagacgctgttgagcagattatagctaaattggagcctgttgcatctaaacacaatttcaactccattcgctgagggtagctttagaagagctcaagtggggagatgcagctcatacatggatttaaccaggagctttactcacttgcagacctggaaactacaaaataccttaagaagaaactttactcacaacattcagtttctcttctcaaggtatgcaaccataagaagaagctctttgaattggtggcaacaaatttgaaactgatgaacctaagattatactgatgaagctcattttgctagtttaaagttttcaacttttcaccaaaggtaattaagcatttaactacataaatcaaacccagtagtatactaaaagacattagacaaatgagagagacagcttcgattttcagacagctttaggttggatttgttcgaagtcgaaaacctcaaacatgagccgccgaacatcgggtttcccgtagatggtgtaggcgaggccgtgaatggcttgttggacagcggttgtcgccggattcctaagtctccggttatgttcataccgatcatgaacctcctctgagtatattataaagttgtgaagacgtttttctctaagataccggccgcagaatttgttcattaatagacgtctatgcttctcttgcaaccacttccctggtgcgtccaagtgcttcattaacaaacgttcagccattgctatgtcctgcatgatcccgagacgaaaaatcgggttaaaaaaaaagaaagaaagaaaagaaccgttcttttgatcttttaagatgagagatcgttatcctcacctgtatcttctgtcctacatattccagccgctcaaaacaaaaccgcgggtgttcaaacttatgctttgaaggatgcaagaagcagagctgtgtgatttaaggtaagtgaaaaaagtttagagaaggaaagtaacatatcacatgacaaagccagaagtaatagcttttgtacctgtaaaccgagtccaagttcgatgtttcttgcttcagttatctccttgattctatcattcatcgttaaagggtatccgagggtctgcataacttttggtttgctgtcaaaatcccatatgttccctctgaaacgatgcattcccggtggaacacaagctctgaatagcctagggtgtgcgaataaagcatcttcaggaggctgaagcaacaggagaaaaaataaagaaatcactcttgttagatagaccaaagaagtagactgtgattttgttatatcatgcagttttatttaccttgtaagtagcaatatcttgccaacctagctttttcccttcaaattcaacagaaacataatctacatcctcgagctgtctcctgcttcgaggctgacactcatcagcatctggatccatcccaaacacctcaaaaagtacacgatacacttccggcatcccaaaacatagatagatggcaccaaacaaagcccagaacacagatctagccagaacaaaagaaattaacatggataagtacatgtcacttatgagacattgggatgcacagactcgtcaagttttcagtcatttaattcaaccaaatggaaagcccaacctagataattagcaccagctatcacaaagcccctttcaatcaaataactaaacaaatgatgacacactacaaacatataagacagatcttatctaagatgagaaacctttgaacagctaaaagctttcatagtgagacttgggcttatctaaacacagaatatagttcttgacaggatctactagttccatatacagcaaaaccagatattaacacatatcattgtttatttccatgaagctaaagtctcagctcaaagcaaccaaagtatggactaacactcaagtgaaataatcatcatcattaaagaagagagaaacttaatccaaatgatgacagactacaagcagataagactgatcataatccaagatgagaaatctttgatcagctaaaagttcttggcgtcataacaactcatggtgggatttgggcttatctaaacacaatgttagatacatagcaagttcttgagagaatggaacaacatctagtagttccattaaagctaaaaaaactcagttcaaagcaaacaaactatggactaatactcaactgaaataatcatcattgtcaaagaagagaaacttacttaaccggtggctcacgctctttcctaatcaacttatccatatcatcataaggaaagatgagattttgcaagctcgctgctttaatccatttcgggagatacctcttcccaatcaaagcaaacactctctccctcataggtcccggagattccctcggatacctctgcaagaaaaactccgtaagagcaagctcaagcacatactgacccagaaaccaaagcctcgagtgcccattcttcacatgcctcgcacgtgctctatcacaagacggatgctggaaagcaagatagagcaacgtatcaaagtgtttcgccggattatcatctcctaaactctctgaaggttccagagaataccctaaagcttgtttaacttcaagaagatactcatcgatccatgttttatcagcgttgttaagctttgacgatggaagacaagagctaagtaaaggaaacgacttcagagacaattgtggactattgaggaatctctcagctaatttcttatcgtctaatggtggccttaagatgaatcgtttaggaggaacctttttcttcggtcctgtcgctgttttacgctgtgctagctctttgaggagacgttgagggctgtctcgtggaagaccttgagtctccgccgtcacggaagcgcaaattcggagattttggaatctggattttgtgagaatcgattgggttttagatgggaactgagaaattgaagatgaaaatgagatttctggtgctgaagatgaacaaatgcgaaggagagaagaagatggagatgaagaacaaagctccattgcttctttagactgttactatcaaacaaaaattaagaatcaaatcatccaattcgactcgagaacacgcaaaagacacgatttttgcagcagtagaagaaaatggtaacgaagaagattgcagagttccatggataaggtcatggcggggagatttttctaatggatcatggtttcagtgtaaatcattcaggcccgtaaaagcctattataaagcccaataatatagcaagacccgtaagacattgtagtatgaaatgatcatcattaatatagcttagacttagattatttcacattcaaaattcaaagatgctcaaatctatatgtggatctctgttacgttggatacttttctatagcatgcattcaaaatctatattattttgcttgtataaattgtattgtattgcagcatgaattatcatatgtaatacgtaatcatgacaatagactatagatataatcatataatctatgatactttatatataaatatgtcacactttgcaggaaaaagattccttttgtgttggtcttttttctttaaatcacgtggcacatgttaatccgatttgcattatttagaaaaattatagaaaacgtacaagtcatcctatattggtctttcttacaactatttgttttatttaagtacaaacattatattgtttactgtttcatggtcaagagtctctacgcgtgttatctaagtaatctaatgaattggtaaaattaaatctaaattagattatagtattttgtaaacgatttgaaagaatgagaatccaattatagaattcaaaacactattatattatatattaaacatattggaaagggttgacaaaagaaaaacataccggaaatgagatcctctctttctaagtaattattggcgttataactttcatcataaatcataagcacggcttataggtatacatgtcactgaaacttgtatcaaaacatgtaactaacaaatatcattagttattgtatatatataaacaaaaatgctatgacaggaagcaatctaaagactatactcattaacgaattaggttctacaattacactcgatcacataaatttctgttttatatttattacaaacccatgtatgtgtagagtctatagtttaatagtgtttaattaaaatttatcacaaacccatgtatgtgtagagtttaatagagaaggaaaattttagtgaatcgctaaggtaatgacaagatacaatgatacatgcattctaagtaactccatgcgaaacgatcctaatattgacttacaaacatatagcattttggctgtagtatatttaataatgttgtaggacacaacatgtagattaattgattaaagacaacgtgcatgtctcttttttttctctatgatgcgggccttttagcagaggaatgctacagacatgtaaagttttgataaaattgaataattagctaattatggcctgacttgtttaacctctatatccagaatgaacattatattgaaaactgatctttccacaactatatatgtaatatagttttttttgttttgttgcattctgatctcgtcattctgatgtaatatagatccttgccatcataaaaaaaaatggtaatcgatttttagttaagtatgaagttgtcctcttagtttaaaattacagtcagcgcaaatgaattatcttcccagaaatcaattaattttcttgcattttaaaaagccagacataaagttttgactgattaagacatacatgtatatatatggttaaatgatttatcatttttctcgatcgattggataaaggacatggttttcttagaaaagaatataagataaatgacaaataacagaaagaagcgtgattgcctttacttgcatgcagatgcagtagtctcccattttgaatgactgctctaaactcttaaagtataactattctcgtcaactaaagtttttgtttcttttttaaacgtcaactaaagtctatatcaataacaataatttatcgcctaaccagtaaccatagataaagaaaactttaaatctagaaaccattagcttctgaaacaaagtaaaacagcccttaataaagccatgaccatgtcaactgtttcggaccatgtgtagtgtacgtagtaaacatttaaattgataatgaaatagcaagacgcaaatggacgtttgtaaaaattgtatggttggtaaaaaagacatgaggctatatatgaatttctgtcattaaatcagctttaggtattacttgttaggattaaggttatcgtagttgattagactaattaactaatatatgaaccaaaaaagtataatagtcaggagtagtagttgagatttcaaaaagattcaaggtggccataacacaaatattattcgcaatgacaagtgaagcatcgttttcacttttcaacttatccctctcaatccccaccaccaccactctctattccctcatatagatagatcatcctagtgatcatatacacacacaaacattgatagagaacaaaacgaaattggaaaaattcattttaaattttaaaaatacaaaaataatggaattggaaaaagtcttttttttgtaaatactaatcaaatattttaaaattaacaaaaaattcaatagtaaaaaaaagccatcaaaaaatgatgtcaacaattagataagtatttagtctttttctcttttaaaaaatgatatgcaagctggccggcgctacttgtgcgcacacataaaagcatatatataagatccctcactcgattcatgtaattatacacatatagagagattgagtgaaaatatttttttttaaatggttgtggtgaacaaaacgaatctcttattgcttcttctctctctatgtctcaccctcgacctctcctccgcacaactccgccgtaacttctacgccggaagttgtcctaacgtcgaacaaatcgttagaaacgccgtacagaaaaaagtccaacaaactttcaccaccattcccgccactctacgcctctatttccatgattgtttcgtcaatgtaaaacatattttttattgatattattttcttgcgtaaaattatccattatttggtctaaataattgattaatattcataggggtgtgatgcatcagtgatgatagcgtcaacaaataataataaggcggagaaggatcatgaggaaaatttatcgttggccggagatggattcgacaccgtcattaaagctaaagaagctctcgatgccgtcccaaattgtcgtaacaaagtttcatgcgctgatattctcacgatggccactcgtgacgtcgttaatcttgttagtaactcaagcttatttattctattaaattaaaacattagtataagttattacattaaattcaatataggcgggtggaccacaatacgacgtggaattgggaaggctagatggactatcatcaacagcggctagcgtcggagggaagttgccgcatccgaccgacgatgtcaataaactcacttcactcttcgccaaaaacggccttagccttaacgacatgatcgctctctccggtaagatttgaactacttctcgatcataaatagtatcattcgaaccaaactaatagctatgtgatttaatattccggtttagctaactggatatcggacccgaatttgattagtatttaagttggtttatatatacccgaatttgattagtatttaagttggtttatatttccggtcctaatttagatttcgtttgatcttaaacatctcaggggcacacacattaggattcgcgcattgcacaaaagtgttcaatcggatatacactttcaacaagacaactaaagtggatcccacggttaacaaagattacgtgacagagctaaaagcgtcgtgtcctcgaaacatagatccaagagtggctattaacatggacccaacaacaccaagacaattcgacaacgtttactacaaaaacttgcaacaagggaaaggattgttcacgtcggatcaagtcttattcacggatcgtcggtcaaagccaaccgttgacttatgggctaataatggacagttgtttaatcaagcttttattaactcgatgatcaagcttggtcgtgttggtgttaaaactggtagtaatggtaatatccgtcgtgattgtggagcttttaattgatttaaatatatctgtattagattttgtttattgtatttgggtataggatgggtcatgggtctcataaagctggttcagctaaattgaaaattgtaataaatctctgtcttgggtttcagtttgcaaaacctaaactgtaattatagagtggaggaaataagaagtatcgtataatatttatcaagggataaatacaggccatccattatgggccgcgtaagagccaatgccaaattttaagaattttcttaaacaaattattatgaaaaaggaccaagaatgctggatgctcctacatacatataaagttttgataaaattaaaataattaacgtctatatccagaataaagtcaatgagcattatatatccaaaactgatctttccacaactatacaatatggatgtgttttttttttcttttggttgcattctgatatgttccttcctcttgtctgcagcgattacttgttattttgggttattcgtggaaatacaattcaaccatttgttttgaacgtgtaagataagtaatatatggttaaattatttaccatttttctcaatcgattagacaaaggacctggtgttattagaatataatataaatgacaaacaacagaaagaagcgtgattgcccttacttagatttttttggacaaacccatacttagattagatgcaagagtagccctttttgaatgactgtaatcttgtcaactaaagtttttgtttctttttaaaacgtcaactaaagtccatatcaatagctaatcgcctaatcatagataaaaactttaaaatctatattaaaccattagcttctgaaataaagtaaaacagccctaaataaaaccatgaccatgtcaactaattcggacgaccatgtgtccatgtgtagcttttcttttctagaactacgagatccaaaattaagcagtgtttcataacgaaataactaccgaatgtaatgaatttgatggatagatgatcatgttattttcttaagataaaggtgtccagaagaaattaataaatatcttaattgttcaaaaagtgttacatttttgccatcaaaatagaaaaatgatgatgaaatagcgctagacgcaaatcggaattttgtaaaaaaatggtatggtaagtaacaagaatatgagagagagagactatatgaagtccttctatcatctttagttgttacttgttaagattgaggttaccgtagttgattagactaattaatattagttgatccaaaaaagtatgatattcaggagtagtgtagagatttcggaaagattcaaggtgaccattacacaatacttaaatactattcgcaatgacaagtgaagcatcgttatcaacttctccctctcaatccccaccaccactctctattacctcatatagatagatcatcctagtgatcatacacacaacattgatagcgaacaccaatagtatgctatattcacaacaaaacaaaaatggactaattcatttgtttttttgaagtaaaggaattgaacaataattattttattttttttgggaaatactattcaagtatttgaaattagaaaagtatttagtctttttctctttaaaatatgaatgcaagctggccgctggccggcacacacagcacaaagcatgtatataagatctctcactccatttatgtaattatacatataaagagaaattgttttttttttttaaatggttgtgatgaacaaaacgaatctcttgttgcttattctctctctttttctcgccatcaacctctcctccgctcaactccgcggcgacttctacgccggaacttgtccgaacgtcgagcaaatcgtcagaaacgccgtacagaaaaaaatccaacaaactttcaccaccattcccgccactctacgcctctatttccatgattgtttcgtcaatgtaaaacaatcttttctttgataaaaaatgatttctagcgaactatattttataattttcggtaatttattttattattatcatagggatgtgatgcatcagtgatgatagcgtcgacaaatactaataaggcggagaaggatcatgaggataatttatcgttggccggagatggattcgacaccgtcattaaagctaaagaagctgttgacgccgtcccaaattgtcgtaacaaagtttcttgcgctgatattctcacgatggccactcgtgacgtcgttaatcttgttagtaactccctccatatttatatattataatgttttattttaatataaaaacattagtgtaagttattacattaaattcaaaataggcgggtggaccacaatacgccgtagaattgggaaggcgagatggactttcgtcgtcggcttctagcgtcacagggaagctacccaaaccgacctttgatctcaaccaactcaatgcacttttcgcagaaaacggtcttagccctaatgacatgatcgctctctccggtaagatgatttgaactagttcttgatcaagaatagtatcattcggaccaaacaaattagctgtatgccatgttgttagcggtttatatttccggtccaaatttagatttcgtttgctcttaaacatctcaggggcacacacattaggattcgcgcattgcacaaaagttttcaatcggctatacaatttcaacaagacaaataacgtggatcccacgattaacaaagattacgtgacagagctaaaagcgtcgtgtcctcaaaacatagatccaagagtggctattaacatggatcccaatacaccaagacaattcgacaacgtttactacaaaaacttgcaacaagggaaaggattgttcacgtctgatcaagtcttattcaccgatagtcggtcaaagccaaccgttgacttatgggctaataatggacagttgtttaatcaagcttttattagctcgatgatcaagcttggtcgtgttggtgttaaaactggtagtaatggtaatattcgtcgtgattgcggagctttcaattaatttaaatatatctgtttaagatattgtttatttgcactcatttgtattgggatttgggaatgggatgggtctcatgaagctggttcagctaaaatgtaataattctggttttgggttttagtttgctatatatcgcaaaactaaattgtagatatggagtggcaaaaaggaaataatatacatgattagtcccaatgggcaatgacaatactttgtatagtaagttggatcatgagtcatgactttatatttgtgtaaaatgtcaatcatctattatttcataagaatgtaagtagacataattaatctttgtgctgagaaatataacaaaattacattttacttacaaaattatcaaacgtattgtcaaaaagaactaacacaaaatatagtttctaattcatataatatcaacttccgagtttcaacgtttttgtatctttcttgggatataacatataaggcccaaaccgaggcccataccataataaagtaaggaaagcaatggctttcttttgggcatgttgtattttccttataacaatcttttgtagctgctaggccctttggcaacaggccctttttggaaacaatattagttttcgcttttgaaaaatgagaatttgttatgtgtaaccgtagtttatccagagattatagtggcatactgatgcctatttggctgcgtgaatccaaaactaggctataatgattcacagagacagagccacagtggcataagcattttaaacttaaatccaaaatacatcaataaatcgtcaatcaagttatggtgttaccattttactagtagtggcttaacttaaaaaattttaaggggcacacaagccctagagattaattgatccaaccaagttcgacttcaccgactacttttgacaacaattagaacagctaaaagacactcttttcgaatttggaaaatctaatatttttgcttaaaactattttaatgaattatcatcactaatgattagtgactacttcttttagttgctaaactatattaatacgttagaattatcataaagtttgaaaaagtaaaaaatatagcaaaaaatgagcaaaacataaacaaaatattatcaacaaaaataattatatattcaaatttttaacaatgaacaaaaaaacattatgattattgattatcaattacattaaaaattacacgaacacacacggtgggagggattcactgttcaaaaaattttcactgcatctacaagaaatcaacggtcaataactcgacaattaacctgatgtttgcgacaccgaaaaagttcgtctttatggatattttcaggacttcgacaacgcatactatcgtaatttggaagagtgaaaaggagttttggactccgatcaagttctatacaccgccccgcgctcaccaccattagttgaagaactggccagtaatggttaggttttcgaaagagttttcgcacgctcaatgattaagttggacagaatcggcgtgaaaacgggccgcaacagcaatatctgccatctttgtgacgcctttaattagttgtaacttgtgctgggcgttgaaagcccattctataatactataatgttattaagacatgcagtaatgaaaatcttcatttaaaaaaaaagaacctaaactcttcacttctcgtggcccatgggttcgttttcgttgaaagattttgaatcacgtatgacgtgaatggagtggtcgagaggtcccggtttttttttttattagatcgtgtaagttttttttttttgtttatgttgcaattttgagggtagtgttttattgcttagtctaatatcacaaacgaagtcgttttaatagtttagaaagtatataaacaaatcgatatcatctgaaacagtcccaatagaaaattaactttctttgtagaataatcaagatgtttacgaacttactaattgcaaacattcgcgattaacttacatcgttaggatttgcatcaaatgaagtaaagttaccccaagattaatatcattatcattattatttaaaatacttaaatttccacgatgcaaatatatcgataacgttattaaaaaaagtaaccgcatgatatattctctttcgtatgatactaaggctccgaaaatggtgattgcgttttgcgttacgggagaagtgcggtgcggttcaaataataacgaaaatacatagatacatatgtatatgtacaaattttaatactgttacatcactattgcggtacggttttaaatgcggttttggttagcattcacagcctaattactaaaggcttgagaaaaagatggtcatcttttaaaatccattaattggccacattttaatatttcaatatattattttaataaaataaataaatttattatatattgagaaatactttagaataacactgtatctttggagacatccgataaactttagaataacattaaaataagttatatggataattacagcatataatcaactaacttttaaaattagcattaataaatttacaaaataaatattttcttatcctatttaattaaaaaaataaaaataaaaaattaattaaatattaaatctcaattataatacgactcatgaaatattaattcatttgtgttattttaaaaaactttatagcttatgtgataaaagataacaaaaattatttttgtgtcatttgcgcaaattgccaaaaaaaataggtttgactgatgcagagaaatggctatttgcattatccaaaagccgtcttatccatgaagaccaaaatttcggtgtattattcatgtaaaaattactgtattgatataaaatattggcaaatatcgtactaatgtcacctggaaatttggaatccctcggaagctaatttatcgatttgcttcttcacaaatcaagtgtcaactctttataggattttattcgtatttaggatctttatatttcatgtgatctgctcagtgggaaaaaataaaaacaagtacaaaacacacggttggaactgtagagcggggatgttacaggagctataggcattttccttcattctcaatttctagatttttcttactgcattaggatggtggtagtagctaacttatggaaattatgtgatattttcagttattgtcgcgttactatcgttttactctattagtatgaatcagataaggcctaattagttttctacacacagagtccattagtggctgaatgttgatccaattttcacgaatatcatatatgatcagttcttaatattgtagaagatacactatgtgtgatatgtcctctttaaatgagtttccctgataatttataatatttgaatagttaagcttggaaaaaaaaacatacacaccatatgttagcaatgaaacaattctcaacagattatttattctcatcggcaaaatatatatccccaaaattttatcatatttctcgatagagaaaaatcattaactaaatatccattcccactcaaaaccctaaaaaagagagcctcaaaatctttgagtgttttgcgtcgtcggttttaaacaaaaaggttcaataactttttctctcctttgtttcttttttgtttattatctcctctcatcccattttcccaacacgacgtcgttacagattcctccgatggacttcccggacgatcacccttaaccaccttacaaaacgacgacggaggaagaaaaggaaccggtacagccggagcggttagggttaaaccgtggttcacttggagatcaagatccgaatcggacttcaatcgttttcggttaaccagagagtctttcatctccgtcgtggatctggaggtggagaagcgacaatggtgggtttggtttcttgaaacgtcttgatgccaaatctctgaagactcatcacaggagatcatcaacgacggagattcaagaagatctgatatcggtcgtaaagttccgccgcgaagaacagtctcaaccgccgcttggcatacgtgccagttcctggtccacaacataccaaccgctccgttaaccggattcaccgttctcccacacgcttcaaacaacaacgactgaaacaaagctgaacaaaccaaaacataaaaatcaatttaaaatcaaaaacattaaaagttgtatagatccgtagagtttgtaacctaatggttatgttatatattcgaatagaaatagatagtatagtgataaaaagaagttgtaccaggacgttggagttcaggtacggaggagatgaaagacatgagaccagcacgaccaaagaatttagcgacgaagacggtggcgtggccttgtgactcggcggattcgatccattgaaggcaaggacgaaggatgcatgtttcactgcaaccttttcgaagaactctacatccattgcaactcatttcttttccgaaatttgaaaaagaaatatatccaatattttgggaaactctacttgttaaaacaaaaactgaaaagtgtcgatttaattcgggtttgagagcatgcaaataggttttgattgaagaagggaaagagaaaacaagtttcaagaagatgagagaagatagtatgagatttatagaggggagtgaataataaagagagtgtgccaacttgtgtttcttttttattcctttgtcctttcttttccattatttctaattaaaaaaccatgtgtattaattatttgaaatttattatggggaagacagaaactcaaaggagattgagataacattttgaaaagttaaaatacttatgtgaataaagaatgggtcatattgacacaaataaactagtttttcgatcattaattcaaacttgagttgatttataagttgctggtttcaattttattggtgtgtagaaaatgtaaaaagagagaaagtgaggacgaaaggacaggacagagttagggagggattccaaaggtattggcgttgggggaagagagagaaagagagcgtttccgtttctccgcgaacacttgtcgctgactcagactcctcttatattagtattactttcttcttttaagttaaagtattaaagatgtgtactcttctcttttttataagagtacgtactatataatgaaaacaaagctgaatttgggatttgataagttatagacaaatcttacgtcaggagacgatggggtgcacgtggattagaggaaattattggttcagagttgtttgtatttttatgggatgtttaggattttagtatagaaaaatgaaaactaggttattggtagttattgtgtgttacttgatgatgctaatcttcgggtggtgaatgaatcacatttttttagggtttaatcatttggagggaattattgatacaaaaagatactgaaatcaataagcaaatcataagaggacaatgtgttaaaagaaagtaaaaaaaagagaggaccaaatgttgtgcgtatcttgctacgtattcttcttctagtattctctagctagtagctagacacacaataagaccaccctaatacaaatttgaaatcactgttttatgtctcaactttaaacgtttgttattaaatgttaacgatgttcgtaaagaggggcatacatgagcaatatccacgattgcctaactgtgtaaaacttgcgtcaatgtacttcacattcctccaatcactttggaaatgtaaaatgattatcaataaataactagagaggaacgtggtgttcatgagtcatgtcctcgtcgtcttccacaaacgcatgtgtctccataggtataaatcagaattgatatagtacaaaaaagactcttaacttattatatattgagtgtttgactctacgtacctacgacacaacataagtatttgcaatctcttggaactacaaaagccgttattgacttattggcccttcgccatattcaaaggttcttctctatgcgtgcgcctttccctttctcgtacgtatatataggagtatagtttttaaaacattttttttctgtcgtcgtctattttttaaaacatttatttatctgcggcgtagagaaaatgtaaaagggaaagtgatttgcaaatttctcagtggcgaatttacaaaacttctgacctaataagagaaatttctagctcacatcatcttccacactttgtcggaataggtctcaaactactaaaagtattacaattattcatttataaatacgatatttctacctgcaaagcaaatgataatttaatggactagtgagtattgacactggttcagtatttggttgatattttggtttaatgtagaaaatacgaaagaagaagaagaaaacagaatagtgatgtaatggactgatcatttaacttagataacgatttcataaaataatagcaattccaaaatttgagaaaattatcaatcaactactacatgtatttcttttttctaatggtcaggattcaggaagaaaatctggaagtgtatcttcgctttctgctttacgattgattaaatatataacatttcgaagagttttctactaactgttggcaacagtctgttgctgtcggttccgacgttgcaaacttatccaaaacagcatttagttctgtgtaccgtacagttgaactcgctggattgtaacatgcaaagttacaatcatttttttttttaattcgcctgatatatgacctgattagattttagtttttcatagaaatttaaacactaatctcatcattttcaaactaattaataacactagcttacgagactccggaatccaaacttttctttctttcatattttcttactcccacaacaatatcaccaccatttctcctcgtactgttttgtattttatctcatttaactttatcatctttaaccctttatcaaccatgccaaattgcaaaatatttttttgttttgtttttgttgttatcccatttcagttgtcaattagaagcaatgatacaacacctttcattcaataaataaacaaaatttgatggtagccaccaaaataaaacttgatgacgccaagcgtgtaagccacaaccacgaaaaaaacccaacaaataaacataaatgaaattaagtcaaatgaagattcgattagattttttggacaaaatctgtcggatgcttattcatagcatctcctctgttacagcaagaatgaggaagtacggatcaaagagtgtttgaatggttgacctgaagaaggagaagcaattgagcttaagactctctgattcttttcataacataagtcaagaaaatgtcattttcaactttttggtcatgcatgcattgccacacacagagggagacacatgtcttttgatactatccacttggttcagaaaaaaacaaaaagtcacactttttgaaaaagtgaaaacgtctcaagatatggtgaaatctgcaatctttttttactgtctttttgttatgatagataaggaatctgcaagaaccaatgatcactcttttcactgtatcaaggacaaaagaaagagagaaaacaaaagagttatacagagagaaaacgtgaatagagagatcactgtacttattgggttttgatctttgatggctccactgagtccaagagtagtggtgaaggtggatttgaagaagaagccatggcagcaggaccagccattgcacaatagatggcatccggagataccaccagtagcagaggtcaaggctggtgagtttttccgggtagaaatgattgatgcaatgggaggtgttatcaaagacaatgactctgcaagcgatatcaagaacctagtcctaactactgtaagtgggttttgtgagaaacatgtgaaaaatcaataatgaaacaatgagtttacttttaaagaaaaacaacttttggtgatatattgtacagactcatcacctaagtgggccgattagggttgtagatgaggaaggtgttgcagctaaagcaggtgatcttcttgctgttgagatatgcaacttgggtcctcttccaggagatgaatggggattcactggttcgtttgatagagagaatggtggcggtttcttgactgaccatttcccttgtgcgaccaaagctatttggtactttgaagggatctatgcctactctcctcagattcctggtaagaagaaaacaattcaatgtcttctatcaagaaacttagtagcataaccatgtagctttccttgttatgattcgttctgttgaatattcaaatgctaatattaccccatcatggcaggagtacgatttccgggtttgacacacccaggagtcattggcactgcaccatcgaatgaactcttgagaatatggaatgatagggaaagacaattagaagaaagtggtgttgagtccctaacactatgtgaggtagtgcatcagcggccattagcatgcctaccaacaactaaaggatgtctcctcgggaatgtacgctattttctgatgctataacaaagtttttgaactgtataaatagtgcttacctctgaattcccagggattcttacataatcctcttgtagattgaagaaggaacaccagaatgggaaaggattgcaaacgaggctgcgaggacaataccaggaagagaaaacggaggaaactgtgacattaaaaacctaagcagaggctctaaaatatatcttccagtatttgttgaaggggctaatctaagcacaggagacatgcatttctcacaaggtgatggtgagatctcgttctgcggagccatcgagatgagtggatttctagaactcaagtatataacaaataagttctctcgactatgcattctcagatgttcttgtatttgtgcagcgtattataaacaattctgaccagataccatgttgtaactccttaataggtgtgaaatcataagaaatgggatgcaagagtaccttacgccaatgggacctacccctctccatgtaaacccaatctttgagataggaccagtggaaccgaggttctcagagtggcttgtcttcgaaggtatcagtgtcgatgagagcggaaaacagcattacctagatgcaacagttgcttacaaacgggcagttctcaacgccatagactatcttttcaaatttggttactcaaaagaacaggtacttgtctttgcagcttgatgtttcttccagaatctagttgatcacacaccaaacatccataaattaaaactacaaagacagaagtgatcaagagaatatggtgtgaacaggtgtacctcttactctcatgttgtccatgtgaaggaagactatctgggatagttgattctccgaatgccgttgctacactagcaatacctacagccatctttgatcaggtatcaattttgcccctctgttctttgcataagtcaaaaagcttctgtataaacctcttgagtttactctgttcttcaccctcgtctctcaataatttgttagcaactgaaaagataggaatgcaaatatgttaattgcgtttgtatgttaatgcaggatattaggccaaagaatcggaaggttccagtaggacctcgggttgtgaggaaaccagatgtactgaagagcacatatgatggaaagcttccaattacaaagaatccaagttcttcctcttagcttctacaaaaaaattaaaattaaaatttagaagctaataccaagattgtataatcaagcatatgttccaataataaagcaataacttggtgttttctttagttggcgtcttggagattccacataaagcaactcacgaaacgagaaagcacacaaagggttaaatttgcaccattcaccgagtaaatccaagatcttcgacataatatagacaagcaactctctagatagtataatcagaaatgtttaaagagagaaatggtttttttttgttggttgcaaattccaaaatcaagaaactatagaaattggaaggtaaatgatatgcgtccttaatctatatgcactatctacagattctgtctcaaaaatagcttactttgaattgcaaaactgcgcaattactaagtcgaatgtaatattcctctctccggacattagaaagaccttattcagaacataagttaagaaaatgtcattttcaacttcttgtcatctatgcattaccacacacagacacaaagagacatacgtgtcttatggcattataagatgaatgacagtcatttgtctagatatagaaaagtctacaatatggtgaaagagggatcttttactgtcctttagttgtagataaggaatctgcaagagcaatgattccttaatacaagaggggaaaacaaaaaacaaaaatatattaacatagaacgtgtgagtagagagagaatataaattaccgtacttattgggttcggtttgatggctccagcaagtccacgagtggtggtgaaggtggatttgaagaagaggccatggcagcagactcagccactgcacaatagatggcatcctgagataccatcagttgcagaggtcaagactggtgagttgtttagggtggaaatggttgactggacgggaggtgcagtcaaagaagatggctctgctggcgatattaagagcatagacctctctactgtaaggagttttagtaagaaatatgagtaaactaatcatgatgaattgcatataggtaaaagtttcttggtgattatgcaggttcattacctgagtgggccgatcaaagttgtggatgaggatggtgttgcagctaggccaggtgatcttcttgctgttgagatatgcaacttgggtcctcttccaggagatgaatggggattcactgcttcatttgatagagagaatggcggtggtttcttgactgaccatttcccttgtgcgaccaaagctatttggtactttgaagggatttatgcctactctcctcaaattcctggttagagcacaacatcatcctgttttttgtcaagcagattagtagcacaatcatgttgtgatgagatgttctgttgattattcacattctaacaacatcacatcacggcacggcaggagtacgatttccagggttgacacatccaggaatcattggcactgcaccatcaaaagaactcttgagaatatggaatgaaagggaaagacaattagaagaaaaaggtgttgagtccctaacactatgtgaggttgtgcatcagcggccattagcaagcctaccaacaactaaaggatgtctactaggaaatgtacactattttctgatactgtaacaaagtttttgaactgtataaatgtacttactgcataccctcttatagattgaagagaggacatcagaatgggaaagaattgcaaaggaggctgctaggacaataccaggaagggaaaatggaggaaactgtgacataaaaaacctaagcagtggctctaaaatatatcttccagtgtttgtagaaggagctaatctaagcaccggtgacatgcatttctcacagggtgatggcgagatctcattctgtggagccatagagatgagtggatttctagaactcaagtatgtacataagttcctaattgcactgtaaatagactctatacggttttcttagatgtccctgtttttgtctagtgttactatgaaattctgaccagataccattatgtaactcattaataggtgtgaaatcattagaaacgggatgcaggagtaccttacaccaatgggaccaaccactctccacgtaaacccgatctttgagatagggccagtggaaccaagattctcagagtggcttgtcttcgagggtatcagtgtcgatgagagcggaagacaacattacctagatgcaacagttgcatacaaacgagcagttctcaacgctatagactatctcttcaaattcggttactcaaaagaacaggtactgatctccgcaacaagatgtgtctcacagaacctagttgatcacaagcattaaaacaagagataaaactgatcaagaaactatgttgagaacaggtatatctcttactctcatgctgtccatgcgaaggaagaatatccggtatagtcgattctccaaatgccgttgctacacttgcaatacccactgccatctttgatcaggtttgaagttacagtcctctgttctttacgactacacctgagcttgctctcttctttacatcaattcctcaacaatggaaaatgccaaacatcaaatgattttcttatgtgcacacgcaggatattcgtccaaagacccgaaaagttccaacaggagctcggatagtgaagaagccagacgttatgaagagcacatatgatggaaaacttccaattacaaagaattcaagttcttcctcttagcttctacaaaaacaaaagaagatttagaagctaactaccaagactgtgtaatctagcatatgttccaataagaaagcaataactcggtgtcttgttagttgcagattccatataaaacaactcgagaaacgagaaggcaagcaaaaggcacatactttttctctcaactttaatgtgttcatatgtatgccaaaactccaactaaagagagaatgcacatactttttctctcaagttagcaataagtacttagccattctacagtgggacttaagattactgaaattttcaacacttagaaatcttgagtttttagtatactaccaattacagcaaaaaataactaaatttgttccatagctgacagaagtatactagtgatcataatcacaatcattatcaacattaagcacaagtacattctaatgattaacgcaaaaaacaataatctgaagcaatagaaggaagagaagctactgtacatttggaattgaatagccgataagggaatccgccgcagaagaatttgcagttcgtcggagagagcctttgattgaagaaatcagacgagatctcgaaccggaacaaaaagtttatattggtattgaaattaaaatcgattttgggtttggtttagactggtttagagagggaagaaaaaaatattcacgcgatggtgattttggagacaagtgcgttgataaaaaaaggcatgatttcagcaggtaaacccctacagaattgctctcacgctctctacgcgcactttgtgcgagtggttctaaaatagagccttctgattggcttaaaaactctaaaaaaatagcaatagtagacatgttgctagctcctgttattatttagcttttctacaaaacgcagtcgtttctatttcgatcgtttcagctcttgacattgatccgaaccaatcggttcaactggcttagtctatccacaggttcgtatagaaaatctcatttggtcatcaaattaagcagtaaatttatattaattaatcataagttaatgttttttctatttcaaatttctaacgaatcagacctaattatccggaataaatgattggttctgaaaatatcaattgggaaattaaaacccggttcaatttgaaaccggaaactagattccttcttctaacctatatctccactaaataagcacttctagagttttagataaacaaatttaccatttttctcggcaaaagatggaacttgttcttaattcaacctctatctcactgcctgaatcaatggctcttgagctctacttcaaaacaccgagctgctgaagcgtggcaagaccaacgtagtcgacgaacatggtgatcgaatcaattatcgtagaatcgattggtatagttgaattc

SEQ ID NO: 680 - DNA, 91740 bp, Arabidopsis thaliana
gaattcaaaacactattatattatatattaaacatattggaaagggttgacaaaagaaaaacataccggaaatgagatcctctctttctaagtaattattggcgttataactttcatcataaatcataagcacggcttataggtatacatgtcactgaaacttgtatcaaaacatgtaactaacaaatatcattagttattgtatatatataaacaaaaatgctatgacaggaagcaatctaaagactatactcattaacgaattaggttctacaattacactcgatcacataaatttctgttttatatttattacaaacccatgtatgtgtagagtctatagtttaatagtgtttaattaaaatttatcacaaacccatgtatgtgtagagtttaatagagaaggaaaattttagtgaatcgctaaggtaatgacaagatacaatgatacatgcattctaagtaactccatgcgaaacgatcctaatattgacttacaaacatatagcattttggctgtagtatatttaataatgttgtaggacacaacatgtagattaattgattaaagacaacgtgcatgtctcttttttttctctatgatgcgggccttttagcagaggaatgctacagacatgtaaagttttgataaaattgaataattagctaattatggcctgacttgtttaacctctatatccagaatgaacattatattgaaaactgatctttccacaactatatatgtaatatagttttttttgttttgttgcattctgatctcgtcattctgatgtaatatagatccttgccatcataaaaaaaaatggtaatcgatttttagttaagtatgaagttgtcctcttagtttaaaattacagtcagcgcaaatgaattatcttcccagaaatcaattaattttcttgcattttaaaaagccagacataaagttttgactgattaagacatacatgtatatatatggttaaatgatttatcatttttctcgatcgattggataaaggacatggttttcttagaaaagaatataagataaatgacaaataacagaaagaagcgtgattgcctttacttgcatgcagatgcagtagtctcccattttgaatgactgctctaaactcttaaagtataactattctcgtcaactaaagtttttgtttcttttttaaacgtcaactaaagtctatatcaataacaataatttatcgcctaaccagtaaccatagataaagaaaactttaaatctagaaaccattagcttctgaaacaaagtaaaacagcccttaataaagccatgaccatgtcaactgtttcggaccatgtgtagtgtacgtagtaaacatttaaattgataatgaaatagcaagacgcaaatggacgtttgtaaaaattgtatggttggtaaaaaagacatgaggctatatatgaatttctgtcattaaatcagctttaggtattacttgttaggattaaggttatcgtagttgattagactaattaactaatatatgaaccaaaaaagtataatagtcaggagtagtagttgagatttcaaaaagattcaaggtggccataacacaaatattattcgcaatgacaagtgaagcatcgttttcacttttcaacttatccctctcaatccccaccaccaccactctctattccctcatatagatagatcatcctagtgatcatatacacacacaaacattgatagagaacaaaacgaaattggaaaaattcattttaaattttaaaaatacaaaaataatggaattggaaaaagtcttttttttgtaaatactaatcaaatattttaaaattaacaaaaaattcaatagtaaaaaaaagccatcaaaaaatgatgtcaacaattagataagtatttagtctttttctcttttaaaaaatgatatgcaagctggccggcgctacttgtgcgcacacataaaagcatatatataagatccctcactcgattcatgtaattatacacatatagagagattgagtgaaaatatttttttttaaatggttgtggtgaacaaaacgaatctcttattgcttcttctctctctatgtctcaccctcgacctctcctccgcacaactccgccgtaacttctacgccggaagttgtcctaacgtcgaacaaatcgttagaaacgccgtacagaaaaaagtccaacaaactttcaccaccattcccgccactctacgcctctatttccatgattgtttcgtcaatgtaaaacatattttttattgatattattttcttgcgtaaaattatccattatttggtctaaataattgattaatattcataggggtgtgatgcatcagtgatgatagcgtcaacaaataataataaggcggagaaggatcatgaggaaaatttatcgttggccggagatggattcgacaccgtcattaaagctaaagaagctctcgatgccgtcccaaattgtcgtaacaaagtttcatgcgctgatattctcacgatggccactcgtgacgtcgttaatcttgttagtaactcaagcttatttattctattaaattaaaacattagtataagttattacattaaattcaatataggcgggtggaccacaatacgacgtggaattgggaaggctagatggactatcatcaacagcggctagcgtcggagggaagttgccgcatccgaccgacgatgtcaataaactcacttcactcttcgccaaaaacggccttagccttaacgacatgatcgctctctccggtaagatttgaactacttctcgatcataaatagtatcattcgaaccaaactaatagctatgtgatttaatattccggtttagctaactggatatcggacccgaatttgattagtatttaagttggtttatatatacccgaatttgattagtatttaagttggtttatatttccggtcctaatttagatttcgtttgatcttaaacatctcaggggcacacacattaggattcgcgcattgcacaaaagtgttcaatcggatatacactttcaacaagacaactaaagtggatcccacggttaacaaagattacgtgacagagctaaaagcgtcgtgtcctcgaaacatagatccaagagtggctattaacatggacccaacaacaccaagacaattcgacaacgtttactacaaaaacttgcaacaagggaaaggattgttcacgtcggatcaagtcttattcacggatcgtcggtcaaagccaaccgttgacttatgggctaataatggacagttgtttaatcaagcttttattaactcgatgatcaagcttggtcgtgttggtgttaaaactggtagtaatggtaatatccgtcgtgattgtggagcttttaattgatttaaatatatctgtattagattttgtttattgtatttgggtataggatgggtcatgggtctcataaagctggttcagctaaattgaaaattgtaataaatctctgtcttgggtttcagtttgcaaaacctaaactgtaattatagagtggaggaaataagaagtatcgtataatatttatcaagggataaatacaggccatccattatgggccgcgtaagagccaatgccaaattttaagaattttcttaaacaaattattatgaaaaaggaccaagaatgctggatgctcctacatacatataaagttttgataaaattaaaataattaacgtctatatccagaataaagtcaatgagcattatatatccaaaactgatctttccacaactatacaatatggatgtgttttttttttcttttggttgcattctgatatgttccttcctcttgtctgcagcgattacttgttattttgggttattcgtggaaatacaattcaaccatttgttttgaacgtgtaagataagtaatatatggttaaattatttaccatttttctcaatcgattagacaaaggacctggtgttattagaatataatataaatgacaaacaacagaaagaagcgtgattgcccttacttagatttttttggacaaacccatacttagattagatgcaagagtagccctttttgaatgactgtaatcttgtcaactaaagtttttgtttctttttaaaacgtcaactaaagtccatatcaatagctaatcgcctaatcatagataaaaactttaaaatctatattaaaccattagcttctgaaataaagtaaaacagccctaaataaaaccatgaccatgtcaactaattcggacgaccatgtgtccatgtgtagcttttcttttctagaactacgagatccaaaattaagcagtgtttcataacgaaataactaccgaatgtaatgaatttgatggatagatgatcatgttattttcttaagataaaggtgtccagaagaaattaataaatatcttaattgttcaaaaagtgttacatttttgccatcaaaatagaaaaatgatgatgaaatagcgctagacgcaaatcggaattttgtaaaaaaatggtatggtaagtaacaagaatatgagagagagagactatatgaagtccttctatcatctttagttgttacttgttaagattgaggttaccgtagttgattagactaattaatattagttgatccaaaaaagtatgatattcaggagtagtgtagagatttcggaaagattcaaggtgaccattacacaatacttaaatactattcgcaatgacaagtgaagcatcgttatcaacttctccctctcaatccccaccaccactctctattacctcatatagatagatcatcctagtgatcatacacacaacattgatagcgaacaccaatagtatgctatattcacaacaaaacaaaaatggactaattcatttgtttttttgaagtaaaggaattgaacaataattattttattttttttgggaaatactattcaagtatttgaaattagaaaagtatttagtctttttctctttaaaatatgaatgcaagctggccgctggccggcacacacagcacaaagcatgtatataagatctctcactccatttatgtaattatacatataaagagaaattgttttttttttttaaatggttgtgatgaacaaaacgaatctcttgttgcttattctctctctttttctcgccatcaacctctcctccgctcaactccgcggcgacttctacgccggaacttgtccgaacgtcgagcaaatcgtcagaaacgccgtacagaaaaaaatccaacaaactttcaccaccattcccgccactctacgcctctatttccatgattgtttcgtcaatgtaaaacaatcttttctttgataaaaaatgatttctagcgaactatattttataattttcggtaatttattttattattatcatagggatgtgatgcatcagtgatgatagcgtcgacaaatactaataaggcggagaaggatcatgaggataatttatcgttggccggagatggattcgacaccgtcattaaagctaaagaagctgttgacgccgtcccaaattgtcgtaacaaagtttcttgcgctgatattctcacgatggccactcgtgacgtcgttaatcttgttagtaactccctccatatttatatattataatgttttattttaatataaaaacattagtgtaagttattacattaaattcaaaataggcgggtggaccacaatacgccgtagaattgggaaggcgagatggactttcgtcgtcggcttctagcgtcacagggaagctacccaaaccgacctttgatctcaaccaactcaatgcacttttcgcagaaaacggtcttagccctaatgacatgatcgctctctccggtaagatgatttgaactagttcttgatcaagaatagtatcattcggaccaaacaaattagctgtatgccatgttgttagcggtttatatttccggtccaaatttagatttcgtttgctcttaaacatctcaggggcacacacattaggattcgcgcattgcacaaaagttttcaatcggctatacaatttcaacaagacaaataacgtggatcccacgattaacaaagattacgtgacagagctaaaagcgtcgtgtcctcaaaacatagatccaagagtggctattaacatggatcccaatacaccaagacaattcgacaacgtttactacaaaaacttgcaacaagggaaaggattgttcacgtctgatcaagtcttattcaccgatagtcggtcaaagccaaccgttgacttatgggctaataatggacagttgtttaatcaagcttttattagctcgatgatcaagcttggtcgtgttggtgttaaaactggtagtaatggtaatattcgtcgtgattgcggagctttcaattaatttaaatatatctgtttaagatattgtttatttgcactcatttgtattgggatttgggaatgggatgggtctcatgaagctggttcagctaaaatgtaataattctggttttgggttttagtttgctatatatcgcaaaactaaattgtagatatggagtggcaaaaaggaaataatatacatgattagtcccaatgggcaatgacaatactttgtatagtaagttggatcatgagtcatgactttatatttgtgtaaaatgtcaatcatctattatttcataagaatgtaagtagacataattaatctttgtgctgagaaatataacaaaattacattttacttacaaaattatcaaacgtattgtcaaaaagaactaacacaaaatatagtttctaattcatataatatcaacttccgagtttcaacgtttttgtatctttcttgggatataacatataaggcccaaaccgaggcccataccataataaagtaaggaaagcaatggctttcttttgggcatgttgtattttccttataacaatcttttgtagctgctaggccctttggcaacaggccctttttggaaacaatattagttttcgcttttgaaaaatgagaatttgttatgtgtaaccgtagtttatccagagattatagtggcatactgatgcctatttggctgcgtgaatccaaaactaggctataatgattcacagagacagagccacagtggcataagcattttaaacttaaatccaaaatacatcaataaatcgtcaatcaagttatggtgttaccattttactagtagtggcttaacttaaaaaattttaaggggcacacaagccctagagattaattgatccaaccaagttcgacttcaccgactacttttgacaacaattagaacagctaaaagacactcttttcgaatttggaaaatctaatatttttgcttaaaactattttaatgaattatcatcactaatgattagtgactacttcttttagttgctaaactatattaatacgttagaattatcataaagtttgaaaaagtaaaaaatatagcaaaaaatgagcaaaacataaacaaaatattatcaacaaaaataattatatattcaaatttttaacaatgaacaaaaaaacattatgattattgattatcaattacattaaaaattacacgaacacacacggtgggagggattcactgttcaaaaaattttcactgcatctacaagaaatcaacggtcaataactcgacaattaacctgatgtttgcgacaccgaaaaagttcgtctttatggatattttcaggacttcgacaacgcatactatcgtaatttggaagagtgaaaaggagttttggactccgatcaagttctatacaccgccccgcgctcaccaccattagttgaagaactggccagtaatggttaggttttcgaaagagttttcgcacgctcaatgattaagttggacagaatcggcgtgaaaacgggccgcaacagcaatatctgccatctttgtgacgcctttaattagttgtaacttgtgctgggcgttgaaagcccattctataatactataatgttattaagacatgcagtaatgaaaatcttcatttaaaaaaaaagaacctaaactcttcacttctcgtggcccatgggttcgttttcgttgaaagattttgaatcacgtatgacgtgaatggagtggtcgagaggtcccggtttttttttttattagatcgtgtaagttttttttttttgtttatgttgcaattttgagggtagtgttttattgcttagtctaatatcacaaacgaagtcgttttaatagtttagaaagtatataaacaaatcgatatcatctgaaacagtcccaatagaaaattaactttctttgtagaataatcaagatgtttacgaacttactaattgcaaacattcgcgattaacttacatcgttaggatttgcatcaaatgaagtaaagttaccccaagattaatatcattatcattattatttaaaatacttaaatttccacgatgcaaatatatcgataacgttattaaaaaaagtaaccgcatgatatattctctttcgtatgatactaaggctccgaaaatggtgattgcgttttgcgttacgggagaagtgcggtgcggttcaaataataacgaaaatacatagatacatatgtatatgtacaaattttaatactgttacatcactattgcggtacggttttaaatgcggttttggttagcattcacagcctaattactaaaggcttgagaaaaagatggtcatcttttaaaatccattaattggccacattttaatatttcaatatattattttaataaaataaataaatttattatatattgagaaatactttagaataacactgtatctttggagacatccgataaactttagaataacattaaaataagttatatggataattacagcatataatcaactaacttttaaaattagcattaataaatttacaaaataaatattttcttatcctatttaattaaaaaaataaaaataaaaaattaattaaatattaaatctcaattataatacgactcatgaaatattaattcatttgtgttattttaaaaaactttatagcttatgtgataaaagataacaaaaattatttttgtgtcatttgcgcaaattgccaaaaaaaataggtttgactgatgcagagaaatggctatttgcattatccaaaagccgtcttatccatgaagaccaaaatttcggtgtattattcatgtaaaaattactgtattgatataaaatattggcaaatatcgtactaatgtcacctggaaatttggaatccctcggaagctaatttatcgatttgcttcttcacaaatcaagtgtcaactctttataggattttattcgtatttaggatctttatatttcatgtgatctgctcagtgggaaaaaataaaaacaagtacaaaacacacggttggaactgtagagcggggatgttacaggagctataggcattttccttcattctcaatttctagatttttcttactgcattaggatggtggtagtagctaacttatggaaattatgtgatattttcagttattgtcgcgttactatcgttttactctattagtatgaatcagataaggcctaattagttttctacacacagagtccattagtggctgaatgttgatccaattttcacgaatatcatatatgatcagttcttaatattgtagaagatacactatgtgtgatatgtcctctttaaatgagtttccctgataatttataatatttgaatagttaagcttggaaaaaaaaacatacacaccatatgttagcaatgaaacaattctcaacagattatttattctcatcggcaaaatatatatccccaaaattttatcatatttctcgatagagaaaaatcattaactaaatatccattcccactcaaaaccctaaaaaagagagcctcaaaatctttgagtgttttgcgtcgtcggttttaaacaaaaaggttcaataactttttctctcctttgtttcttttttgtttattatctcctctcatcccattttcccaacacgacgtcgttacagattcctccgatggacttcccggacgatcacccttaaccaccttacaaaacgacgacggaggaagaaaaggaaccggtacagccggagcggttagggttaaaccgtggttcacttggagatcaagatccgaatcggacttcaatcgttttcggttaaccagagagtctttcatctccgtcgtggatctggaggtggagaagcgacaatggtgggtttggtttcttgaaacgtcttgatgccaaatctctgaagactcatcacaggagatcatcaacgacggagattcaagaagatctgatatcggtcgtaaagttccgccgcgaagaacagtctcaaccgccgcttggcatacgtgccagttcctggtccacaacataccaaccgctccgttaaccggattcaccgttctcccacacgcttcaaacaacaacgactgaaacaaagctgaacaaaccaaaacataaaaatcaatttaaaatcaaaaacattaaaagttgtatagatccgtagagtttgtaacctaatggttatgttatatattcgaatagaaatagatagtatagtgataaaaagaagttgtaccaggacgttggagttcaggtacggaggagatgaaagacatgagaccagcacgaccaaagaatttagcgacgaagacggtggcgtggccttgtgactcggcggattcgatccattgaaggcaaggacgaaggatgcatgtttcactgcaaccttttcgaagaactctacatccattgcaactcatttcttttccgaaatttgaaaaagaaatatatccaatattttgggaaactctacttgttaaaacaaaaactgaaaagtgtcgatttaattcgggtttgagagcatgcaaataggttttgattgaagaagggaaagagaaaacaagtttcaagaagatgagagaagatagtatgagatttatagaggggagtgaataataaagagagtgtgccaacttgtgtttcttttttattcctttgtcctttcttttccattatttctaattaaaaaaccatgtgtattaattatttgaaatttattatggggaagacagaaactcaaaggagattgagataacattttgaaaagttaaaatacttatgtgaataaagaatgggtcatattgacacaaataaactagtttttcgatcattaattcaaacttgagttgatttataagttgctggtttcaattttattggtgtgtagaaaatgtaaaaagagagaaagtgaggacgaaaggacaggacagagttagggagggattccaaaggtattggcgttgggggaagagagagaaagagagcgtttccgtttctccgcgaacacttgtcgctgactcagactcctcttatattagtattactttcttcttttaagttaaagtattaaagatgtgtactcttctcttttttataagagtacgtactatataatgaaaacaaagctgaatttgggatttgataagttatagacaaatcttacgtcaggagacgatggggtgcacgtggattagaggaaattattggttcagagttgtttgtatttttatgggatgtttaggattttagtatagaaaaatgaaaactaggttattggtagttattgtgtgttacttgatgatgctaatcttcgggtggtgaatgaatcacatttttttagggtttaatcatttggagggaattattgatacaaaaagatactgaaatcaataagcaaatcataagaggacaatgtgttaaaagaaagtaaaaaaaagagaggaccaaatgttgtgcgtatcttgctacgtattcttcttctagtattctctagctagtagctagacacacaataagaccaccctaatacaaatttgaaatcactgttttatgtctcaactttaaacgtttgttattaaatgttaacgatgttcgtaaagaggggcatacatgagcaatatccacgattgcctaactgtgtaaaacttgcgtcaatgtacttcacattcctccaatcactttggaaatgtaaaatgattatcaataaataactagagaggaacgtggtgttcatgagtcatgtcctcgtcgtcttccacaaacgcatgtgtctccataggtataaatcagaattgatatagtacaaaaaagactcttaacttattatatattgagtgtttgactctacgtacctacgacacaacataagtatttgcaatctcttggaactacaaaagccgttattgacttattggcccttcgccatattcaaaggttcttctctatgcgtgcgcctttccctttctcgtacgtatatataggagtatagtttttaaaacattttttttctgtcgtcgtctattttttaaaacatttatttatctgcggcgtagagaaaatgtaaaagggaaagtgatttgcaaatttctcagtggcgaatttacaaaacttctgacctaataagagaaatttctagctcacatcatcttccacactttgtcggaataggtctcaaactactaaaagtattacaattattcatttataaatacgatatttctacctgcaaagcaaatgataatttaatggactagtgagtattgacactggttcagtatttggttgatattttggtttaatgtagaaaatacgaaagaagaagaagaaaacagaatagtgatgtaatggactgatcatttaacttagataacgatttcataaaataatagcaattccaaaatttgagaaaattatcaatcaactactacatgtatttcttttttctaatggtcaggattcaggaagaaaatctggaagtgtatcttcgctttctgctttacgattgattaaatatataacatttcgaagagttttctactaactgttggcaacagtctgttgctgtcggttccgacgttgcaaacttatccaaaacagcatttagttctgtgtaccgtacagttgaactcgctggattgtaacatgcaaagttacaatcatttttttttttaattcgcctgatatatgacctgattagattttagtttttcatagaaatttaaacactaatctcatcattttcaaactaattaataacactagcttacgagactccggaatccaaacttttctttctttcatattttcttactcccacaacaatatcaccaccatttctcctcgtactgttttgtattttatctcatttaactttatcatctttaaccctttatcaaccatgccaaattgcaaaatatttttttgttttgtttttgttgttatcccatttcagttgtcaattagaagcaatgatacaacacctttcattcaataaataaacaaaatttgatggtagccaccaaaataaaacttgatgacgccaagcgtgtaagccacaaccacgaaaaaaacccaacaaataaacataaatgaaattaagtcaaatgaagattcgattagattttttggacaaaatctgtcggatgcttattcatagcatctcctctgttacagcaagaatgaggaagtacggatcaaagagtgtttgaatggttgacctgaagaaggagaagcaattgagcttaagactctctgattcttttcataacataagtcaagaaaatgtcattttcaactttttggtcatgcatgcattgccacacacagagggagacacatgtcttttgatactatccacttggttcagaaaaaaacaaaaagtcacactttttgaaaaagtgaaaacgtctcaagatatggtgaaatctgcaatctttttttactgtctttttgttatgatagataaggaatctgcaagaaccaatgatcactcttttcactgtatcaaggacaaaagaaagagagaaaacaaaagagttatacagagagaaaacgtgaatagagagatcactgtacttattgggttttgatctttgatggctccactgagtccaagagtagtggtgaaggtggatttgaagaagaagccatggcagcaggaccagccattgcacaatagatggcatccggagataccaccagtagcagaggtcaaggctggtgagtttttccgggtagaaatgattgatgcaatgggaggtgttatcaaagacaatgactctgcaagcgatatcaagaacctagtcctaactactgtaagtgggttttgtgagaaacatgtgaaaaatcaataatgaaacaatgagtttacttttaaagaaaaacaacttttggtgatatattgtacagactcatcacctaagtgggccgattagggttgtagatgaggaaggtgttgcagctaaagcaggtgatcttcttgctgttgagatatgcaacttgggtcctcttccaggagatgaatggggattcactggttcgtttgatagagagaatggtggcggtttcttgactgaccatttcccttgtgcgaccaaagctatttggtactttgaagggatctatgcctactctcctcagattcctggtaagaagaaaacaattcaatgtcttctatcaagaaacttagtagcataaccatgtagctttccttgttatgattcgttctgttgaatattcaaatgctaatattaccccatcatggcaggagtacgatttccgggtttgacacacccaggagtcattggcactgcaccatcgaatgaactcttgagaatatggaatgatagggaaagacaattagaagaaagtggtgttgagtccctaacactatgtgaggtagtgcatcagcggccattagcatgcctaccaacaactaaaggatgtctcctcgggaatgtacgctattttctgatgctataacaaagtttttgaactgtataaatagtgcttacctctgaattcccagggattcttacataatcctcttgtagattgaagaaggaacaccagaatgggaaaggattgcaaacgaggctgcgaggacaataccaggaagagaaaacggaggaaactgtgacattaaaaacctaagcagaggctctaaaatatatcttccagtatttgttgaaggggctaatctaagcacaggagacatgcatttctcacaaggtgatggtgagatctcgttctgcggagccatcgagatgagtggatttctagaactcaagtatataacaaataagttctctcgactatgcattctcagatgttcttgtatttgtgcagcgtattataaacaattctgaccagataccatgttgtaactccttaataggtgtgaaatcataagaaatgggatgcaagagtaccttacgccaatgggacctacccctctccatgtaaacccaatctttgagataggaccagtggaaccgaggttctcagagtggcttgtcttcgaaggtatcagtgtcgatgagagcggaaaacagcattacctagatgcaacagttgcttacaaacgggcagttctcaacgccatagactatcttttcaaatttggttactcaaaagaacaggtacttgtctttgcagcttgatgtttcttccagaatctagttgatcacacaccaaacatccataaattaaaactacaaagacagaagtgatcaagagaatatggtgtgaacaggtgtacctcttactctcatgttgtccatgtgaaggaagactatctgggatagttgattctccgaatgccgttgctacactagcaatacctacagccatctttgatcaggtatcaattttgcccctctgttctttgcataagtcaaaaagcttctgtataaacctcttgagtttactctgttcttcaccctcgtctctcaataatttgttagcaactgaaaagataggaatgcaaatatgttaattgcgtttgtatgttaatgcaggatattaggccaaagaatcggaaggttccagtaggacctcgggttgtgaggaaaccagatgtactgaagagcacatatgatggaaagcttccaattacaaagaatccaagttcttcctcttagcttctacaaaaaaattaaaattaaaatttagaagctaataccaagattgtataatcaagcatatgttccaataataaagcaataacttggtgttttctttagttggcgtcttggagattccacataaagcaactcacgaaacgagaaagcacacaaagggttaaatttgcaccattcaccgagtaaatccaagatcttcgacataatatagacaagcaactctctagatagtataatcagaaatgtttaaagagagaaatggtttttttttgttggttgcaaattccaaaatcaagaaactatagaaattggaaggtaaatgatatgcgtccttaatctatatgcactatctacagattctgtctcaaaaatagcttactttgaattgcaaaactgcgcaattactaagtcgaatgtaatattcctctctccggacattagaaagaccttattcagaacataagttaagaaaatgtcattttcaacttcttgtcatctatgcattaccacacacagacacaaagagacatacgtgtcttatggcattataagatgaatgacagtcatttgtctagatatagaaaagtctacaatatggtgaaagagggatcttttactgtcctttagttgtagataaggaatctgcaagagcaatgattccttaatacaagaggggaaaacaaaaaacaaaaatatattaacatagaacgtgtgagtagagagagaatataaattaccgtacttattgggttcggtttgatggctccagcaagtccacgagtggtggtgaaggtggatttgaagaagaggccatggcagcagactcagccactgcacaatagatggcatcctgagataccatcagttgcagaggtcaagactggtgagttgtttagggtggaaatggttgactggacgggaggtgcagtcaaagaagatggctctgctggcgatattaagagcatagacctctctactgtaaggagttttagtaagaaatatgagtaaactaatcatgatgaattgcatataggtaaaagtttcttggtgattatgcaggttcattacctgagtgggccgatcaaagttgtggatgaggatggtgttgcagctaggccaggtgatcttcttgctgttgagatatgcaacttgggtcctcttccaggagatgaatggggattcactgcttcatttgatagagagaatggcggtggtttcttgactgaccatttcccttgtgcgaccaaagctatttggtactttgaagggatttatgcctactctcctcaaattcctggttagagcacaacatcatcctgttttttgtcaagcagattagtagcacaatcatgttgtgatgagatgttctgttgattattcacattctaacaacatcacatcacggcacggcaggagtacgatttccagggttgacacatccaggaatcattggcactgcaccatcaaaagaactcttgagaatatggaatgaaagggaaagacaattagaagaaaaaggtgttgagtccctaacactatgtgaggttgtgcatcagcggccattagcaagcctaccaacaactaaaggatgtctactaggaaatgtacactattttctgatactgtaacaaagtttttgaactgtataaatgtacttactgcataccctcttatagattgaagagaggacatcagaatgggaaagaattgcaaaggaggctgctaggacaataccaggaagggaaaatggaggaaactgtgacataaaaaacctaagcagtggctctaaaatatatcttccagtgtttgtagaaggagctaatctaagcaccggtgacatgcatttctcacagggtgatggcgagatctcattctgtggagccatagagatgagtggatttctagaactcaagtatgtacataagttcctaattgcactgtaaatagactctatacggttttcttagatgtccctgtttttgtctagtgttactatgaaattctgaccagataccattatgtaactcattaataggtgtgaaatcattagaaacgggatgcaggagtaccttacaccaatgggaccaaccactctccacgtaaacccgatctttgagatagggccagtggaaccaagattctcagagtggcttgtcttcgagggtatcagtgtcgatgagagcggaagacaacattacctagatgcaacagttgcatacaaacgagcagttctcaacgctatagactatctcttcaaattcggttactcaaaagaacaggtactgatctccgcaacaagatgtgtctcacagaacctagttgatcacaagcattaaaacaagagataaaactgatcaagaaactatgttgagaacaggtatatctcttactctcatgctgtccatgcgaaggaagaatatccggtatagtcgattctccaaatgccgttgctacacttgcaatacccactgccatctttgatcaggtttgaagttacagtcctctgttctttacgactacacctgagcttgctctcttctttacatcaattcctcaacaatggaaaatgccaaacatcaaatgattttcttatgtgcacacgcaggatattcgtccaaagacccgaaaagttccaacaggagctcggatagtgaagaagccagacgttatgaagagcacatatgatggaaaacttccaattacaaagaattcaagttcttcctcttagcttctacaaaaacaaaagaagatttagaagctaactaccaagactgtgtaatctagcatatgttccaataagaaagcaataactcggtgtcttgttagttgcagattccatataaaacaactcgagaaacgagaaggcaagcaaaaggcacatactttttctctcaactttaatgtgttcatatgtatgccaaaactccaactaaagagagaatgcacatactttttctctcaagttagcaataagtacttagccattctacagtgggacttaagattactgaaattttcaacacttagaaatcttgagtttttagtatactaccaattacagcaaaaaataactaaatttgttccatagctgacagaagtatactagtgatcataatcacaatcattatcaacattaagcacaagtacattctaatgattaacgcaaaaaacaataatctgaagcaatagaaggaagagaagctactgtacatttggaattgaatagccgataagggaatccgccgcagaagaatttgcagttcgtcggagagagcctttgattgaagaaatcagacgagatctcgaaccggaacaaaaagtttatattggtattgaaattaaaatcgattttgggtttggtttagactggtttagagagggaagaaaaaaatattcacgcgatggtgattttggagacaagtgcgttgataaaaaaaggcatgatttcagcaggtaaacccctacagaattgctctcacgctctctacgcgcactttgtgcgagtggttctaaaatagagccttctgattggcttaaaaactctaaaaaaatagcaatagtagacatgttgctagctcctgttattatttagcttttctacaaaacgcagtcgtttctatttcgatcgtttcagctcttgacattgatccgaaccaatcggttcaactggcttagtctatccacaggttcgtatagaaaatctcatttggtcatcaaattaagcagtaaatttatattaattaatcataagttaatgttttttctatttcaaatttctaacgaatcagacctaattatccggaataaatgattggttctgaaaatatcaattgggaaattaaaacccggttcaatttgaaaccggaaactagattccttcttctaacctatatctccactaaataagcacttctagagttttagataaacaaatttaccatttttctcggcaaaagatggaacttgttcttaattcaacctctatctcactgcctgaatcaatggctcttgagctctacttcaaaacaccgagctgctgaagcgtggcaagaccaacgtagtcgacgaacatggtgatcgaatcaattatcgtagaatcgattggtatagttgaattccagtcggagactcagagacccagtaagaaaacgaaatttccattgatatagaatcgattggtatagttgaaatcagacaacaattttgcagtagcagtaaaaagaatttggcaacgaagatgaattgtttcatggatcaagtgtaatcgtttaggcctataaagcccaataaaagcccatatgagcaaggtgaatatgtttaaagtttaaacgtagtgtgtatacatattatatacactcgtatatgtacatttaaaggtcttaatcgttttaaagacaaggtttattataaataatcaacgatgtaggatcttaccctacatcaagatttaaataaaagccgttaaaacgctaatttaatgtgattaagatttcccgtaaatctctccaactgttggccaaggttttactaaacatggttacgacatgtaatagaaagagaccaaaagaagacaaacactttcacgagagaaacggtactgaggttacttgtgtcgtcgtctgtcatcttaggctcatgctcacacatgcatgcgtggatgtatgtgaatggatgattatgatcatgataatgatcatggaatgggcttttgatttgacaagacgagagtcacgaattgaggacgatgatatatctatattattacttcagtactcaggagacatcgctccatgtctttctcttttatcatccgtagcgaaagacaagtcgaaatatatgtatattacattattactatacatagtatttatgttaggaacttctaggacaatcattattctgaaaagtattttctatgatcgatgatctttacattgttagcgtttttaagtgatgataatatgacataaacgcatgatattccaaaatatgacaagaggtaaaaaatcgataaatgcttcatttaggactattgtacacttagattataggataaagcaaaacgttataaaatatttagagactactgctattgcactactaacaattaaaattttatataatccgttaatgatgtgagctgaatcaaacgttaagaagacaaataacattttggggtacaataataatatgagttgtgtggaatatgaaaacgagggaagctccgagttagagccaagaggcaccgaaacaagaaaccggcctgcaactgcaagcagaagtcccatcttgttcctttgactattttcttcttctctctcgaataagataaaaccttaacaaattaaaagtccaattcacacttttatttatgcacagtgtcttatgcgatattcttacgaatatatatattctctgttctattttcttattttcagcataaatatttatttgaaagaataactagaatttagaaaagaaactttagatttacgtttaatttggagaatatccagatatatatttacaaatttacatttaatttgcatacactcaatctttcgaaatgcaaattattttttcttcgagttaacatattgacaactggaccaagggatcagaccaatttgatagacaaacttaattatgttttccaaataaaagaaaattgagtagataatcactagacactagtagtagatattttggtgtatatatggaaaaaaagtgatagaaatctatgattttcttatatatatatagcagatctctgattgttcctgccacaaacatcgtgattctgtatgaaacgtcatttcaagcactcttaattatcgtccaccattctctctagctatcataatgcactcttacacatattcctatatttacacttttatatatgtctattatatacatattctcttaattaaatacaaaaatctttgacgaaagcccgaattaattcttcaagcatccggttttatctgaaatctttaatgacctaagacaataatggttttttacagtttataatctaccactagacatattaatttatagcttaacaaaaaaaaaactattaatttataaattgttaacttcttagaatgaaaagaatgttaacgtttttaagaaatgacatcacaatttatcaaaattatttataaattttcaacacatcaaaacaagaccacatttatttctgctttttcatgttgcttttgaaaggttgtgaacaacaattgataaaaaaaaaaaaaactaattttttcctttcttaacttatcaaaaaacataccaaaaaaaaacatgctaacttaatcgccaaaaaaaaagaaagaaagcaagatacatacaacaaattgacaaaacacataaccaagattacatcagtagaaaccgaatctcatgtgctcatgcaaaaaaaagtatttgatttatctatcgtgtgctcttgttttggattgtattatctatccatcgtatccatatagatatagtgacatattttggtatatatgcatgaacctaaacgtatagaaatgattcataagtttcaggatatagatatagctagataggcaacatgcatatgatcttggtgatcaccccgagccttaggacccgtacctaataaaaatacttatttaaatgtttgaattgacacttccttagtgtctctgcccggccgctttgtgcccgcaacattcacagctggatttacagtttttaaaacaatgagatgtacacaaaaggacattattgtcaatttactcttatccgacataagtcggtaaaacaaaaaatttggtctgacttatgtagtttttgactggtcttaaactctcaactatatcgtttatcaacttccataattaagcgtatgtattggttttctcgtgtagctaattacgtaaaagtcattaagcgagataactaccacatggtttattggatccccaaacacactacgtacgttggctttattgaggttccaaatggtaaccatgaaataaacaaacgaaaccgactaaaaaaaacataacaaatgcataatatacaacgtaagagatactatttatatttcattcatataactaagattagtttttttttttttttgtggtatcaaaaataaaaaagttttccgccgaaatccatgcatgcatatctcatggtaagtaaatagccatctcccaagtgaaaatcaaactaaaagttcaagttcaggttagaaaaacatgagattcatagacaaaacctcactttgtaaaccaaaaaattgttgtttacttatcttcaatataactgactacatagattttaatcaaagttcgtaatagtcatctcgtgtaaaaaaaatatagtcatgttttgaaggtaaatttaaaaacatgatcagatgatcttgcagacgaaggggtcagcgaccaagctttttggcatattgtcatttattctaatgataattgttgaggaaataataataatcataattctggaaagttcgtaacaaacccacgtcactcctcgagccactccatccactagactttaactagtcttatcaattagttagattctggttatatttttgtgggtcaacttgcatgcgatatagctctcgttagactttagtattttgattacgatgattgtttttcttctattttattattttctctaacattcttagctcttgtttaattgtttttataactataaatcgttcaaaaaaaatcaatttatttttaatacaacaaattagcctataaataacagagtaaacaagattggacgtgaatagtgaacgcaagtttgttgtgtttgtattaatgtttaaactcttagtgggtcatgtgcttccaaatatattcaggtccagtcttcttacttgtgacggttgcatcttagtaaccacaatgactataattaacccaccgcttcaaatactgcacttttcggacccatttttagtacatatattcactcaaatcatatcatcaatcttaccaaactataaccacgacaccaaaagaaactacaagtatttagttatgtattatattttatattcaatcttcttgcagaacatgctcaatattggacctagtctaaatactgtcaaactaaactaaacatattatcttggaatgtccaaaaacgacatgaaaatatatgtgaatgcgaaattgtattgcaacggccctacaataatagctgtcctctgtcaaatagaaaaataaatgtgttacaatcaactagggttaatttttgaataaaccgtacgggacatcgaattgaatattaatattacacagagatggaccgggctataatgtatcaagatcgtctcatttgtgtcttcgaggaaattgtcttagaatttacatgttatcttatgatttgtgtaattgttacagtttatcataattacataataatatatgatacgtgttgaattgtagactagttaatcttgaccaaaaagacaataatttgtctgctaattactcgacacttttagttatacgatgtggtctatggtatacacatatatacatgtctaaacgatccacatagttccttaatcttacgcacaattaattaataaattctttcaactaacatgataaatcatctaggtttttgtaaccacataaaatatatatatagcttgataatattaccctataatgtaataaagtatgataagaagaaacaaatgcctgaaattacgcaccgttacatttgtctaattgccattacgctttatgatatttgataaatgtcaatatggcatagcgtaagcacttttggccgaatcgaaatgatatattatgttaccaaacgacgtaaaaaatgatacataatcacaactaagcattggtggtattatgagtaatattgaaatagaaacccaggacaaaaaaaagctctcttttatagctctccatgcatcttttaaatattgagtggatatttaagagacgattggattttaaaaagaaaaaattggtcgaagagacgaatgatagtagtttcgagtatttatcagtgacctttctaagtaataataagaagaaaaaaaaacaatcctactattgttagagacaatcttattatttcttatatataactctatattttatgtaggggcatcaaaatgggtcaaaattcataggtcaactcaactcaattcaactcaacccatgaactttaatgagttgaaaattttgactcaaatgagttaatgggtcaaatgagttgatgagtcaattggtttgatgagtaaaatgagttgggttgtaatggttaatggtttcaatggtttacccaattaacccatcaagttttgtaaaattgaattaaaccaactaaaatctctaaaccaatttcaatttaagtttaaccaacacatctaaaccaatttaataaaattaatatttttccaaatttcttaaatatacaagcgatgaaattgaggaaaagtaaattcgtaatttttccactaaaaaacataaacccgtgattttcccgccaaaaacgaaaacccatgattttcccgccaaaaacgtaaatccgtgatttacccgccaaaaacgtaaacccgagattttccgccaaaaacataaatccataattttcccgccaaaaacgtaaacctgtgattttcccgccaaaaatgtaaacccatattttcccgccaaaaacgtaaatccgtgattttcccgcaaaaaacgtaaacccgtgattttcccgccaaaaatgtaaacccgtgattttccagccaaaaacgtaaatccgtatttttcccgccaaaaacgtaagcctataattttccgccaaaaacgtaaacccgtgattttcccgccaaaaacgtaaacccgtaattttcccgtcaaaaacgtaaacctataattttccgccaaaaacgttaacccgtgatttttccgccaaaaacgtaaatccgtaattttcccgccacaaacgtaaatctataattttccgccaaaaacgtaaacccgtgattttcccgccaaaaacgtaaatccgtaaaaaatggaatccgtaaatatcctaagtttgatgataatgaattaataatgataattatttattattgttttataataatagttaattaaattattacttaaatgggttaacccatttaacaactcaacccatcaaattaaatgagttatgggttgacccaacccattttattatgagttgagttgagttggattacccattttgacacttctaatcttatgtaagatttttttcattatagttatacttttgatgggaatttttttttttttgttaaacatttttgatgggacatccgatataataattctggtgaagagctattttttttatctaaagatttttagttagagaggtgttaatagttatacttaactaataaacgccgagaaaacaacagtaacaactcaattaacaaagactcgttaaaagtaaaatacgtttatattaaagatttaaagtgataggcaaaatgaaaaagaaaatggctaaccatgctcatcgtttatattatttaattttcggatcttcattaggcttataaatttatttttagttgttaacaaaaagatttctctttatactttagcttttgtaatcttgtttggccaaactctttttgaatatatattacatttattggtgagcacattgattattttatgtagccaactaaaccatcatcactatattggtgtctacgtactgtctacttaagtactgttaatggaccacgatttttaagatataaacttacaaaatacatgtttcaatcaaataatgataatcgttgatagttcaaccaattacactaaaaaacattagaggagaaagtggaccaaatcctgaatttgattgccaatgacgggggaaaacatagtgaaaatgtttaagctccgaattaaaaagaacatagaccgtcgtttgaattggtttactatctttacgttcaatcttatatcgatttgttttggtataatttcattttgataaatccaaaatggtttaaatcagattgtatcctatgttcctaactactagttagaataataatctatttttaatattgattttaattcttctgatggagtatataatagtgctcgacaatgtcataatcagtacaaaataaatcacctaccaacctgaactatatgttatatattttgaggggccacgtcaagtgtgccgtttatttttgtgtttatgattgtttaatatttgtgcgtgtgatggtgtttcttgcttagtttccacttaatacacaatcaaatatcaagtggaactatttatgaaaattgttcttcgagaagaattctgaccctaaaaggtcatttgagggcttgaggcttattgtttccaaattacaccagtaaacaagggtttttttttgtcaacaaagattattgtaattcgaatttcgtctacaataaaacaaattttcttactaaaacaaaacaattagctgacggttgatatttcggcttttgagtttaattaactaattggtgattatgttgatgatctttcacacctaatgaagtgtcatgtatatgtatatatgtatatacttatgtatatataaaacgtacatataatcatttgtcatatatatcatcatgtattgcatgactaaactacccttaaaagaggaatacgatagacatgacctttaggaatttgtttttttcttctaaatggattccttcgcttctttttagcctcgtagtgaatttgaacattgcagttatttctagtaagatattttttctgtatttttcggaaaatgttaaaaactaattatacacaatttactttctctctcaactcttattttacgttactgttttttttttcctcttgcaaaattagagctgctgtatttacatttactagtaatttggtagatagacagttaatgtagtatatagatggggttgagggcaaatgattacttgggagatggtgcaatgcatcagagtgatgatgtggaatttaataagtgtgaatttatgggcaaaggaagggaactagtagtagaaagggaaataaatacagtacaagtaagaggaaaacgaaaagagagatagaaaccataataatgagttaacgcagacatagccgccattttcaacttctcactcccacttacaacttctccttctgggcaagttttccacatcaatgctcgtcttaatcaccattaatctctactcatcattaatacgttgaagcccactatttcaaaatttactaggagtatttattcgtgaaaaacatttaaatgtccctaattataagagatttaatttcatatttattgtattaaagagaatttacattagctgtcaaaaaaaaaaaaaaaagagaattaacattattttacagaacataaaattttgaaaatagatagcgccactgcatgtaagaacatacaaatttctttttttcaacaaaatctatttatatttcttctttttttgaacattatgtgtagtttgtagtaaactaaaaagtgtgaccaacacaatttaaatcattcgattttgtagcaaaaacatttttgttccaatttccaagcagcaaatatggtaggaatataaattctttactatttttcctcttaacacataaaagtaaaaaaagcattcaatgatcagttaaaatctggttagaattctaccttatcatttagaactagctaatatttaaattcatatatacaaaaaataaaatgggaactgtagagactagagactataaatagaggattgagaagaagaacttttaaagctctatcaatcatgaactactcgccttctccaacttttaaaactcatcataaatagtaaaaaagtagccggaaaaataaaataaaaagtctatttctctttcctttaaaatccaaatcctataaactcatagctttctctgttctttacttatacctcacgttatacatatatatagagtttctataaatgcttctctttcctctcgaacaaatcttcctcacttctctcatttccacactcaccttcctctctatatattaaaccctatctacttaactcttcttctaactctaatctctctctctatttactctgcttctgttctcactctgaaagaaccaaaacatgacggtggttagagagtacgacccgacccgagacttagtcggcgtggaggacgtggaacgacggtgtgaagtcggaccaagcggcaagctttctcttttcaccgaccttttgggtgacccgatttgtagaatccgacattcaccttcctatctcatgctggtaataacatgtttcacaatcttttatcttcttttacttgtatgtctcttcaaaaactctgtttgttttttgaacctagaagtagaaaacatagaacaccaacttctcaacctttggttaatccaaaaaacccattttccataaacaattaaagttcggttctttttttggtatcatttctatttttttccgattcttgataagatcaaaagactcatcatttatattattttttgcaaccaaatgatacccgagtaactataactaataaagtttcctctttattataaaaggttaaaaacatataataacggaaaatttaaattatgggactgtaacaggtggctgagatgggtacggagaagaaggagatagtgggcatgattagaggatgtatcaaaaccgttacatgtggccaaaaactcgatttaaatcacaaatctcaaaacgatgtcgttaagcctctttacactaaactcgcttacgtcttgggccttcgcgtctctccttttcacaggtacccttccgttttcctcccactcataatcacacgctattatagattttggttatctaaactagttttggtttttgcaggagacaagggattgggtttaagctcgtgaagatgatggaggaatggtttagacaaaacggagctgagtattcgtatattgcaactgagaacgataatcaagcttctgtgaatttgttcaccgggaaatgtggttattcggagtttcgtacaccgtcgattttggttaacccggtttacgctcatcgagttaatgtttcgcggcgagtcacggttatcaagttagagccggttgatgctgagacgttgtaccgaatccggtttagcacaacagagtttttcccgcgggatattgattcggtacttaataacaaactctcgcttgggactttcgtcgcggtgccacgtggaagctgttatggatccgggtctggatcatggcccggttcggctaaattcctcgaatatccacccgagtcatgggccgtattaagcgtgtggaattgtaaagactcgtttctgttagaagtacgtggagcgtcgagattgagacgtgtggtggctaaaacgacgcgagtagttgataaaacgttgccgtttctgaaactaccttcgataccgtccgttttcgaaccttttggacttcattttatgtatggaatcggaggagaaggtccacgcgcggtgaagatggtgaaatccttgtgtgctcacgcgcataacttggctaaggcaggtggttgtggtgtcgtggcggcggaagttgccggagaagacccgttgcggcgaggaataccacattggaaagtgctatcgtgtgacgaggatctttggtgtataaagcggcttggagatgactatagtgatggtgttgttggtgattggactaaatcgccacctggcgtttccatttttgtagaccctagagaattttaaaactttttttttaactctataatatatattctctattaaccacttgatgttaaattaggggttttcttctaagtttatagattttcttgttttagaattaatctttttttttaggtaactttttttgctttttgttttgttttgttttgtttttgtgggtgttataaattagtggtaagaggtaatatctcctacttttgggtttgtgtcttcttgtcttgtaaatggatctagctttttaagatactttttctttgtggccaaaccaaaacgccgacctgattattatttccaagtagataaaatttcatgaacgcactgatacgtataatgatgcaatttgtgttaagacgatactttggagataaaattacaattatgacaatgatagaaaatgttaccaataacgattagcattatcgtgtgtgccatcaagtataaactaagagaaagacgcacattttcttaagagtaaataaaatattatgtatattagtttagtagttctttttaggtggaggattttggttcttagtactttgctaattcgagtttgatcattgatatttgatagtgattggagaataaaaacttcttttgatatcgctaatcttacgtgtaaatgacatgaatatcaatgtcatggaccacactttttcccccaaatatggtccaaagatgttcaactgatagatttatatgtttcttttgttggtttgcggtagcaaaagctatatcatgatgaaacctttgaatcgggtttgagaacgtgtccttgtccgaaagaggtattgtcgagtcgagagcaccgatcgagtcagggaaattgtttatactataaggtcttgaccatcacataataagacatgtggataacttcgatcgaggagtgatactttgtgtttgtggattagatttatcatttctgttataacgattggtatacatgtgtgtatgttgaccctaggtttgttttctagtgtcgtgagtttctataattacatcttgcatttgttggcaatatatatgtaactatgtaaggatgttatcatcggttaatccgaaccatatgacaaggttctaataagcaatggagacgactagttgcggaccatcttgtggttcaccgacatataattttaatggttttaagctaatgaaagaaaatctaagggaagttaggtgatagtcttcacggagttctcaagtagacgatcatgtgaatctcaaggatcctaaagcactagtagcaaaaagaaataattaatgcaacatattgagaatggtaattacttgtgaatcaaatcaacgatccgtatattaataacgtttgtttttgtaacgttaaaatctatcattatttgaataaaatgagaaatatatattattaattcatagaaattgtgggcgtgttcaacacccaaacatcacattctcatccatcccccacaaaaatccgggcgtgatattatttattcgaagggaatattcattatgcgagtgcgtccgtaaggaaaatgatgtaacattagcgtgaagctatttctatatttttaactcttttttatgaacaaaataagagaaaagaaaacgacgaagaagattttctgcacaatgacggtggcaagtcaatttaaagttatcattttttgtcggtctaaaatatggtttctccgacgaaacttatttaattctctcctcattttaattcaaagacggtttaaaagttcgctgcatttgtcagttatcaaattttcacggagcttccaaataagttttatgattaaataaaaacgtctaactaaaaaaagttttattcagttttatgcttattttccttaataaaaagaaaagaagagaatgttttttaccgtagtcaaaagtctaattagatatgaaatatcgacttgggccctagtccagtcttatggatctcgatactgcccgtacacaagtccaaaataaagtcaaagtcaacaactttcagaatcaacaaatttgtaacatttataaaaacatttcctatcaaattaatatttctaaagttttgtggcgctgttcttcaagattttgaagaaacagtaatgttacaaacaaaaaaaattgtaatgtattgtgaaaaataattgtagtcttttttttttttacagcaaaaattgtagttagatagatgatttgtaaagcatttttttcaaaaaagcttattttaaaaactattctgctaatgaataatcataaaacactagatatgaaaattacaaacaaaagtgacaacttgatctaaatttcaccttttattatttgaagaaccatttttttttgtttttaaacacttccattttaaagtgacaacaaagcagaaagaaaaaaccattacctactaaggaagaacaaaaccacaaaggaaagaaaatggtaacatctgagaaattggatctaaagagagataagttagtaataggatgaacattttagcaaacctaattcatctttttcttgcttcttacgtctcctgctaatgcttcttgcttgtggaagaagaagacttggaatcatcattaacagaaccaggacttgaagtccctgagctacttatcatatctccacttctctctttaccagaccaaagcttcgagaacactctagaaactcctaatcctcctcctttcatcagtttcccttggttatggctctcttgttgattctttgcgagtcttagatttgctaattcacctctcaaagctttgatatcttctgtgtcccaacactctgtgtcttcttgatcagtagtgtttgttgatcttgaagcaggtataacctctggtgtgctgtttccggttgatgatgaaccgttgttgttggctcttacttgttcaaagaagagcacttgcactaccacacgcattggtaaccgctcgttttgaaccgcgtgagcgcaggcttctgctgatagttttctgcagtccattagcctgcagatacgcttcttctcgctcttgttcatctctggatgttcctgaatgagagataatttcaagaaatcaaaatcttgattagttacttgatcaaaccttgattactaacaactgaccgaaacaacggattaggtattgctaaataagatctttgtatgaatactttgttgagatagagcttaagaaacatgtcgatagcgcgataaactccatcgtgagactgtctaggaaacatgtctaggaaacatgtcgatagcgcgataaataagatcttgtaccttaagaaacatgtcgatagcgcgataaactccatcgtgagactgtctaggaaagctcgagaccatttccgcaagtgagaggaacttctgaagaggcaaattatcggaatctctcgatttctcagctaaataaccatcaacaagtttcgcaactgatgcttttgcggttacatcatcctctctcgggtctcgggatttcaagaaaacctcaactaagctctgcatcaactcaacatcatagagcaaaacatcgcccaaattcgcctcatctaaccgctcaccaactctgttctttaacccggctacttcatcacaaccaagaaagatcgaagctcgtaacaacttagtcaagaaactcgaagaaacgctacgtttctcatcaggaattaactcaatgattgaatcggccaaagctctgtatttagcaaagtcagtgacctgtactgaactacttttgctgaaccctggaatccttttaatcgcatacgcgtgcaatgcttctccgataacatcagctgaaacattccctctcgcttcgattgtagcgagagctcgtttatacaaatcgatatgaagatcacaaagatcctcaacccaccagtctctaggaaccgcctgaggtttcctcaacccgttatcaagattcttcttcttgctgtaagtataagaccattcgactttcgaagtatctatcgaagctctagaggcgattgagtcaagacaacgcccggttaacttcaactcttcagagtatggagacaaagctctagtggtttgaagcacgatgatcgaatctttccagctttggagtatgcttgagttcaagaacacctcaatcttgtaaacaagattccccttttcgacggtttcatacatttcaagaaattcagcggcgcagcgagcagcgactacgttgtaagcgtttagagtaacggtcattccgtaacagaatttagcacagatctcaaatgaagcaggaccaccaggaatctctgctatttcaatctcgtcttcatgatgatgatgatgaatctgattctcttcatttgatgatgatgttgatgttgtgattagcttctgcaaccgtgcacttttcgaaagcaacggaaactgaaaacatcaaaacacataacaaaagatttgatcaaccaaagtttcatatcaagattaaggatacacaaaagatttgaatatttctatataaaaatgtgtaccttgtgaagatagaatttgacatcaccaatgatgacaataacatctgttgctaactcacttgatacataccttaaaaaacagagattaacaagtatattgtcagatctataagctaagtttctaagtttgtattcagacagaaccaacattgtaataatcaagaacataaaacagaaaggtaaaagatgaggattagaacacaaacctaacattgtctccttcagattgaaatgaatcaggtttggatccaagtttcatgaacttcatgatgaagaagaaactgatagaagaagatatctcagaaagaagaaaaaagactcagcttgtgtgttatcactccccaaaatgcttcttgagttacacacttaaggagacaacactgtgaaaatctcacatctcaaagagaacattgaaaaaagaaatataagattttatataaaagagataaaaacttagagatgcacaaaacacccactcaaagctcgaatttactgacacacacacacagagataaactctttaaaataatcaaattctttttctctgttatctaagtgcttcacacattcacaaacgcagaaccatgtgaaacctttttttttttaatctcttatttgtttagtcgtccacaagtaaaacgaatccaaagcttgaatctttttgtggtggcgattgcaaaagcgttgtcgtttaatagtaaacctgcaagaatcaagaaaaacagagaaaaaaattgaagactgccacttattcaatagacaagatgaatcaaatcttttttggatgtttgctaaaaaagaatctaacaaaaacataacatgacactagtggcagagatcgtttttggtacaagaggactcaaaattaaaaaaacaatgagttctttctacatcaatcgattctttaaaaccctaagatcctcaattgcaaaacttgaatacaagaaaaaaaaattggatacctttttcttgattgtcttcctcagaagcaaacttgagttttctttaaagcttctcttaatcatgagacaacaccactaccacaaaaatctaatagctatataatcgtataaaatctctcttctttctctctctctatgagccccacagaaaccagaaaatataaaaaagtatgagctgttgttgttcttcgactttaaacctcaagaacgcaaaatgcgctacaaaccaagaaaaacaaaacagaagtcttttcctctcttcgagttaagcacaaaccagatcaggttgatgataaaagattcttctactttttttctttctcttaaacacaatcaaacagtgacctttcgtttaataaaaatcggtacaacttttcttctttgaaaattgagaaaattaaagaaaagaaaggagaggaaggagccaagaaaactgaatgaatgaaagaaagagagaagaagaagaaagaagagcttttttgtttttgttttgatgaatgcacgcgaaatctgacaaagcacttacttgtgtgcccccttctcttcagacaaacttaccttcttttcaggacatgttttctcctttccttttcattatctctctcttttatctctcccacttctttttcttcttattaatcacttcttttattaatatatttcatcaatcacattatttacaaaatattttagttttgtataactgtctatttttagtgaatccctaatctctcctactttgggaatcttatggatactataggatcattgtaacatagtttatacatgtatatatgtgtcaaattgtgagtcaaacaatatatagtttatatatatacgtgtgaaattgtgagtcaaacaagtatattgatataagaaataaagtcaaagagttcttaacctatttggacctaaagatatgttttttttttggtgttcgttgcagaaaatcttcttgattagattcacttcaaatttaattttgtagatcctgaaagattagtgttaaatatttgatgggtttttttttggtgttcgatgcatgtggtagccaataagaatccaatgaatgcaagctagctttaagaagttagaagtcgattcattgctgtttcatcttcacatggttttacatctcacgaatctattcacattaaccaatagatttgcctcttcggatttttaattgtttttttttggtttcccttcatcagattggcatctacttatgatcttaggagttgggtgagtcaacatgattgagatagcatacaagttgttctcttgtgcaaagttgataatatgcaacattttttttttcttttttggtcaaacatgataagcaacaaatatataaattatcaaagcgattatctgagaaatattcgtgtgattatagcaaagcacatggcctaagattgcgaatgaaaaatggcataaatttcgaagtgcgcaaaaataataaataaagtgataaactactatcaggaacaatagctaatgatgattctctttaaatctaaaatacacttatgtttattattttcacttctgaaatattatttcttatctgatatgacactcacctaatattatttttaccaaattacgcgtttacatagttaatcttactatactcatatcataatatcatgcaggtatccccgtatgcggttgatgtcatttcttctatatgtttagaaaattgaaatgattagaatgaacatcatattttttttatcagaattttctttcccaaagtattgaacgttgtgaatcgataggaaagtcgaaagctacatgttacctaattacaatatggacgagtactcgtgtgattatgggaaccaccaaaacgtggtccatgcattcccttttttagccagcctttatctcttcttttccctagctagtcttatattatttcgtactaaattcttattcttttttaattaaaattgtctgagatcaaagtgatcatactcatgatggaatctatttaaatcattttcgatccttgttaaatttaaatcgctcagtcgttaactaccgcacgattatatttagaccattgcatgttcaatcatttttttttaactccttttttctgtttatatcacatgtaataaaaaagatcttgtaggtttaccgttgttttagttttgtcgagtatgtgtgtatcaaaagtttagctgtcaaactccactttaatttcatgtcatcagcctaatgccacgatatttgagttaattggttgagttctccggtcctattgctcaagttgacattacaagaaaaaggtatatactatacagattatagcatcaatttgtatataggaaattacttatcttttctcgatcgtgtgaaaatgacagaaaacaggacaaacaaataaagtaatgggattcaaatatgcaatgtgcatgctgataaagaaattgatgggcaactaactacatcatgcataattccaaacgagttggctattgttttcaatcgtaattcgtaatacaaactcaaccaatcgagtttcgaatgtcatttgcgtgcaaacaatcccttgattttgctactatatatatatatatatatatcaccccgcacatattattgaatttctttttattttcacgtttcgaaataaaacgaaatacctaatgctaagtaaataaacatatatacaaccatttaattttggattgcattcaattttttttatatatttgacgacctcatatcgaagctatttttttggccaaaacctatgatttttatttgttttttaggttttgtaaaattaaaagttttaaatcattatatatttccaccaatatagaaaaaaaaaaaaaaaaaaagaggaatcttctggctgcgacagaggttttggttcttggcggcaatggagagcgagaggtataaaaagaggcaatttttccttttctcaaaatcgataaaatagaaaagtgaaatctctgaattgatcttcttcgcgtaatttcgctctcgtcaacagcgattcattcttctacgatctacatcgattagtccgtcctgaaagatcttttcgttttcaggtaagattctccgatccaatttataaactttattttacagagtttgttgtgtttattccctggataattagggttctaaaattctgtctttgagggtgaaaaaccttgaattggattagatctttagtgggtttgttctgtttattgcaaaagtatcgttgaaataggtggattgtgattgaagagaggttttaggttttgcgcactaagtgctcgatgaattgtctaagtcaggtgttccttttcctagaaccgctttattttgcttttctttttttcgaaactaaaaactttttgtgtcttgtccttcttgttctctaactatttggatttttctctgtctctttaatctttcttctctctgtaaagttttttcgtcctttgagattcatcaagagatacgctttttgtggcagtaaatagtcttcttttttgatatttagtgttgaattgtgttatctgattcttgtttaacactgtgttttgtagagttaagaagtgaatttgaatgtccagattttgaatctctgatctatttgtatgtatgattgtgcccaagtcaaatattatcaatgtggacagtggaggagtataatcttgttagaaagaagaaagtcttatgttgggagattttagttataagttattgtgtcgctgatcagattttacttttagttaatgatgtagaacacctacacgattacgaggtatcaacagcattctgatttgcaataaagcttgatcatttgtgaggatggaaccgcaacataccgatgatgtgttgaagtaattctcatttattcaaatttttagcttctttgtcccccgtaatctgtttacttaatttacccgttgttaaccttttttaatttttttttgtcaaaaaggcatttggagaaacagactgaattactcaaagaagctcaaaagaacatgttgcaagaactccaaaaacttgaggtatgatgaataaaaaaactcttttaatgagcttgtgatgtgtagttaaagaccagagatcgttaaacttgtgattttatcttttgtttcaggttgaacatgagacgatgatgcgtaaactctatgagcttatgaacactcatagtttaaataaaaaggtaatgctctcttcttgaacatacttttcgacagagaataacgacaggattttcgaggaccttaaagaccgtgtggttgagtgccattacgtcttgatttgatttattctcacattcttatcattgtgcttatgtattggttttgcagaaaatggaggaaactcaaaatgtgttggagggaagagaaacaattgaagcttcatctccttcaactgtaactactaatgatgaagaacattgaagaactcaactttctatgatagaccgggccggttttgggccgggattgaatgggccaaagattggatcttaggtttgaaaattttgaatctatctttacaaagaatctgcaacctatgtacatgtataaatatgtaatttctacatctaaaagcaatcaaataataatgtcataactcataaagtaacatcaattgcttgcaaaaagaatggagatcctccaattctcttggtgctcaaaacattcctcaccaaaagtttccatcttttctcatctttcctgctctgtgtcttcatcctctctttcaaactactgcaaagagggactttgcattgttccgagtctacgcaaatgcgcgaatgaagctcaagaagctgccacattctcttgcaacggctacaaccaccagggattgatcttagtttgcatcccgccaaatgtttcaatagctgctctaaaccattacacgcttgaaatccgcatgacatatgcggggtttcggtctttgttggacctatttctctgcatccatctctacatatatgaacaaaagcctccattgcttcatagagctgtgtataagtctgtatctccttctgtttcctgtttctttgcttcaagctctgcaaagacaaaattttgaaacaaaaatcatcagaaaactgtgaaagtacaagactttggggtaaagaaagttgttaagattttgtataattacattaagctcgtaagcgacagagcgtaaaagctctttttgaagtctaggatggctctctttcattgcttgccatccttcagaagtagaaacttcttcaaagttgtttagaatcattctatgacagagaagaccgagacgaggagcatcacatagaagagctagctgaaacacatcaatcacattctctttgttgagcaaactactttcgaattctgattcgcagactcgcttcaaatgcggtacaacgtagacatgtgataacacaagtagatgtattgcaaaatcctccatatcttgtttctcatagctacaaaaacagagcaagaaacaaaatgtttaagtatgtatccctaaatgtttatagccaaagatttgtaaaatccaaaacttttgctacttaccaagaagagtataagaatcgaatgaaaactcgaagagcgtggtgaggaacaccgaggattgaaatcgatttacgatgagattttctcttatgttgcttcatcattcctctgattacatctgaagccattccctaattaaagtttaacagataaaacttcattaagattcaatacaaaaaacaatgttactgatttttctaagcattggattagagaacttacgatgacattagaatgtgcgtaaatcaaaccattatcatcagtatgaatcaaaacatcagctccatgagcttcgtcgaacatacgatcccatgaatctctcgtagctttagaaacaaagctattgcttctttgcataaacagatccgttgacttcttcattggaggaggtggtggtggtggtgctaaaacattctccggtgagaaatcgtccatgttctccatatctcttctgtaacaggttagggtaaaaaaaatcagattcagaatctgtatgaaaatgcataggagatcaaatattggatctaaagaaagagaatttaacaaattttacgaatttcagttttatagatctaagaaaaaaacacagaaatattgacgacttacagattttaaaattggatcagtttataaatttggtcaacttcaccactaaattataatgattgttctgggttttatccttatcctctgttgataatatctattatcttcggaatcaaaaatgggaaaatttgccgacgaaacagcggagaaatgagatgtgttgtgtgttttcaagaataggaaaataagagaaagaagagagcaaagcgagcgggagactatttataatggtctaaattgattaattggtggaaaatgtgaacacgtcgaaatgggacccacacggagaggatcaagataagtatttgctgattcatatacacgtcggacgaactttcctaagcacacactttttttagttttattctatccaaaaacaaatatatgccttcacattatatccaagtctttaatcaaatattggcctttatccaaatgttctgctttatatttaattatccattgtatagttgttggcgacgacgtatatttggaaaaggtacacacatttcatattaagatgtatggttgtgttaatggatatccattaattagtcctacaatttacccttttttttagtggattgatggtttcgacggtgcaaattagagtaaaacagataaaacaaacgacataaatgtagttcgtacataacggatagtataataagtaaaacgagtaaaataaaagtttagtaattatgggaaattagtattccaattttgactattttattaattccaaatacttaaaacgggtattttagatagtgtctgatatatataactaatcgacaattttttttagaatcaacaaaatacattgctagccgcatttgaactaccgtattttggggttggtgtacggtccaagcggttcacaaaacatggcaaaaagggtaataagttgcattgtggataatacgttatcgatattgattaatatgattataaagtctcttctatttaattagaatattctacatgtttgaaatgaaccgtccaaatatattataccatgttaaatgtcagcggaataaaataaccttaaattattttatcagggaaaattaggtctagtttaagatttggtaatactaatactacagtgtcagatcctagtcatgtatttgtatataaaacacatgataaaagaaggagtcagctaaataaatgttgagctcgtccatgtttatattcttataatgaaatgatgatagtcatgtaatggtttcgttttcatgaaattattatcttcgtccaagttgaaacatttattgttttgaaacaaccattcatcaacccacggaactgctacgagccggagtcgcaccatacccctttatgcgatgggcaatgtaccatttcaaagaccgacaaagattaggtaagattgtgataggtaataataggttatggtaatatctttttgtttcatttgttggattatgttgtgtaaaacgtcacattgcctcttcgcgacaaattaacgatttaaccatagagtatacgaaaagtatgattaaacaaatgaaaaagcggtaatttaataacgaaattattagtcgctgactcagcctcaaaaaataatagagctcttttgatagatacttggtcacgaatctctcaagttgctggcacgctcacgctgacctcttcatatagttcatgaggcactttctcttttacgattgctaatatgacaaattaggggaaattattaacaagtacaacaatcatgcctataacagctccatcactaaaagtaaaaactaatttatttctgtgtccgtgaaataaataactatcgaatatgtctaaacacgtcaacaaattgattgtgttttgattttaaaacgtgtatgttcaacgtggtctattaaacaactgacattttattcactatttagctaatttatctatcatcatatcaatacttgtagagttgtcgttgtagaaaattaatgaattgtatacactttgtttgttcatttttttttttttttttttgtgcgaaagttggttttcattagaaattaaacatttaaaccggagtcaaccgggtacaaagacgaaattgaagcaagacccaattttgaaagggcatctgcaagtcgattttcatttcgagggatagagtgaaacctaacaaacccaatctccgacgcgaggaggagaatatcgtgtaggattccatggagctccgttaatggagttctcgaggtgatggctttgatcaactgttgtgaatcagaagcaattgacagagaggtgaatccaagatctttggcttgctgaagagcgagaagcatcgccaaagcttcagctgtgagggccgatcttatgtttcttgctgaggaatgggtatatttgttaatttgtccaccgatcttatttctgtgtccgtgaaataaataactatcgaatatgtccatcgatatattaactttgtttgttcatatattttggagtaacaatgtcaatgagtaccctctagcatatatttttttttttttgggcaaactctagcattgattgataaagaaaaacagattgttatagcatggacctcagttatgtagaccggctacattggctacattattacacatgggtcactctcacttatatattgggcctgtagaaacattttgataaagatgggtcttaccttataataagttttaggcccattattagtaatatcccgaaatgcttaacagttaacactcactattacatctacttctcttgtggagaatggagatagtcgcatactatagcattacaaaatttaattttatctacgaactttcgcaattttcttttaaatctatagcaacgaactctttttttaacaaaaattgagtaaaaaaattatgtatctgatttcgtgtcactgtaataattagatgttataaattttgtatgatttttctgttttttttttgtcaaaataaaaacaattatgtatgattgcaattaaaacagaatcaaaacttatgtgtattaagaaaatatgtttttaaataaggagggccaatatagtgtagagtgtattcaggaaacgtaataaatagtatacggcgaagcctcttgttgttgtttgtaacgaaatgggaattgctttcttgtcttcttcatctaataaatattcttatcaaatatacaacactacaagcacgaattcgttgcctttttcttgttagctgttacaattcaatggcaatatacatatactatttcctccaaacaagttagatgagattttatataaaaaaaaaatgtatgtgtaacaattaaatgagcagtttcattactctaaagcgtgaactagagttcacacgagtttcaagacttcttttaataattcggataagctgtgatatgtacatgtacttttttttactattactactcatcatatatatagtgaatcaagcatgaatatattgtcgataacattaatggttatgtaaattgcaaacagtacacaactaacacaacggatatgaatcgtaagagttaggtggctgatcattttgttgtactctattccttcaacgaaccattttgtattacattttgtcaattatataattttatgagtatgtgaaagttaatatgttatattcaattattcatagagttttatattctcttgctaaaaccatgatgcttcccacctaacacttgttagtcttttatacaccaaaacgtaaatcgaaaaaagaaaaaaatttacttatccaaaatccaagctgtaaccaaagttataaatcggacacacgtaaatagaaatatttggtcaaagtttgactgtcttggaatcgtaaaaaactttcacacagtcaaaggttccacttagatgggcaccaagccccaaagaaattcaacacatggcacagactatatcgtcactgtaattatttattttaaaccttttttactcttataggaaacttatctagtagtgacatgatatcataatttatatttatatcatatagttttttggattgttactagttaggcagaggtggagcgtcttcttcttcttcgtttctgaggcaatccagcctttcgcacgtgaccgacgctcctccactgtagttattgtcacgtgcgccatcattccaccatcaatttttttttatatattatatcatatttctttcatgtattattcaacatcatacacaattgatatttgatagtgttatgtcttttttgtccatagagaccttcttgtggaaacagagggaccgagtttctttgtttttgctagaggatgaatagactaatacacacctcgaaaggaatcataagtagattggaaaatattgtgtgtaacgtgtgttaggtatcctagatttgttagttcattaaaaatgtgatcaaattatatttggttactaactcttttttttttttatatgtctgactgttaacccttcttaactcttaagagttcactatgttcaaataggagcatttattttcgtctcatttgctatatgtaatgtcatatttagttaccaatattacattttattttccacataatagtaattttattaaatgcgtgaaatagaccacaaaagactttgattccttatcaacaagggaagacaatcatagaaagaaaagcacgagaaaacaaaaataattttgtttcaccaaaaaaaacaaattagacatagatattcaccaagcgagttagcctaacgacccaaaacttgttttgaagtgataaaaaaatatcctgcaaattcatcatcatcgttactaatttcggtcaatcttggcaattgcagatcacatcatctaaattctaaaatgatgaaatgcatttttcaagttattgtgaaattggtccctcatcttgactacatacaaacatctcagaaaaaaatttgtaacataatgtaatcattgtatatatatacatagaaatgcacaataatacaagtcagaagttaaaaaaaggaaatacaaaaataatctgtaaaatacgtaatgtgagaatattacttgtatctaggggggagatcgaacaaatgctgctgatacttcactaacatacacataaaagttgcagattttggatcttgcgtcttcttggttttatacccttttcttacatctagtcttataaatattaatactataatagaaaaattaattatcctatatattgaatgactcggctccaaagccatgcgcctatatatacaagtctttttattttttaaaaaatttgtcaaaaaagggaccagaaacatataaagatgggagcctcatttgctgatggataaataaatatttatttgattttaagtttgttcaagactaattatagtacaaattagtaaattgttgttctttttttttcttaacatattacatattgtatagtataattccactttcatccaattggataatcagttataattcggatggtttacgatacatcggattctgctttcaatttttcttgtatacatcaaaatttaacacatgataaggttttggaacccgctaacgagacctacctatttttacaataaatatactcattcagtatttgtctatatttctacctacaatctatgtgaatttgcttacgtatatctactcttcttatctacgtactgtataaattttcatacacaatcttcgtgtctcgtaacatctactacatgagtcatatacaactttctcacctaacatggaagtcattactcgtaggcctaattactcgttaccgtgaatataactataaaaagtgaggaaacaaaaagatttacggagaagaaaaattgaataataattgcaatagaactataggaaaatttgtatatgacttagcaaaaataatgatatggaactaaattaaaaagttgagaggattttttttagtgggaatggtatggtgtttcccccaccaattcctaaaaaaaacttattgcaaaattgctcttttgatctttattttcttccattgaaaatgaatttctaggtctgaatttaattgaagtcaataagtgggaaataactaaactagctattcctctgttttctgttcacaattctattttgaataaagtacattttaattcaaacctcttaaaatagaagttactacaaaagcaacaaagggggtggtacgtggaatacactaatgagaaatgttaataagaacgttgtatttggaatgggatttaactttctgcacataaatttcaatgggatcattattctttcctaactaaatgattgatacaaattcaaaggatcctataaatcttatctcagagaccgaaagaaaattccatttgtacaaaacaacaaataaatagaagaaaaagtttgatgataacattcttaacagaatccgtgaactttgttcatgtaagaaatctagagtgtaatcaaggaagttcaacaggtaaaaacaatgacatttatatatggacgttcttaaaacgtgtaaatctcatatatttaagacagccacaatagttctaaacgctctccattcctgcattaagtatttatttctattaataacatttaatttatcaataaagttcacattatcatagacaactccgaaattaaaaaagtttttttaaaataaatttgcttaaacttaaataatcaacaaaatacaaaacagtttaatggaaatagcagaaatctttttcaagaaaatacaatactattagataaaaacaattttgttaaattaaaaaaaacccataattgactagcatcaaaaagtcttcaaacacaagtaatcctgctggatattaaaaaaataaaagagtaatcattcctttaaaaaatgtgattatttgtcgacccaaaaaaaaagagtgatgatattatacatatactcaaatattagtgaacaaataaaacctaaaattaatcaaataataaagatttttaatttaaatgtaaccgctaaataacgccccctctctctcccccacttatttttggcggcaccagacgcgggagactctctctctctctccactctctctctcttttttctttgttttttcgtcacttgctcctaaaatcccaaatcgagtaatggaagaaaaatcaaatacgatgatttagcttcccttcttattcttcccctatattcactgcgataactttgcctctcatctcataaattaaaaaaaaaacactcttctcacaaattctttataattccccttttgatgtgtacggacacaccaccgaagcagaagcagaagaagaagaacacttctatctccgccgccgccgtcgtcttcatcatcatcgccgccgttaaatgggtgagcctaaagacagtctcgctctcttcctctgccacgaatcggagtcttctctaaacgaagacgacgacgagacgattgagagatctgataagcaagaacctcactttactactacgatcgatgatgaagattatgtggcagaccttgttcttaaagagaatctccgattcgaaaccctaccctctaaaacgacgtcgtcttccgatagattgattgccatcgattggattctcactgtccgtaatctcaaaaagattttcccttttttgatctttgtcttaatctctgattgattggttctttgtcttaatctcagacaagaacaagatttgggttccaacatcaaacagcttacattgcaatctcatacttcgatctgtttctccacaaaagattcatcggtgtaagtttcaatctccagtttcatttatctataaaaatctcacctttatcttcagattaaagcttaaagatggtttctttgtagttgcagaaagatgaaacatgggcgatgcgattgttatcagtagcttgtttatcattagctgctaaaatggaggaacgtattgttcctggtttatcacaataccctcaagatcatgacttcgttttcaaacccgatgtcattcgtaaaactgaactgttgattctatccacattggactggaagatgaacttgatcactccttttcattacttcaactacttccttgctaaaatctctcaggacaaccattctgtttctaaagacttggtgttgttaagatcctctgattctcttcttgctttaactaaaggtaactctattaagaaacacatttttttctcaagatcaaagcatttattgatatcacatttttgtttccatgtagagataagttttacggagtatcgacagtttgttgttgctgctgttactacattgctagcttcttcttctacctcatcggatattagattgactagagaagagatagctaacaagtttggttcgatctcttggtggacttctaatgagaatgtataaatcttggtgtctttttattcgattttgattgtttgatgttgatgatcataatcttaggagtgttgggttttgtaggaaaatgtatatttgtgttatcagagaacgctagagattgaggagaggaaacatatgacacctccaccggaaatagcggtttctcgcgaaccgccggcttcaggaagtggcgctaaacgccgattgtcttttgatgattctgatcaaagttctccaccagccaagagaatgcgtaggctatgaagagagagtttctttcttcttcaagttttggcttatattgatttggtttcttttttggcaacatattgatttggttttatattcaatcatttgattatagagaaaaaatggtctgaatacatcggttatttcaatttttatgaagtaactcatataggttcttcgtatgaaggtctttggatttcttggggatgaaatgtgactattaaaacattaggggcttctctgagagaatctaggaaatatgaggagtgaatgtaaataaataagaaaaacagaaagggtgaatagttttaggccaatagttgcagtgccagtgatttggtttcacatcctcttttatttttttattgtcttatttttttatttgttatgttgcaatttctttttcatttgatattacaaaattttgtcatagatttttttttttttttggcatcaaagtccatttttttaacctctttaactttcaaaagggctcattcatagcaaataataaatgaaaaaactctttttaaggtaaggtaaaattattttatatttgataaatatatttattttcttatctttattgacacttttggtcatctccaaagtgaatccatctgtatgctactcaacatgttatgtccattccacaaagtccttcgtgatcttttcatgttctcaaatctcaatatataatatcttggaaaaaaattaatcaaataaaaagaaaattttcttgtttaggaaaaatcatcgttacttatctttgatagataactacttttacgaattgacaatcagtcgatcacgataaactaaaacggatatatattttgctccaataagttttctttagcattatagaaaccaacaacttgtagtggaactgtggaagtactttggatcaatgattggatctaaagatgaaaccccaatttatacagaaatttgcatgtgatgtttttaagttaacgtactattctacgcgcaagtcaaaagtgcatcgtactcgtacatatagaggtagattgttttttttgtgtgtgtttataggattattgttaatattttcaatgaaatgcagttgagaaaaaaaaaaaaaaacatatgtgtaatagactgaagaaacaacaacccaacgacttgtttaagtgagaaacaactgtctcatacaatacaacttgggatccaaagttttggttccattaattaaagctttaattccaaaatgattagcaacgaattaaaagacttattacaaacaaaatgcattcttacaaattaagaagcataaagtactgacagaatataattaaagataatgtgtgtgtggtttaaggccaatgttttgttgctctaagagattattcaacaaatcaagaagcataaagggtcaagctttacttcaccaagaactagttaatgcttctgaattttctgttgcctatctttcaatgaatattagtatgtcccaattgttattttttttttttgcttattatcattgagttaaaccattttgtttctgttgggttttgtgtagacatatgtgagattcacgggtaacacaatttagttacaactctcactttggttaggagatggataaactaatgactagtgagattgaaatatcacaaaaataactaatctttatgtaaattctattttcattctagatattaattagtcctttatttatgaacatttattcacacgatcacaaacttaaacaattagttatagaatattttaccggtctaatgttcacatagaaattataatttacctatacgcctacaagggacaaatgactatagtatactcattttttcaatctaaaaaatggttttacttcatagagatcctaaattgataacatttaaaaatgtttttttcttttcttaaagaagagtctttcttatttattacagttttgagattgacaggctttggaattgttatatggaatcagttttgactgatgagatatgatgtcaggagaagaggctcccactaaaagccatgacttcattgagagattttctaagtatatcaaattacagtctggctagataacaattttgtacccaaataatcatttttcttattttaaccttttgcttcctctgttttttcaatgtcctttttctgtatttttgcatttgtcattcaatagagaccaaatttagattccaaaaatgagaaaaagaaagaaaagagaagtgtcatttcaaagatacagagagttttacaaaaatggaggaaatcagatatttgtccttaatagcactaatcaaactgaaaaataaaagtcaagaataaaaaacagagtcattgcataatgcaaaaactttgttagaagacttgtccgttctaaactttgaagtaactggtctaatatagagatctttaaagagtggtttcgagccaattttgatggaacgatcaaacgggaatcgtcttcagtccagcggcgattggcatacccaagaaacctatgaagatactgaagatccattgtgttattgtgagtggtgttgtgcttgcaaatgtgcccaagaactcgatgattatgatctgaaagaaaaccgttgcaccgatcacaaccacaaagacgtaattgtccagtattcctttgaaaacatcgatctcttccatctctcgcgagcttatctcgttaaacacctggagttttcagaaccaaagtcatgtcaagaatctatctttatagctcgagtattgttatcagtaatctttgttctttacctgacagaagacgaagcagttgaagataagagtgtttaacatgagagttgagtcaggaccgtcgagaccaaacatagccttccctttggcttggagaatccaaattacgatgaattggtaaacagcttgtcctaaaatgttcctccacatcgcattagtgatgaaattgcctctccttccaacaggtaaacgcttcatcagctcgtcgtttggtggctctgtagctaaagcaagagctccaagtgtgtccatgatcatgttcacccacaacaattgaacagcagttaaaggagcacttcctgaagattatcataagagctgtgtcaaacaaggaatccaaaatgattcttttcgagacattgaattggtattcttactaaacctaccggttaaacaagctgaagagaagttaacaaccagtgcaacaacattaacggtaagctgaaactgaacgaatttctggatgtttatgtaaacagaacgtccccatttagcaactgtgacgatcgtgctgaagttatcgtcgagaatgatgacatcagcgctctctttcgccacctaaaaggttatacagatagaaacttttagattctttagctctcacaaatgacataacaaaatcttatcatatactcacttcagttccagcaattcccattgctagtccaatatcagcttcatgaagtgcaggtgcatcatttgttccatctccagtgacagcaacaacttcatcaaacgttgtccttaactgtttcacaagtgtatgcttatccattggtgaagaacgagccatcacctgtataagaacataggaaaggttatgtttcaaaaactaaacaaaaaaaattaagtctttagttcatgaaacaaaaagcacctgaatctttggaatcagttctagtaactcttcttgattcttctctctgaatacgggaccttcgatggctataccgtcatcagttaaaatcccacattctctagcaattgctttcgcggtgttaatgttatctcctgtaaccatcctcacagtgattccagcacggcgacaaagctcaacagattctttaactccaggacgtacgggatctttgattcccacaatccctacgcaagtaaatccagaagccgggattgcatcatccggcgaaaacccgccttcaatatccatataagcaaggcaaagagttcgaagagcttcattagcaaactcgttgattgtaacattcagatacttgattgattcttcatcaagtggaacaacctcaccgctcgagtttacaactttgtcacaagcagctaaaacaatctcggaagctcctttcgtgtgagcacgcatacgtcctccctcaggaagctcgattacaactcccattcgcttctttgtggagttgaaaggctcaactttgatcactttgtaagacttcctctcttcttggaacttacctccaagagataaccccaactctaatatagcagtctctgttggcgtccccaaaagctcggttttcccatgtttgttgacaacaacttcgcctcctgtgttattgaaaatcgattgaatcaacaacttcaccgcagattccgggatttctgattgcaagctagaacctttatttgctacatcttgcacattcatgcaaatgcaagacttcacaacggtcatgtgattggttgtgagtgtaccagtcttgtcactgcaaatcgtcgttgcagatcccatagtctcacatgctgctaaatgcctcacaagagctttatcgttcatcattttcttcatggcaaacgcaagacttagagtcacagctaaaggcaatccttcaggaaccgcaaccacaacgattgtcacagcaatagcaaagtattccaagagctccaatgcttcatcaccagaccagacccagtgagttcccgttgaaagcttcctcataaacattccttgcaccagaaccgcgaaagtaaccaccgcaaagaaaagaccaattttgccaatgatggtagcaactccattgagtttcacctgcagtggagtttcatcatcccctccttcggtcaaagtcgccattagctttccccattgagtcctcatcccaactgtagtaatcatcatcttacaagatccatcttgcactttggttccagacataaggaaaggattctgcgcattcaccatcacaggctcactttcaccagtcaaactcgattcatctatcaccacagagaatcccgagaggaaaagaccatcagcaggaacctgatctccaatcgccagatgaacaatgtcaccaggaagcaagtcgtaaatcgacagtttctgtctaaacccgttccttgtcacctgaacagtgatcttcttcttctctttatccaaatcacggaactgcaaagactggcggtaatcgctagtagctgtaacaaacacaaccaagagaatactagccgcaatgccaagaccatcatgtgatcctttaggccatccttcagtagctatcccaacaatcaaagacacgaaagcacaaacaccaagaatcataagagtcatatcctgaagagcttcccatacaaacacccagaaacccctcatttcgctctctgcaaacttgttgattccgaaaagctcttgcctttgggataactgagcagcctcagtagaaaggccatctgtgggagatgccttgagcttacctgcaagcccatcaactccaccatggaacttgagcttcttaacatcatgactttcaacaattgatcctaattcgtcagcacaaatctcaaagccagcagctttgacatcttcagggacagtgtagtcacttggagaaacacctacaacaaaaactcacataaacaaacaaacaaacaaacaaaaatcgaaactttgacacaaatcagcaactttgatcacatataaactcaccagagataaattggaaagcagctttggaaacaagaacagcgatccttaatttctcctgtatatagaaagtttttaagatccttcatcgctatacacaaaatccatctaaaagttcgaagatttcaacaaaatcattaacaacgatgacatagaagaaaaagaaaagagacaaaacctggttggtgcgacgcatcgcggcggcttcatagcgtttagagagattagcggtgaaacgaaaccgacgtttagggttcttaacaacgccacagagattacgccatttctcaagcacttcctctgaagaatgcttcgctttcacatcgaaattctcgtttaggtaactctccatcttcttactccctcttcttcttcaatctcctctgttttttttgtcttccagcttcaatggcttttttgtttggctctctgtttcaaattcttctgtatatttggtggagaagaaaaaaggaacctttttattttttggtgggtgaagaagagaaatcggaagcttttaatggagaagaaaggtaaagtttttttttattcaaagatctgagttttttttgcttaagcatttgaccgagtcgttgagtttattaacatttggtgatgagaagctgagttgactcgttttaaattcgtgtgtccaacaaagtttctcttacatttttaataaaaacattcgacttattattgaagagaataattaaataaagacatgcactactttccatttataacgaacgttaaatcattcttgaaacattcatgcaggccatgacgagtacattacgcgtttatgttattattgttgagtttatgattggtttttattcccaaatttgtgaatgaatgtggacattttataattaaaaaaattagaagattacagaaaaaaaaaggtttaaaaactagtaaaatactatggatgagtaaatgacgtaatttttagatttactcaatataatatatactgtatagaaaaaaatggaatataatatacagagagttttaattggaccatattttgcaagatttttctaagaagtttacctttcgtagctttggttttttgttgtttggctgctcacgttgatttcactttgaccaaattgaatgacaattgtgggacaaaagtgcggtgatttttgacaataataagaaatggggtcgtttatataaataaagagaaattggaggaccgttgacccagagactattgcaaaaaacccgacacttcggggacgccacgttggaccaagcccattggttctatttggactcaaaaacattgattgctttatgtctttttattattcgtttggtactaattgcttatgtctctgttcatcattctagttcaataactagtgttttttattcttctccaattgaataatgcgtttaccttgacttcatggaaaatgacactttcaaaaaagttggacatgcagatttgggcttagaatgggcctttataggccttgaaagctattaagatctttctttacacggctttgtttgctttattggcctttagggcctaacaaattttgggctctggtatatgtttgcttctctaaaatatttgggatgcttttgagaaagaaaaataaacaataaaactgttaatcattttttttctttaagcgattctgctgagttatgtgttggacaggcattggaacagctgtgggatgacgttgaagttgctcgtgtggttgtggtctccgattgtcactctgccatgggaagctagttcgttaccccataagttgccaagattctgtgatctgctggataaaattcacagtttagccattaccaaaaaaataaaaaaatcacagtttagcaacggttttgaaggttgtaatttcacttggtcgcggttcggactgatgtcactgctcctgctatcgctaaaagtgtgactagggaaggaaaaattcagttatatatgggactaagaaaaccagcttggtttcatattcaagtggtggacgaagttcgttgatgagatatttgttgtgttacgaaatccattaaccaaataacattttgcaatcataaaaagttgtttgaaagaggtctagacgtacgttgatgacccataaatttgtgtaaattcacaaatatatatttttcggatgattctacacatatcatatcaacctccatgattttggtatgccgtacaatttttaaaaaactttagccggtgtcacttatatgtagttttagtgggaatagtcatgtcaaaattattattttgagttaggtttgattgagttggttctaataatgtatgatattttctacatcatttgctctacattgttccgatttagattttacaaaatggtacgaaattggtcacctaaaagtctgtttttttacctttgtgtgattgatgggagacctacaggttttttttgtctatggcttaattgaaggatagtagaatatttttgtaaaaatatttgatcatttcattactaatcgaaaaagataagttaacggttcatttctggggctaaacaatcctaaccatggggaagatgttttctccaagtatataaatcttaattagcatacaggcatgcataacaaccaaattagcgaatgaatatgggtttatatgcgagaaacaaattagggtctactgtatacataaacaatgtaattatgcatttatgctatggctgtttggtgttgtgtataaaacatagtggcacatataaccgaaattattatcgactatatatatatatatatatatatatatatatatatatatatattcttcaaaagattaagatgggacttttcctagaatgcaagaacagatttcgagaaattacataagaaactgaattgcaacactcgataggtttcgaagaaagggacaaagaagcagagcgtggggtttcttctaataattgtagaagaaactgatcatgagaacatttgatctaccagagatggtgatgactcataagatgtaaatatctactgcattatgtctagcctaggctataatgtagatttgatcactttcttcattaattagtttggaattttagcatgatatagcatatatctaaatatgtccgaaactttcctacatactagaaaatatggagagttatgtaatgtaggtttgcttgttaatatacaaaataacatcatcatttagtttttagattttttattttattttttataatggtgctacgtacgtggcgatcaaattattccaattttgagacttcgggattttaaacgaaattaaacaatgggcatgagctcggggggatagacaagattaatgctttgtatcgagacaaacgagaaaatcatgatgagcctatgcattaagtgccgttggttaattagaggttcgcatatacataaaccagtagacatatggataaatatgaacacacacaccaaaaaagtgggaaatctaaataagtgtagagaataataagtcctcaggtgggagattcaaagagaggacaatgaagggtatatagactctaaacaaaaatggcatgacttagtggagagggttttaaattgaaacaagtaggattgaagaacaagaaaacaaagaagcatgccctagatttctgagataataattacacattgctgtttatataaggtaagagaatatgacacattggttggtttcttacgggtaaatgtgaagaaaaaaaaatagtaatatttgagaaaatctaaaatagtaaagaggtatatatggagaagaagagagaaaagggaaaaatagtggcagagaatggagagaggttaggaggcaaaggcaaatgtggagctttgatgatgttgatgcacgccgtcagcttttcttcacgcctgctcccactcactcacacctatgaacattctctctctattttataattatattcacatgtctctatgttactatgtaaatggtgaccacttaagtatttatatatcatgtatatatcttataggtatcatacaaaatggtcatgaaacttttgcaatttcaatctacttgttcattgtagatgctagcttttcacatgttttgaaaattagtctggatctgaaattctttaattagcattgttttgttggtcaacgtttaatttcttgattattgatgtcaaaaattcagagcgttcagaactcttacactaatttcttaaaaataatcgattaagagaaaatagagttttcatgcaccagtgttgatagtaacgtagtcgcggaatgtctaaaacgattatgagtttggtgttttgattggttagaattggtattagtaggacattctaacttttttgttagtctgttgatttaggatgcgtaaagagtctttttattttacaccagttgagacttgggatcgatagtacttgaaacacttggttggtttcatgtatttggcctatatataaacaaacatcgtaattatatacggatttttttcggaattttacgccatatctgtaagtatatataacatgcatgtcgttttcaaattcatatgatgaacgatccacgtaagtgctactactcctacaatattgcatgagagagatatgtatttataaattttattttgaagaagaaataagagggaaggttacttgggtggatcgatgtgaaaacaaaagaagaaaaagcgaaacccactaagccattacatgatatcgaccttcttatctttttcctctttattttatttttctcaggacttttttctacttaatgaaacctccaaactatctaactaatacactcccatgtagaataaagaaaattatataagatattgttgatattttgtaactagaaaatatatttgctctgtaatttttcgtaagttaaatcaacatttttcagtagaaacaaatattactgcaaaaagtaggatcattatttttgtccaaaatctcagttagctatagggttgtagtaaaaacaaaacacattcttgatttgccccaaaaaataaagagagagaagaatattgttcaaaagtggtctcttctctctctaattatgttttcactaaacccaattagattcaaacagtctacaaagtccaaaagataaacatgggacaacaattcgatgcaaaaaatcctcttttcatgctctttttttattctctagtcttttaaattactaataaaaactcacaaatccaccaaacccattctctacaactcaccttcatctagatttacccactcccaccgagaaacacaagaaaaaaaatatacatatataaatatacaagacaacacatgatgctgatgcaatatacacaacaaagtattaaatcttagatattgtgggtctccctttcttctattcattttcttattcattaaaaaaaaaaaatggatactctctttagactagtcagtctccaacaacaacaacaatccgatagtatcattacaaatcaatcttcgttaagcagaacttccaccaccactactggctctccacaaactgcttatcactacaactttccacaaaacgacgtcgtcgaagaatgcttcaactttttcatggatgaagaagacctttcctcttcttcttctcaccacaaccatcacaaccacaacaatcctaatacttactactctcctttcactactcccacccaataccatcccgccacatcatcaaccccttcctccaccgccgcagccgcagctttagcctcgccttactcctcctccggccaccataatgacccttccgcgttctccatacctcaaactcctccgtccttcgacttctcagccaatgccaagtgggcagactcggtccttcttgaagcggcacgtgccttctccgacaaagacactgcacgtgcgcaacaaatcctatggacgctcaacgagctctcttctccgtacggagacaccgagcaaaaactggcttcttacttcctccaagctctcttcaaccgcatgaccggttcaggcgaacgatgctaccgaaccatggtaacagctgcagccacagagaagacttgctccttcgagtcaacgcgaaaaactgtactaaagttccaagaagttagcccctgggccacgtttggacacgtggcggcaaacggagcaatcttggaagcagtagacggagaggcaaagatccacatcgttgacataagctccacgttttgcactcaatggccgactcttctagaagctttagccacaagatcagacgacacgcctcacctaaggctaaccacagttgtcgtggccaacaagtttgtcaacgatcaaacggcgtcgcatcggatgatgaaagagatcggaaaccgaatggagaaattcgctaggcttatgggagttcctttcaaatttaacattattcatcacgttggagatttatctgagtttgatctcaacgaactcgacgttaaaccagacgaagtcttggccattaactgcgtaggcgcgatgcatgggatcgcttcacgtggaagccctagagacgctgtgatatcgagtttccgacggttaagaccgaggattgtgacggtcgtagaagaagaagctgatcttgtcggagaagaagaaggtggctttgatgatgagttcttgagagggtttggagaatgtttacgatggtttagggtttgcttcgagtcatgggaagagagttttccaaggacgagcaacgagaggttgatgctagagcgtgcagcgggacgtgcgatcgttgatcttgtggcttgtgagccgtcggattccacggagaggcgagagacagcgaggaagtggtcgaggaggatgaggaatagtgggtttggagcggtggggtatagtgatgaggtggcggatgatgtcagagctttgttgaggagatataaagaaggtgtttggtcgatggtacagtgtcctgatgccgccggaatattcctttgttggagagatcagccggtggtttgggctagtgcgtggcggccaacgtaaagggttgtttttattttttcataaggaattcgcaagttcgatttttacttgagatggtttcacacgtgtggtgatggttgatgatgggctttgagattgagagagttacgattatgatgataatgcagttcataatatgaatttggattttggaataggactaattaagtaattctgatcattgaggtgggtatcaaggttcatacaattcgtgattttttgttttgtctttggtatttattaattttaaaaatccattttggaatgaaatttgtgattacttttgtttatccgaaataatagggtttattttcctctataatgaatgtatggttctatgttacacgaaaagctcaaaactagtaagtgagtttctttctagatacgtgagctttatatgtaaattagttactgttacattggaggatcattgaactactggaattataatggtggaaaaatatagtataaatgaataagactagcaataaatatcaaattcaacaacaactaatactgattaagttctataattattccatgttttttttgttagatataatattccatgtttctaataaaagcatgttcactacttcacttcttctcggttcgtgaatatatataaatagaatcttaagacagctactttggttagggaatctcttagttggaatctcgtgaatgcacctctagtggcttgcacgcttctgaaatgtatattgtcatgcttttgatcattcataatcgatcttattaaggtatgtttacatatatatgatcctagtgagcgattaatattagaggtgaacagactctcacacaagaaaggcttattttacatttatacattatcaaactcaaaacactggaatatacgattagacctcaaaaatactttctcaactgcatgcatcatctgtgttttagtacaatattattaggctaaacatggatcactaatatgagccaactaaccgattgaatttggcgatgctatctaattgcaatattcacttattggtaacggcctttgttacaagaaacaaagacaaaaaaacaatgttttatacaagaagattaatttcacaacattatacttattcatttgtcgttcttgagaagtataaaccattaatatatattgcctttttaataatggctctttcaccttttgctttataaaagagataaagggaccagtcttttatttgattcatacatatataatgttattatgtcttcaatggattacacatgcatatacctacgaatgttcatggccccgcttacccatcatgtttttatttagaaaacagcccataaaaagtaaataattgaaataaatagttaaatccattgatactaacgtttatatagtattgtttttttgaattataaatatgaaaaaagtagtgggaactgcttttgagatatgtggctggtttcactacaactcctctctccctgcatcttttgatgaaggcttttgcctcccccatgttaatatcggtacgatctttttagcttcgctttttaagctaatctttttataacaatttatcttcttttggtctgttttcttgtttataaagtcatgcaaaaagcaaattagcgaaataaaagtctattgcttggcccaattttgctttaactagaatcaaaaccttgttgggtccccttgtaccacgacttgaccattacactcatctaactataaaatgcctatattcataatcatagggaatgtctatattaatcctatgaagtttaggttaatttatttaattatgagttcaaacagaaaaacttgatttcattagcttaagtagtctttatgttcccaaagaaaaaacaaatattcaattttttttaacatatatatatatttacttttttcatccttttagtttggttgggtttgatttgggtgcatactagttgttttcgttatgggccttattatgtgggccttagacagcccattttatttgacgagcaaaaagtaccggcaaaatgaaatgaaattgaacggacggcgaaaaccctaacaaaaacctccattcaccggcgaaaatgcgagctccgatctccggaattttctcgagatctctcggttacctccaccgtacgacgccgctatcctccgctactcgtcacctatgcgccgtcgcttctcccgaagctcgaacgaagaaactcgagcgaatcgccgacgatttactcaaactgaatcggattgagctttacgattactcactcctcttcagccataaaataggtctcaatcgctacggttccgccgtagctgttaccggatctgtcggcgacgcgtcagcttctacggagacgaaaacggcggagaagactactttcgatgtgaagcttgagaaattcgaagcggcttcgaagattaaagtgataaaagagatcagagcattcacggatctgggattgaaagaagctaaggctttggttgagaaagccccagtgattgtgaagaatggtcttactaaagaagaagctgagaagatcatggagaaactcaaagcggttggtgctattgtagctttggaatgaaactgagattgagatcaaaataagtattttgaatttttcgaaatcaaacaatgttgaaagcttttgagaattatgaatattgattttacaatatggttctgtgtgtttgcttaatgtgtgtcatcttcttgcttagattctcataactgaaatgccacttctatcagggattagcttcttcatgtaatactttgaatttcttgaaagattgattctttgtcttctactctctggtatgatctctattgagcattcttggaaccctcgtctcacaaaccaatccgctgttcgcgttgtgagtaggaacagcttctctaacccgagagatgaagctttcttctctatgtaatctgcagaaatagattgtgttgttgcattgaggttctctggctttgctttgcaaatgtaacagaaagggtttgagtttattcaccgagcaatttatcgccttggccttgaccgcgacaatctgatgcaaccgcgattgcagcaacttctccgcatttgtctttgaagaacggaaacaaagccgcacaagcgatgatctgtccttccctttccacaaccacaaatgaatccaaagctcgcagtaactgcatttaaagatcaaaccctttagcagtgtttttaaaccgatgaaacaatgagatgttgaagatagtaagggttgttacctcctcatcagttctgcgaactaaaatccctgattcctccaagggtttgattatatgtctaattcctgctagatcttccactctggcatcacgggttccttcgtaaacatcactgcacgtaacaggcaatatagaattgtaagaacacgaaaaagccaggagtatatgcgagtgaagacgaaaagaatgaatgtacctagcaaccatagttcccattccatctcttttgaaaagctccaacaatagaactccacttatagtaccatccaacaagtgaactcttttgactccacccttcataagggaagcaaagcaaacggtttcagtttaatggtggcaagtagaatcaagaccaacgtttaaaaagcactcactctgcagacgaacgccgcagcagccaattcagaaagataaccgtttaagcggcttaatctttcttcaccaccaatagcaaaaccttgctcacaaggccacaatccgtttccgttgtcaaatccaacaccgttctgaaagatcggagtgtggtttccgtttccccaaaatgaaacggctctcccgttttgagcagaagtaatattaccattggtgttgttaggaggttcgggataagccatgcttccatctccaacggcttttacgtaatttgcagctatgtcgctttgttgtgcccgttttcgaactaacatatctgcttcttgaagtgtcaagaaatgaataagatgtccactctcatcaagaattgggccgtccattatgcaaataagcttatctgctcctatagctaaagcacaagctgtagcaacctcataggtactgcagaagtaaagtggaattagaaaactttaatctttctaaggttaatggaagaagcatttttctctggagaagagcgagcatacttgcaatttaagacttctccggagctcgagtggcccaagttcctcaacaaaactacagaaccaccgtcaagcctctcacaaatccgatctacatctatcttctttacctcaccagtcgctccaaaatcaacaccatcaacaacacctcttctctgccacaacaagacccaagataatcatcggtcattatgaacgacattaataagactcaaggtcgtatgaacaataaaaaaagtggaaaatctcacttttgctgcaaagaagttaccggtatcaaccctaacacctatatcatgtaaacgactacgatcaccatgtctacggatattgcaaatagaaggtccaggagataatttggcctcaagcatcactgatattgctcctgcagcttctttagcagcctgcaaagatgctgcatccgttactctgtaacgtcccacatacgtagcctcgcgtcctgcaactcacacagcattagactcgtagctaaccaaaccatttacttgacgctagcaaggtttatagtctagaatctaacatcgtgacaaagcttataatattctgacctctctcagccagaagctggtcgatttgctcctgagttccaggaactaaaacaaaccttattcctagatgatgaagaaacgctatgtcctgcacatatatcaaatcacttcaccttctactcaaatacgagaactgaaaactcaagcacattgcaaagaaaagatcatataacaaagcaaaataagaatagtaacaactttagttgaggcaagcaaacaatcgaacaccttgcgtgcttttttctcataaatcaaagtatataatacggtgaagaaagacggtaccttcaaaatggcatcacaagaagagccggcgatgatctcgccggagataataacgacgaatgtgcagccacggtgagcccaaagataaggccatgcttcacggaaccaacgcacaaactgtttgtcgtcaactggatgctcagcctccacatcgccggctgcagtcaccgcgtagtcaaacatattgcatttcgccgccgttatagaactaaccggcttaaaccatgaacagttaaaccggaattgagtagggtttagcttattttttggtttgaatgacgaaaaattcgactttgattggcgaaagtggtaaggaacatagtagctagaagtagaagaagaacccactaaagctcctcgctccatcttccttagacttcgatgagagaaagaattcaaataaatactaaattgttattgtaactaaaccggcaggtgacggctgattacggtcggagaaggcggcagtagtaccgtagtgggacccacggtaagtaggtattttatttattgtttatttttccatattttcttcaatagtctttttctattattatttattgtttatttttccatattttcttcaatagtctttttctattattatttattgtttatttttccatattttcttctttagtctttctctattactatttgacggaactctttgaatgtctggtcgttacaagcttaagttgtgtccccacatggaagttattcggttgggtccatcgaaggaaaattgattgaaccggtctggtcattctctcccaaactatagaaccaatttcggtctgcatcggagtttcgaagtcgcggacttatcagagtgggctttttaaggaatgtttttagaatatttaccagcccaatcccattttaagtatgtccagatcttaatttggcgagcctttttatatatggtgaacaactgattctaatgtgtatgtttcacttttattagagaaaaaatgtgaaaagatttaatgtgtatgtttcacttttattagagaaaaaatgtgaaaagattcttaaaagtatttatttatgctaattggcaaaactaaaacatcaatttatgtacatcattttagttcttcctctaagatttgattgatttgtattaatggctctgaatactgatactagtttcgttggcaagtaagataagtgataactttgataaagagtgtcaaattacaagtgccacaatttggagtacgtaaccaaattgacataaaacttgaataggtgaaaaaacgagccagaaaaaaaacgaatatcttctgcttatccgaataaaacgaaagtaatattcttacaagatccttccttatgaagtagtgccagtagatatttttatcattgtgattgcgacctgtttgttgcgattcatttatgccaattcacgttactatttatgttgtgataaaatcttttatttttcttcttctttccaaatacttaagtatgcatgattattgatccgtacaagcataaacgaagagctataaagtctccaacggtaaacgtacgtgaaccaaaataacaattcaatattatggttcgaattattctgtgtattttatgtaagaaaataaccaaaaccgactcgaaacaaaacaaaaaaatcttctgaaatgtgaatctttatttcggaaaattcttaacgatagatagtttttgctttaaaattaaatccaaacataaactagaactgaaattcaattcgttgtcaatattttctatacaaaaaaaaaaaagaaatccgaccaaataaacaaaaccataaatagacatctccatttttagttgaaagatgattaaatgcaataaatgtgccacaatcataaatttttccttttcacctaattgaaaattttaatcattaataagaagaatccatggagcacaattattttattttttattttttgctctcatatggtatgttaaattaattttcccttaatttaaattccccatatcaaataagtttttttttttttgagaaagacttgatttcataggagaaatatttgttaatattttcgacaaaacattttctctgtttgatgtatttccatcctcgtacaataaatactctagctattaaattcttagcccaaacgaaaataaagaaaaataaaagggtcctactaataaacaaaacaaaactagtggtcccaatttgaaatatataaaaatatataaaattcataaagctttgtggcttcagagcttccacttccatcgtcgtcttctattttttcttctttcttcgatttcataccaaaacaagaactctctgttttcgacaaaaacgaaaccttgagatctattttgattgacttttaagaaagagagagatctttcttagaagattttgtctcgtcggcattgaagatccaggtaacaaaatctcaccttttctctcctaatttcacgaaatcgaagaaaaattctcataattctcttaattacttatctctcaatttcttaaatcttacagggtttgtctttcgaaattcaggtaattttctcaaatccatttatggattgaagctttaggtaatgaatgagctgaatctgcatataaaaatcgatactttcattatccagaacaaaacaagatttagcataaacgttcaaaattgaaactttgattcctaacttcttggaatgattcagattgagctagatttagatctgtatgattgatattatgggtttggtttgtttatgagtagagagaaaatgggtgatgaggcagagatcaaggaacatttaaagccacaagcttcatctgaaacaatggacaagaaacataatgtgaaagggaagaggttatggcagaaagtcaagtatcaattggtggagtttcattcattgcctgcttatttaagagacaatgagtacatcattggtcattaccgatccgaatggccgatcaaacagattcttctcagcatctttaccattcataatgagactttgaatgtttggacgtaagtgttgaatcatgtttcttgatgtatccttgtttaaagttcaagagccttgagtgtgtttgtgtgtgtgtgttctttgggatttgcaggcacttgattgggtttttcctgtttttggcgctcactatatacactgcaacgaaagtaccgagtgtcgtggatcttcattcgcttcaacaccgtttacccgatttgttgaggaaaacagatctccacaaacttcattctgagctcatggctcgccttccttctagtccatctagttggcatgtgatggaccttctttataactgtttgcctgaaagattttctcatggcaactacactgacatgtgtgttctggtaagaaaagactcaatctttctctctattcctgcagattactgtttcaaaatgtggccaagttcatatctttgtaattgcattgcagcattctgtgagggaagatcttgcaaacttgatagctcctttgatcttcaggccaattactcgatggccgttttatgcatttctaggtggtgctatgttctgtctattagcaagcagcacgtgccacctcctctcatgtcactccgagcgagtctcctacataatgcttaggcttgattacgccggcatcgcagctctaatagcgacttccttctaccctccggtttattactccttcatgtgtgatcctttcttctgcaacctctacttaggattcataaccatcttaggaatcgccactgtgcttgtttctctcctcccggttttccaaagcccggagtttcgggtggtgagggcgtctctgttctttggaatgggattctctggcttagctccgattcttcacaagctgataatcttttgggaccaacctgaagcccttcacacgacaggttatgagattttgatgggtttgctttatgggttaggagctctggtttatgcaactaggatcccagagagatggatgccgggtaaattcgatatagcaggacatagccatcagttgtttcatgttctggttgttgctggtgcgttcacgcactatagagctgggctagtgtatcttaagtggagagatattgaaggatgttgaagatgaagattgaagattagatggaatctttgaatcttgtttgtagtagcttcatataaaagttggattatgtaaagtcttatatgtaatcaaacgtttaattgtttcctttattcaacaaaggatttatattgttaatccacatatgtattactggttaaagaagctgaaggattcatatttttagatgattccagtcttgattgcagcattcaaagtatcataatccagtgtcaacctcatatagcctccttgtgaacctgacacaagcctaattgttccatggcagaggatactttgattctgatcttcttcttgaaggtttcccctgattggtatacatttcgaatgatccataagtgttgataaactacaagtacacaaaatatgaaacaaaatctatgcacatcaataaaaattcagaaatcaataaaatttactctgaaaatgcagaacatttataagtgtttgttattgttttcaatatatgagaggaggagctcccctactatttttatatttttagccaatgagagagctccacttcataccccacttttaccaatcgtgctatttcacagccactctcactcatgtcgcgttgagcgcgtgtctacgatttctaaaggggttaatccacaaaaatcatgcatttttggatccacgcacctcattctcaaaaacccatcgcgtgtcgtattttttttggttttcttctctaaaccaaattaaaccgaaccgagatcaatttgaatttcaaaaccaatgtaaacccatcgctgtgaaaacaaaaagctcggccactgtaacaacaaaaatggagacgacacaacttggaagagaaatcaactcgaaatagccaagagaatgttcgtaaaccccctcaaatccgatgcttcctttgattccaacctccaaaagcccatctgctcaaacgaggagtattacaaggtacctctatagaacaagtattcacttccattcccttacttgtgttagttcagcgcttgagaaatattatgatcttgtttcagactttcagctgtcaagagacaaggcccgttttactatcaggtaaaatcatggtcagcttcttgtcccaaaccacattgttgtaatcgaatttgtttgtgtgtctttgttgcaggtttcaagagctcatgtagataatgatgacgtctttctgcaagaagctctggctagatacaaagcatttcttataattttggttttctcgataagagaggaagttgttgtttttgttgtctactcttgaagcttgatctggtttgaaattcatgttcaaaagaagagaagaggctgtttctcaagtggttgacgagaaatagattgtgttttgtcttctctgtttagaagaatgcctgcttggttaaaagaggtgatgattgagattgatctcagttgaggagcgtggagtttttgcttgggttaataagcacctttggtctgtgttgattgtgtgtttcctagcttcaatttatccttggatgaaacacataatcaacatgagggaaaagaactagcatcataatgatgaatatgaagattggctaagaatgagaagaagatgaagtggcgtttatcaactctgtctttgttaatttggagttgctatttagcttggattttagttctgaaagatgttctgaaaacctgaaagcaagatctttccaatgatataaagatcgcgttctggttccttgtggattgtttggaaattgttcttaaagttggtctctcgcaggtcgacatgtttttggatctgtcgtggattttggccataactttcaaaccataaactcaaatccagatccgttttctcctatggcttcgtatgattgatgttgttactgcaaccaatccttagaatttactgggttagtttgctgctttgtttgtgttctgcatcaaaacagattgaatcttcttttgtggtctatgaagtttacatatcaagagaggatgaatcagttctgcttttcaaaccatggtgtatgcttcagtgtggagaagtatttgtgacctatgaagaagagaaaaagaagtctgaagcagatttctaggagaaagtgttttaatagaagacagaagagttgtgaattggatgaagttgtttttgtttgtctgactgtgtcttcttcgtttgacttggctatggaccttggatttgagcatttaaagctgttctagaatcttggaaacgagatctttccaagggtacaaagatttttgtctgattccgtgttgtttgatgggaattggtttccaaagtaggctgctcgcgggtgtccctcattcttgacctatcttgggaaagaggtcatagcttccaatctacatattcaaatcaagatccgttttttcatgtgacctcgtatggctgtccttgatatttccaccaggttttctatgttttctaagttggtttgctactccattcttgctctgcatcaagacagatggatatgctttggcacaaaagttccttattcttggaattgcttcactacttgttgatgaagctcagcaaactcaaagaaaaagataagatggttgttcttaactaatggttttggagttgtagtctaagaaaccatcaaagggtaaaacacctttcttgttgcttgttcaaattcttgaagttcttaacaaggagaggaacggtagggcactgcttgcaaattttgcagaagagtggtcaagacttgagactgctttcaagcatgttcgtggtgtttttgagttcagggtctttgatactattgttctgtttttgaactctggcatgagtttaccaaaagaaaggaaagccaagaataactggttatgaacaagttcaaaggttataaatctgtgggtaaagagactcttacggatttgtttgaaggtcgttgattggttaagatattcagaaacgaattgcagatctctagagaattgcaggttttcgaaactaagttgcagatcctagaataagttgcacgattctgaattattatgttttttagggctgagtaagctaagaagaggttattggagtgattcagtgggattcttcgaagaagaaaatggaagagacaagtgcaagtgctgcatgaactgtctcaaggctactcacttcaataatgtgaaagtgtcatgtatctagtttgataaacgacacatctcaatgctggtggcagtggctgaaaagaagctctagaaggaagcaaatgcaagaaatttaaactgcatttagaagacagtaactaaggagtttgagttagctgtctgcatcatgagaagattacataagtaactactcaagggaaattcacttgcaggttagtcaagtgaacgttttttcaaagtatcagagaatcataaagaagacaaaggctctagtttgagtctggaaattgttaatgatgatggtactaagttctggtggagtttgcatgtaagacaaagcattgcagactgaggttacagcaggaagtgcatctgggttcaatggttgatgtgtaagttgttgttaggacgtgtctcaaggatatcacaacggtttgttgatatgagatagagttaaagataactagtagtggttaaaatacactgtttgttattgttttcaatatatgagaggaggagctcccctactatttttatatttttagccaatgagagagctccacttcataccccacttttaccaatcgtgctatttcacagccactctcactcatgtcgcgttgagcgcgtgtctacgatttctaaaggggtccacaaaaatcatgcatttttggatccacgcacctcattctcaaaaacccatcgcgtgtcgtattttttttggttttcttctctaaaccaaattaaaccgaaccgagatcaatttgaatttcaaaaccaatgtaaacccatcgctgtgaaaacaaaaagctcggccactgtaacaacaaaaatggagacgacacaacttggaagagaaatcaaacacgaaatagccaagagaatgttcgaaaaccccctcaaatccgatgcttcctttgattccaacctccaaaagctcatctgctcaatttatgaaatcaagctctggtttatgcaactaggatcccagagagatggatgccgggtaaattcgacatagcaggacatagccatcagttgtatcttaagtgtactggtagttgctggtgcgttaacgcactatagagctgggctagtgtatcttaagtggagagataatgaaggatgttgaagatgaagattgaagattagatggaatctttgatgttttaaatcttgtttgtagtagcttcatataaaagttggattatgtaaagtcttatctgtaatcaaacgtttaattgtttcctttattcatcaaaaggattcatattgtcaatccacatatgtattactggttaaagaagctgaaggattcatatttttagatgattccagtcttgatgaatcaacacatgattaacacatttatggatctttgatgaatcaacacatgattaactactattgctacaacacggcaaagttattttgttttcagtatgatgaaggattttgtttttgttacatatgattaaatggattttatatttgcttatttttgaatgcaaatgacgttgcttctaaatattatttcttctcaatcattcatgctctgttttcctctcttcttaggctctgtgttggtttttaattagtgcatatgtgaaagaataaaaccaaacatatttttggaatcatagttcttgaaactgaaacacacagaaccaaaaaacataaaaattgaaacattgatcttcgcacaaaagaagaactgtgagcgaaatggaggatcctacgtcttgttagtacaagagagaatcaaagcaactagaattcacaatcaacctaaatcatagagattgggtcacaaagttgaaatcttaaaactaatatggacctaaagcctgaaatgcagaaagcctttaagtgttggtggaaatggaaaaactcacgtctcatgtaagcccaaatgacttgtttaatactgtaatagccttcaaataatttgttaaaaaaaataaggatgtcaaatgaatccttataatatatttttggcattatggctcagatgtatctggaaataattagttagatttttgtctataatatagagataaatttaattagtggaaattgtcaaacaattatattctatatatcaaacttattcattatcctaagattggcatatagatgaaatcacatattttaaaaggtagtaatatcataataatgagaaaattaattttaaaaaatctaatttgagtatttattccttgtaaatttctgaattgccattcttttaaaataatgatacaatcctgtccattcacaaccttacttcaaagtcttacactttccataaatgtttctttaatacctttttaattaggagaaaaagtgaaaactaaaaacttatgctaattttgtatcagaattataaatatttcccattctctaaccatacatttacgttgactaaatcctcacatttaagacaataaacccttaatcagaaaagattgtttctttactttaatcacccaactgttttcagtgttttactgaattttctcatcttttataatcacttcattgtagttttactgaaagaattatttctatacttcatcagccaatctcagtctcatcatctccgatgggaaaacccggcggcgcaaagaccagaaccgccgtatgtttatcagacggtgttttctttctcgccggagctttcatgtctctcactctcgtctggtcttacttctcaatcttttcaccttctttcaccagtttacgtcacgacggcaaaccggttcaatgctccggtttagacatgcaattcgacccatccgagcccggtttttacgacgacccggatctaagctactcgatcgagaaaccaatcacaaaatgggacgagaaacgaaaccaatggtttgaatcacacccatctttcaaacccggttcagaaaaccggatcgtaatggtaaccggttcacaatcctcgccgtgtaaaaacccaatcggagaccatttattactccgatgcttcaaaaacaaagtcgattacgctcgaatccatggtcacgacatcttctacagcaattctcttcttcatccgaagatgaattcttattgggcgaaacttccggtggttaaagcggcgatgcttgctcacccagaggcggagtggatttggtgggttgattccgacgctatcttcaccgacatggaatttaaaccgccgcttcaccgttaccgtcaacacaacctcgtcgttcacggttggccaaatataatctacgagaaacagagctggacggcgttaaacgccggcgttttcttaataagaaattgtcaatggtcaatggacttaattgacacgtggaagagtatgggaccagtgagtccagattacaaaaaatggggtcccatccaacggtcgatattcaaagataagttgtttccagagtcagatgatcaaacggctctgatttatttgctttataaacataaagagttgtattatcctaagatatacctcgaagcagagtattatctccaagggtattggattggtgtatttggggatttcgccaacgtgacggaacggtatcttgagatggaacgagaagacgacacgttgcgtaggcgtcacgcggagaaagtgagcgaacgatacggtgcgtttagagaagagcggtttttgaaaggcgagtttggtgggagaggaagtcgcagacgcgcgtttataacgcattttacgggatgtcaaccatgtagcggtgatcataatccgagttacgatggtgacacgtgttggaatgagatgatcagagcccttaattttgctgataatcaggtgatgcgcgtgtatggttacgttcattctgatttgagtaagacttctccgcttcaacctctgccgttcgattatcctaatgaagcttggtgattaatttcttaataagtactttgatatatataataagtcatgattaatggaaaaatatatgataaaattatgtagacacaaaggaagaggaaaaagctaatgtcattcactttgtgttgtgtataactgaaaaaaaaaattggtcgtaatttttgtgtccatgtcctaatgcatgacacaaccaaatcaaccaatagttttgcatttggtttaaaagtttactcaaagtttgtgtaaagatttctgaggtaaaccttcgtctcttaaccaaaatagaagaaaaaaagaaaaagaaaaaaacattcccccgtttccaaccaattaccaaaactaaactaaaaagtaacttatgggatttgaatccatgtaataatatatcgacgaaattagaagaaaccatgaaattgtgtaataatgtgtctccttcagtccttcttttggtcaattatccacaattatgaaccataattattgagtttggtgatgtacatctagatattagttataatatcacaatcacatgtgaatttatatatgtgagaagaaaattcattttatgaaagcaactctgaatcctggattatataacaaacaatatcacattaacattttgatttcaactttacaacaattaataagcattaataacgaaattaaaacacccatgcatgacaagtatttcacatttgttgattcttaattacataaatcacacataaatacgtaccaaagattctaaatgaacattcaaactgacccgtaacacataaacaaaacaattttttttaagagcctaagtatttgacaacactgtaactcttactcctttgaaacatcttgtgcttactcccaaagctaatcaaaggacttgcctcatctattttctcaaagccacgatgaccaccacaacttctcgaactcttagccttccgcaattttgatggttcatgtcgtgcaccatcaatggtcgcatttctagctgatgcggctcttacaagtttagccacacgatcatcttcagctctcacggaatattgggagtggctagcactgaaacttcgcggaagagtgcttacgttgcagacgggtatcccaaaactcatgccgcttccaggaaggtcatgggaagaaaattgattcatgcttcgtatgtacatgtctctagctttcaccagcatctttatcggaacttttatgtatttgcttagcttcgtctcctttttcttgctcatcttatctttgtcacaaagtgagaagggaaactaagattttgcaatgatttgtgtaagatgctgaacatttaacaagattttgcgatgatttatatacatcatatttgggtcccgactttttaaaatatttatatgtgtatgtacacatacacatttgaacttactatatagtatacgggaataggtattaaacttaaagtatagttttatggcatttgcgtacggagatgcataattgtatgcaataagtaaaagacgatttatgtttttagttgattatttttatatagcgcgagccacgagacgttgagagtttgatggaattcatacataacaaaagatagaatttgattatgataacaaaataaagttatgctactctcaattgtggagcctatttgatcgtaacccctatattattagacccatcgtattcataaatttaaaccatatatgctaagaaaatgtaaagtcaagagttgacttcaaaacatggaaaacatgagatgtgaacatcaaaatttatggaataatcaaattgcaaaaaaattgaatatatgtacatgaacgatccaccgtccaaaaatatgaatatctaataattacctctaaacttcatcatgcactgatgaatatctattatctctaaaccactgatgaataactcaaatattcgtatatatttatcattaattttcgaaggttcaatataaaatagacgaagttatgggcctcagtatatttcagcctgtacgcctgtttcttataggcccatggacggtcggtcctcttgagttatggttgtgtgtgaaatcagaaatttgaatcatgtcttatttatccaacatcatcactttacttctaaaaatttgcaagtaacatattttgtaactaatcatgcaccactaaagtaactaatcatgtaccacccaagtaaaagattataatatttttagggaaaaaaaaaaaaatcgaatttctctgaatgactgatgaaataactggatgaaataactggatgaaatgacggatggattttgtcgataacctcgcgaaattggacctacatttcattcatttatatttcacacattcacaacatcctcatctaccctacacatccatttatacaacaagcatcctacacattcatctatataccatccacatctccctatacattcatctcatctatacaagcatacatcacaccatatccttctaaagctttacctgcagtcgtcatatgtcagtctcaatatacacatacacacgtcacacaccctacacatcctatcatgacattatctatattttgttggagtaagcttgaagcttacttgaagaagaagcaatcaagcaaaaaggaaattagaattatactttgtgtttaggaagttgcctaaatacttatgtgtgttttcctaataggattaggaaattgtctagttcttttcatatataaaggagttgcaagagtgttgcaaaacttatgagttgagagattaagattgtgtgtttttaggttttgagttattttcttaaagcaataaaagagagagtcttttattcataatcttgttcttattcttgagtttgatatatagtttgaatcaataattggtatcagagcataatattgattcaagcatctttacgatcaaacaaaggcaatcaacgaagttagcgttgattccgtacggagaaagaaggtaacttgtgaagaagacatgggcgatatagtaccagtaacgaacaacaccaaagaaggtagcagctcttcctctattcaatgtccgatgcttacggcaacaaactatacgttttggacaatacgtatgacgatggctctaaaagttcacaaggtatgggaaacgattgaagaaggattagatgatatcgataaaaacaatatggcaagcgctctccttctccaatctatccctgaagcattaaccttgcgagttggaaaacttaaaaccgcaaagaagatatgggatgcgataaaggctagaaatctaggagctgatagggtcaaagatgcaagacttcagacattgatgggcgagtttgaaaggataaagatgaaagaaactgagaagatagatgacttcgctggaagactctcagaattgtccaccaaatcagcagatcttgggaatgatattgaagaacctaagttggtgaaaaagtttctcaatagcctaccacggaaacgttatatacatatcattgctgcactagaacaagttcttgatcttaatacaacaagtttcgaggatatagtcggcagactaaaggcatatgaagagagaatctgcgatgaagaagataaccaagatgatcagggaaagcttttgtatgcgaactctgaagaaaagtcagctcagaacaattggaatcccaataaaggaaaaagtcaaggtggtcgaggatacggacgaggaagaggcagagatcggtttgggaatgcacaaggcaacagagacatgacaaacgtgatttgctataggtgtgataagctaggacactatgcttccgactgtcccgatagattgcttaaacttcaagaaacacaagatgttaagaatgatgatacacaaaaggctgacgcattaatgatgcacgaagtagtgtttcttaacgagaagaatgtaatgccaaataaacttgaggcgagcttggatgttgataatgtgtggtacttggataatggcgcgagcaaccatatgacgggaaacttggcttactttggtgagattgacgaaagagttacgggaaaggttcgttttggtgacgattctcgtattgatatcaaaggaaaaggctcgattacgtttatagctaagaatgaagagagaaaaatcttggctgatgtctattacattcccgatttaagaagcaacatcgtgagtcttggtcaggctaccgagtccggatgtgatgttagaatgcgagatgaccatctaactctatatgatagagatggaaagctgctaataaaagcgacaagatccagaaatcgactttacaaggtgatcatggaagtcgatgatacaaagtgtttgcaacttgagagcttgagtgaaacgacaaagtggcatgcaagattgggtcatattggaactgacaacttgaaaagaatgatgcaaaaggaattggtcattggcattcctaatatcaaagtcgagaaagaaatgtgtggctcatgcttgcttggtaagcaagctagaaaaccatttccacaagcaactccatatcgtgcaactagcatactcgagctcttacatggagatctttgtggaccaattacgccttctacagtagcataaaataggtatatctttgtcctaattgatgattattcacgttatatgtggtcacttcttctcaaggaaaagagcgaagcgttcaataagtttaaaagctttaaggcatgtgtggagcaagaaactggtgctaccattaaaacgtttcgaacggatagagggggagagtttgtttctcaagagtttcaagcgttttgtgacgcctccgggattaaaaggcacttaactgcaccgtattctccacaacaaaacggagtggtcgagaggcgcaatagaacgttaatggaaatgactagaagcatcttgaaacacatgagtgtcccaaattatctatggggagaagcagtgagacattcgacttatcttataaacagagtagcgacgagaactttggtagatcaaaccccatacaaagtcttaaagagtaagaagccaaatgtggagcatttacgggtctttggttgcattggttacgctaaagcagaggctgtacatttgagaaagttagacgatcgctcacgaatgctagtacacctaggaacagagcctggatcaaaaggctatcgtttattagatccaacaaggagaaaggtgatagttagcagagatgttgtatttgatgaagaaaaaaggtggaagtggaataatagtgaagatgaaattaataatgttccaggaatgttcagtcttagttttgaagaatttggcaacaatggtataagagaggaggatgatatcacagaagaaacagagatcaatgatggagagaatcatgatcgtgaagctgaaattcctactcaagcaatagagactgtagaacaataagtagagccgcaagtcacactaagaaaatccgtgagagtgatctcaaaaccaagttacttagacgattatgttttgttggcctcaatcgaatgtgaacggctcttacttatgataaatgaagaaccatgggactacaatgaggcaaaggaattgcaagaatggaagaaagcgtgtgtagaagagattgcgtcgataactaagaaccacacttgggatttggtggatcttccgatcggagctaaaccaattggactcaaatgggtctttaagttaaaacggaactctgatggaagcgttaacaaacacaaagcaaggcttgtagctaagggttatgttcaacgacacggtatcgactttgatgaagtatttgctccggttgcccgaattgaaaccgttcgacttatcattgctttagcagcttctaatggatgggaaatacatcatcttgatgtgaaaactgcatttcttcatggagaattaaaagaagtggtctacgtttcacaacctgaaggatttgtgataggaggaagtgaagataaagtgtacaagctgaacaaagctctttacggactcaaacaagctcctagagcatggaataacaagttgaacaagattctcatggaacttaagtttactaagtgctctaaagaaccgtcattatattgtcgaagagacaaggatgagctacttgttgtggtggtctatgtggatgacctacttgtcacgggatctaacttacaagtcatacttgagtttaaagaagagatggcaaagaagtttgaaatgagtgatcttggaaagcttacgtattacttaggtattgaagtgtttcaacatgaaggcggcattatgcttaaacaagagaggtatgcaaacaagatcctagaagaaacaaaaatggatgattgtaatgcggttcagattccgatggatgcaaacctaaagctaagtaaagcacaagaagagaaaaacatcgatgagaaggaatatagaagaaatattggatgtcttcgatatttgctgcacacacgtcctgacctttcttattgtgttggagtgcttagtagatatatgcacgagccaaaggaatcacatggagcagccttgaaacagattcttaggtacttgcgaggaactcaatcttttggtctctgtttcaaacgaatgaataaaacagagctagtaggatttagtgatagcagtcacaatgttgatgaggatgatggaagaagtacgacgggtcatattttctatcttaatgactgtcctatcacttggtgctcgcaaaagcaagaaactgtggctctatcgtcttgtgaagctgagtttatggcggctacagaggcagcaaaacaagcggtttggcttcaagagttacttgaagagattgttggaaaaacgtgtaagcaagtgttgatattaattgacaacaagtcggctatagcactcacgaaaaacccggttttccatggacgaagcaaacacattcacaagaggtatcactttattcgtgagtgcgttgcgaatgaacaagttgaggtggagcacgtccccggaaccgaacagagagccgacattctaacaaaggcactcgggagaatcaagttcaaagagatgagagatcttgtgggagttcaagatatgacaaagtgtagcttcaagcttaagggggaaaatgttggagtaagcttgaagcttacttgaagaagaagcaatcaagcaaaaaggaaattaaaattagactttgtgtttaggaagttgcctaaatacttatgtgtgttttcctaataggattaggaaattgtctagttcttttcttatataaaggagttgcaagagtgttgcaaaacttatgagttgagagattaagattgtgtgtttttaggttttgagttattttcttaaagcaataaaagagagagtcttttattcataatcttgttcttattcttgagtttgatatatagtttgaatcaatatattttacaagcattcgtcacacatctgatatatacacattccacactcaatcaaagtatggcacggcacaatcccaatgatgcatttagatttctctcttctatgacattctccttccatcactactccatctgcacatcatcactttcatcatcaaggcgttttctttacatactccggttgagtttatgctcttctaaaaaacctgcaaaaatcaaatcaaaattttcattacaacgccttctgaatttcagaaaactatgtgcaacataatcatgcaagtatcatatactaatctaaaaataaaataaaaacctttatgcccaaatatccatttcagacatatattttagtttttcaaagaaactaatcttcttaataaaacagaactaggattgttatttttcctatatatcaatatgaacaattaaattcaagtagattctttcaagactgcctaatttattttccatttcaagacaattttaagactaatctaccaaatcaaataaccacgagaacagaggttaagcttctttgttattatcatcttatgtgacctcttccaaatatatatatatctcaaatgttttaaatctgaaagatatctagagcatcgtagttaaagaaataaaccaaaagagttaccgttatgtaacgttcaaatttacctttttctctaacgttccgactgacgtgactcttatgcgcactgtattactagaaatcaaaataatagattagtttgtttttttgttacggctaatagattacttgttataaaagtaaataaaataaaaagatcaaggaatccgattagattcaaatccgaaggctattgataagtacttaatcttcttaccattacagataatatcaaaccgtcacgtggacagccacagctttctttattataatatttgataaagtattaattcagtttgattaaagaatcttcctcttaatagtttaatcctaatcagaaacttcgaaaactatcaaatcaataaaatattaagaacacacacgttgaaaattcccctttcacttatgattctcataaacaaaactaagaaaaacaaacaatgttctcaatagtcaattccctaataagagtcaaaaaccaaaggcttgaccctcgttgaacatgttgcacatccatcattatatatcagaagaacataactttcacattcaaagatcaataaatatcagaagaacataactttcacattcaaagaattttaagcgacatctcaagtctcaatggaagcaacatcacaacaatttatgtctcagagttaccttaacgctcaagaaaccaccacaagggcaacgaaaaattacctaacttcgctccattcgacacgtaaacaaccttcaaagcccttgaagaggcctgcaatatcatcacctttgaatccaatgcatcctcatgtctaccgagtcgagccagtaaacttcaaagtgttggttcagaggctaaccggtgcacctgagcacgagactgtgcaggctaaaccgctcaagacttcggatgatgcagcaaagcagagttcttcgtcatttgcgtttgatccatcatcatcttggggagatttctcattccaaaatcctgcaaatatttccagatggtagcttctactcttgcaaaatgcttcttttgattgaaatgcttaacattcttgtatttatttttagtttgtttttaataaaccagaaagatgtaatcatatatttttcagactcgcattctagaattaatttgttatgtcatttatctgtaacacacacataatttgtgggagttaagacttttgattaaaataaaacataattggattgattaaggattctaactacattgggaataatttgatattttcattaaaagaataaattgaattaatcaatgattctatatacacatgtttaacatgtgagaataatttgaaattcacaacaattaacgttagaataattttacagctaattaatgatgattattcttatgtgtgtagatataatcaagatgagccgtcaatgttcttctcaccaagcaatcttcgtcgtcttctttatcgcagctctctcccgccacctcatgtaattttgattctatcatttcctgatgaaacacaatgaaacataaaattacaaacgaaaatatataactacgcatgaatcaacattcaacatgtgtttacgcatataatactaaccagactaagtgtatccgccggagaggttgtgaaggaggcgaagtaggcaggttcagggcgggcgctgcacgttagcatggtggcgcaaaggaggagagctatcgtgatcaaagtagagagatttgccattttgtgattatagattaattaattatggatatattgaaaactaatgaccaaagcatctttatatatagtcaatcatggtcaactcttttcttaatctagttcttattttaagaagaaaaaaattagagtgttttgttcttatctttttcatttgttaatgtttttatctattaaaaatgtagttgtaaaagttaaaaaaagaaagaaagaaagatgtatatctctttcactcgttttcaaaaaggaaacaaatgaatgtgtaatattcaaaattttatagtattttaaaattatatataaagaaaagtggatttgataaaagttaggttataccaatatgtttctaaagattaaccatcacacattacctcgatttatattggaaacatctagaagtatatttatagggaggttaaatggactgaatgttttttgctactactgattattattattttgccataatttgccactggtgctgttaagggtaaaggagattgttaattggaccaaaaccaatccctttttttttttttttccaaaaccaatccctaagaataataaaagaactttttttgtttggcattagtctatcaaaaacgttgacctgtttttacgtgaagtcaaccgttgattttttcatattgggccaaatataccaatatactggcccaatgcaattcaagcatgatggtggtacagtcggaaataaaaaacttgaaagttgaaacatacattactttaacccgatttaattagtaggtcgacacgcagaaaaacaatttatgaattggttatcagtaatttgatgtcactaattagtacaattatcgcaatagttgcaggccccaaccactataatgttaatatcacgagaaaccaatcgatttttaaagttgcaaagcaaagaagttcgaaactcgttaactaaacccacccttacgtaaacatttgaccatattctaatatgcatgtacatatacgatgcatacatatatatttggagctataaggagaaccctaatggctaatgacgtaccaaatgacgccacacgataaatctcaacgaacactccaccacaaacatatagattacaaaaagatacatttaaaaagccataattagtggattgctaacgttacttacttactttacatccatttactcatatatatatacaccacacacacaaaaatatgtgttaacacgaacgatgcaaggcgacaaaaatataaaagtaatttaggaaaaatatatcgctaatttgttgaactgtagaagcgtagagttaattttctggatctgttgagtacatccgacggccaaaacttaatcgacacgaaagtttaggtcgaggacccgagcaatgttagcatttagtcgccattgttcttagtcttatactcttattaatgacttaataatatcaattattgatcgtcagacttatatctatttaatatactaataaaaaattagttttatatatatatatatatatatatagaaaagtattaacgatttctccagtatgcgactacctggagactaaattatcttaaacaacattctatagtatttgtatccgtaaagttttttttttttaaatcagtactcaataacatcaaatatttgcaactcattttcatagaaacgacagactttttcaaagaaaattcaaatagcaagagtgttgcatgtggacatccattgccaaagaaacgacacgtttaagtttttccatgacaaaaataatagactcatttagggttttcccaatttacaaattttgtcgttatatggcctgtattctttttatagtgattaaaaaactttacatgcgtcatatttagaatttcttcaaactttttattaaagtttcctcctcgactttagtttaagatttttaaatttaatatgacctaaacggggctaaactagccataggctaagtaattagcataaatataagaaaagcatacacaccaagttgactataatcttacaaataagtatttgaagttttaacaaatttttaagaatatttgttcagatatgatctactggaattc

SEQ ID NO: 681 - DNA, 110766 bp, Arabidopsis thaliana
aagcttcatctgaaacaatggacaagaaacataatgtgaaagggaagaggttatggcagaaagtcaagtatcaattggtggagtttcattcattgcctgcttatttaagagacaatgagtacatcattggtcattaccgatccgaatggccgatcaaacagattcttctcagcatctttaccattcataatgagactttgaatgtttggacgtaagtgttgaatcatgtttcttgatgtatccttgtttaaagttcaagagccttgagtgtgtttgtgtgtgtgtgttctttgggatttgcaggcacttgattgggtttttcctgtttttggcgctcactatatacactgcaacgaaagtaccgagtgtcgtggatcttcattcgcttcaacaccgtttacccgatttgttgaggaaaacagatctccacaaacttcattctgagctcatggctcgccttccttctagtccatctagttggcatgtgatggaccttctttataactgtttgcctgaaagattttctcatggcaactacactgacatgtgtgttctggtaagaaaagactcaatctttctctctattcctgcagattactgtttcaaaatgtggccaagttcatatctttgtaattgcattgcagcattctgtgagggaagatcttgcaaacttgatagctcctttgatcttcaggccaattactcgatggccgttttatgcatttctaggtggtgctatgttctgtctattagcaagcagcacgtgccacctcctctcatgtcactccgagcgagtctcctacataatgcttaggcttgattacgccggcatcgcagctctaatagcgacttccttctaccctccggtttattactccttcatgtgtgatcctttcttctgcaacctctacttaggattcataaccatcttaggaatcgccactgtgcttgtttctctcctcccggttttccaaagcccggagtttcgggtggtgagggcgtctctgttctttggaatgggattctctggcttagctccgattcttcacaagctgataatcttttgggaccaacctgaagcccttcacacgacaggttatgagattttgatgggtttgctttatgggttaggagctctggtttatgcaactaggatcccagagagatggatgccgggtaaattcgatatagcaggacatagccatcagttgtttcatgttctggttgttgctggtgcgttcacgcactatagagctgggctagtgtatcttaagtggagagatattgaaggatgttgaagatgaagattgaagattagatggaatctttgaatcttgtttgtagtagcttcatataaaagttggattatgtaaagtcttatatgtaatcaaacgtttaattgtttcctttattcaacaaaggatttatattgttaatccacatatgtattactggttaaagaagctgaaggattcatatttttagatgattccagtcttgattgcagcattcaaagtatcataatccagtgtcaacctcatatagcctccttgtgaacctgacacaagcctaattgttccatggcagaggatactttgattctgatcttcttcttgaaggtttcccctgattggtatacatttcgaatgatccataagtgttgataaactacaagtacacaaaatatgaaacaaaatctatgcacatcaataaaaattcagaaatcaataaaatttactctgaaaatgcagaacatttataagtgtttgttattgttttcaatatatgagaggaggagctcccctactatttttatatttttagccaatgagagagctccacttcataccccacttttaccaatcgtgctatttcacagccactctcactcatgtcgcgttgagcgcgtgtctacgatttctaaaggggttaatccacaaaaatcatgcatttttggatccacgcacctcattctcaaaaacccatcgcgtgtcgtattttttttggttttcttctctaaaccaaattaaaccgaaccgagatcaatttgaatttcaaaaccaatgtaaacccatcgctgtgaaaacaaaaagctcggccactgtaacaacaaaaatggagacgacacaacttggaagagaaatcaactcgaaatagccaagagaatgttcgtaaaccccctcaaatccgatgcttcctttgattccaacctccaaaagcccatctgctcaaacgaggagtattacaaggtacctctatagaacaagtattcacttccattcccttacttgtgttagttcagcgcttgagaaatattatgatcttgtttcagactttcagctgtcaagagacaaggcccgttttactatcaggtaaaatcatggtcagcttcttgtcccaaaccacattgttgtaatcgaatttgtttgtgtgtctttgttgcaggtttcaagagctcatgtagataatgatgacgtctttctgcaagaagctctggctagatacaaagcatttcttataattttggttttctcgataagagaggaagttgttgtttttgttgtctactcttgaagcttgatctggtttgaaattcatgttcaaaagaagagaagaggctgtttctcaagtggttgacgagaaatagattgtgttttgtcttctctgtttagaagaatgcctgcttggttaaaagaggtgatgattgagattgatctcagttgaggagcgtggagtttttgcttgggttaataagcacctttggtctgtgttgattgtgtgtttcctagcttcaatttatccttggatgaaacacataatcaacatgagggaaaagaactagcatcataatgatgaatatgaagattggctaagaatgagaagaagatgaagtggcgtttatcaactctgtctttgttaatttggagttgctatttagcttggattttagttctgaaagatgttctgaaaacctgaaagcaagatctttccaatgatataaagatcgcgttctggttccttgtggattgtttggaaattgttcttaaagttggtctctcgcaggtcgacatgtttttggatctgtcgtggattttggccataactttcaaaccataaactcaaatccagatccgttttctcctatggcttcgtatgattgatgttgttactgcaaccaatccttagaatttactgggttagtttgctgctttgtttgtgttctgcatcaaaacagattgaatcttcttttgtggtctatgaagtttacatatcaagagaggatgaatcagttctgcttttcaaaccatggtgtatgcttcagtgtggagaagtatttgtgacctatgaagaagagaaaaagaagtctgaagcagatttctaggagaaagtgttttaatagaagacagaagagttgtgaattggatgaagttgtttttgtttgtctgactgtgtcttcttcgtttgacttggctatggaccttggatttgagcatttaaagctgttctagaatcttggaaacgagatctttccaagggtacaaagatttttgtctgattccgtgttgtttgatgggaattggtttccaaagtaggctgctcgcgggtgtccctcattcttgacctatcttgggaaagaggtcatagcttccaatctacatattcaaatcaagatccgttttttcatgtgacctcgtatggctgtccttgatatttccaccaggttttctatgttttctaagttggtttgctactccattcttgctctgcatcaagacagatggatatgctttggcacaaaagttccttattcttggaattgcttcactacttgttgatgaagctcagcaaactcaaagaaaaagataagatggttgttcttaactaatggttttggagttgtagtctaagaaaccatcaaagggtaaaacacctttcttgttgcttgttcaaattcttgaagttcttaacaaggagaggaacggtagggcactgcttgcaaattttgcagaagagtggtcaagacttgagactgctttcaagcatgttcgtggtgtttttgagttcagggtctttgatactattgttctgtttttgaactctggcatgagtttaccaaaagaaaggaaagccaagaataactggttatgaacaagttcaaaggttataaatctgtgggtaaagagactcttacggatttgtttgaaggtcgttgattggttaagatattcagaaacgaattgcagatctctagagaattgcaggttttcgaaactaagttgcagatcctagaataagttgcacgattctgaattattatgttttttagggctgagtaagctaagaagaggttattggagtgattcagtgggattcttcgaagaagaaaatggaagagacaagtgcaagtgctgcatgaactgtctcaaggctactcacttcaataatgtgaaagtgtcatgtatctagtttgataaacgacacatctcaatgctggtggcagtggctgaaaagaagctctagaaggaagcaaatgcaagaaatttaaactgcatttagaagacagtaactaaggagtttgagttagctgtctgcatcatgagaagattacataagtaactactcaagggaaattcacttgcaggttagtcaagtgaacgttttttcaaagtatcagagaatcataaagaagacaaaggctctagtttgagtctggaaattgttaatgatgatggtactaagttctggtggagtttgcatgtaagacaaagcattgcagactgaggttacagcaggaagtgcatctgggttcaatggttgatgtgtaagttgttgttaggacgtgtctcaaggatatcacaacggtttgttgatatgagatagagttaaagataactagtagtggttaaaatacactgtttgttattgttttcaatatatgagaggaggagctcccctactatttttatatttttagccaatgagagagctccacttcataccccacttttaccaatcgtgctatttcacagccactctcactcatgtcgcgttgagcgcgtgtctacgatttctaaaggggtccacaaaaatcatgcatttttggatccacgcacctcattctcaaaaacccatcgcgtgtcgtattttttttggttttcttctctaaaccaaattaaaccgaaccgagatcaatttgaatttcaaaaccaatgtaaacccatcgctgtgaaaacaaaaagctcggccactgtaacaacaaaaatggagacgacacaacttggaagagaaatcaaacacgaaatagccaagagaatgttcgaaaaccccctcaaatccgatgcttcctttgattccaacctccaaaagctcatctgctcaatttatgaaatcaagctctggtttatgcaactaggatcccagagagatggatgccgggtaaattcgacatagcaggacatagccatcagttgtatcttaagtgtactggtagttgctggtgcgttaacgcactatagagctgggctagtgtatcttaagtggagagataatgaaggatgttgaagatgaagattgaagattagatggaatctttgatgttttaaatcttgtttgtagtagcttcatataaaagttggattatgtaaagtcttatctgtaatcaaacgtttaattgtttcctttattcatcaaaaggattcatattgtcaatccacatatgtattactggttaaagaagctgaaggattcatatttttagatgattccagtcttgatgaatcaacacatgattaacacatttatggatctttgatgaatcaacacatgattaactactattgctacaacacggcaaagttattttgttttcagtatgatgaaggattttgtttttgttacatatgattaaatggattttatatttgcttatttttgaatgcaaatgacgttgcttctaaatattatttcttctcaatcattcatgctctgttttcctctcttcttaggctctgtgttggtttttaattagtgcatatgtgaaagaataaaaccaaacatatttttggaatcatagttcttgaaactgaaacacacagaaccaaaaaacataaaaattgaaacattgatcttcgcacaaaagaagaactgtgagcgaaatggaggatcctacgtcttgttagtacaagagagaatcaaagcaactagaattcacaatcaacctaaatcatagagattgggtcacaaagttgaaatcttaaaactaatatggacctaaagcctgaaatgcagaaagcctttaagtgttggtggaaatggaaaaactcacgtctcatgtaagcccaaatgacttgtttaatactgtaatagccttcaaataatttgttaaaaaaaataaggatgtcaaatgaatccttataatatatttttggcattatggctcagatgtatctggaaataattagttagatttttgtctataatatagagataaatttaattagtggaaattgtcaaacaattatattctatatatcaaacttattcattatcctaagattggcatatagatgaaatcacatattttaaaaggtagtaatatcataataatgagaaaattaattttaaaaaatctaatttgagtatttattccttgtaaatttctgaattgccattcttttaaaataatgatacaatcctgtccattcacaaccttacttcaaagtcttacactttccataaatgtttctttaatacctttttaattaggagaaaaagtgaaaactaaaaacttatgctaattttgtatcagaattataaatatttcccattctctaaccatacatttacgttgactaaatcctcacatttaagacaataaacccttaatcagaaaagattgtttctttactttaatcacccaactgttttcagtgttttactgaattttctcatcttttataatcacttcattgtagttttactgaaagaattatttctatacttcatcagccaatctcagtctcatcatctccgatgggaaaacccggcggcgcaaagaccagaaccgccgtatgtttatcagacggtgttttctttctcgccggagctttcatgtctctcactctcgtctggtcttacttctcaatcttttcaccttctttcaccagtttacgtcacgacggcaaaccggttcaatgctccggtttagacatgcaattcgacccatccgagcccggtttttacgacgacccggatctaagctactcgatcgagaaaccaatcacaaaatgggacgagaaacgaaaccaatggtttgaatcacacccatctttcaaacccggttcagaaaaccggatcgtaatggtaaccggttcacaatcctcgccgtgtaaaaacccaatcggagaccatttattactccgatgcttcaaaaacaaagtcgattacgctcgaatccatggtcacgacatcttctacagcaattctcttcttcatccgaagatgaattcttattgggcgaaacttccggtggttaaagcggcgatgcttgctcacccagaggcggagtggatttggtgggttgattccgacgctatcttcaccgacatggaatttaaaccgccgcttcaccgttaccgtcaacacaacctcgtcgttcacggttggccaaatataatctacgagaaacagagctggacggcgttaaacgccggcgttttcttaataagaaattgtcaatggtcaatggacttaattgacacgtggaagagtatgggaccagtgagtccagattacaaaaaatggggtcccatccaacggtcgatattcaaagataagttgtttccagagtcagatgatcaaacggctctgatttatttgctttataaacataaagagttgtattatcctaagatatacctcgaagcagagtattatctccaagggtattggattggtgtatttggggatttcgccaacgtgacggaacggtatcttgagatggaacgagaagacgacacgttgcgtaggcgtcacgcggagaaagtgagcgaacgatacggtgcgtttagagaagagcggtttttgaaaggcgagtttggtgggagaggaagtcgcagacgcgcgtttataacgcattttacgggatgtcaaccatgtagcggtgatcataatccgagttacgatggtgacacgtgttggaatgagatgatcagagcccttaattttgctgataatcaggtgatgcgcgtgtatggttacgttcattctgatttgagtaagacttctccgcttcaacctctgccgttcgattatcctaatgaagcttggtgattaatttcttaataagtactttgatatatataataagtcatgattaatggaaaaatatatgataaaattatgtagacacaaaggaagaggaaaaagctaatgtcattcactttgtgttgtgtataactgaaaaaaaaaattggtcgtaatttttgtgtccatgtcctaatgcatgacacaaccaaatcaaccaatagttttgcatttggtttaaaagtttactcaaagtttgtgtaaagatttctgaggtaaaccttcgtctcttaaccaaaatagaagaaaaaaagaaaaagaaaaaaacattcccccgtttccaaccaattaccaaaactaaactaaaaagtaacttatgggatttgaatccatgtaataatatatcgacgaaattagaagaaaccatgaaattgtgtaataatgtgtctccttcagtccttcttttggtcaattatccacaattatgaaccataattattgagtttggtgatgtacatctagatattagttataatatcacaatcacatgtgaatttatatatgtgagaagaaaattcattttatgaaagcaactctgaatcctggattatataacaaacaatatcacattaacattttgatttcaactttacaacaattaataagcattaataacgaaattaaaacacccatgcatgacaagtatttcacatttgttgattcttaattacataaatcacacataaatacgtaccaaagattctaaatgaacattcaaactgacccgtaacacataaacaaaacaattttttttaagagcctaagtatttgacaacactgtaactcttactcctttgaaacatcttgtgcttactcccaaagctaatcaaaggacttgcctcatctattttctcaaagccacgatgaccaccacaacttctcgaactcttagccttccgcaattttgatggttcatgtcgtgcaccatcaatggtcgcatttctagctgatgcggctcttacaagtttagccacacgatcatcttcagctctcacggaatattgggagtggctagcactgaaacttcgcggaagagtgcttacgttgcagacgggtatcccaaaactcatgccgcttccaggaaggtcatgggaagaaaattgattcatgcttcgtatgtacatgtctctagctttcaccagcatctttatcggaacttttatgtatttgcttagcttcgtctcctttttcttgctcatcttatctttgtcacaaagtgagaagggaaactaagattttgcaatgatttgtgtaagatgctgaacatttaacaagattttgcgatgatttatatacatcatatttgggtcccgactttttaaaatatttatatgtgtatgtacacatacacatttgaacttactatatagtatacgggaataggtattaaacttaaagtatagttttatggcatttgcgtacggagatgcataattgtatgcaataagtaaaagacgatttatgtttttagttgattatttttatatagcgcgagccacgagacgttgagagtttgatggaattcatacataacaaaagatagaatttgattatgataacaaaataaagttatgctactctcaattgtggagcctatttgatcgtaacccctatattattagacccatcgtattcataaatttaaaccatatatgctaagaaaatgtaaagtcaagagttgacttcaaaacatggaaaacatgagatgtgaacatcaaaatttatggaataatcaaattgcaaaaaaattgaatatatgtacatgaacgatccaccgtccaaaaatatgaatatctaataattacctctaaacttcatcatgcactgatgaatatctattatctctaaaccactgatgaataactcaaatattcgtatatatttatcattaattttcgaaggttcaatataaaatagacgaagttatgggcctcagtatatttcagcctgtacgcctgtttcttataggcccatggacggtcggtcctcttgagttatggttgtgtgtgaaatcagaaatttgaatcatgtcttatttatccaacatcatcactttacttctaaaaatttgcaagtaacatattttgtaactaatcatgcaccactaaagtaactaatcatgtaccacccaagtaaaagattataatatttttagggaaaaaaaaaaaaatcgaatttctctgaatgactgatgaaataactggatgaaataactggatgaaatgacggatggattttgtcgataacctcgcgaaattggacctacatttcattcatttatatttcacacattcacaacatcctcatctaccctacacatccatttatacaacaagcatcctacacattcatctatataccatccacatctccctatacattcatctcatctatacaagcatacatcacaccatatccttctaaagctttacctgcagtcgtcatatgtcagtctcaatatacacatacacacgtcacacaccctacacatcctatcatgacattatctatattttgttggagtaagcttgaagcttacttgaagaagaagcaatcaagcaaaaaggaaattagaattatactttgtgtttaggaagttgcctaaatacttatgtgtgttttcctaataggattaggaaattgtctagttcttttcatatataaaggagttgcaagagtgttgcaaaacttatgagttgagagattaagattgtgtgtttttaggttttgagttattttcttaaagcaataaaagagagagtcttttattcataatcttgttcttattcttgagtttgatatatagtttgaatcaataattggtatcagagcataatattgattcaagcatctttacgatcaaacaaaggcaatcaacgaagttagcgttgattccgtacggagaaagaaggtaacttgtgaagaagacatgggcgatatagtaccagtaacgaacaacaccaaagaaggtagcagctcttcctctattcaatgtccgatgcttacggcaacaaactatacgttttggacaatacgtatgacgatggctctaaaagttcacaaggtatgggaaacgattgaagaaggattagatgatatcgataaaaacaatatggcaagcgctctccttctccaatctatccctgaagcattaaccttgcgagttggaaaacttaaaaccgcaaagaagatatgggatgcgataaaggctagaaatctaggagctgatagggtcaaagatgcaagacttcagacattgatgggcgagtttgaaaggataaagatgaaagaaactgagaagatagatgacttcgctggaagactctcagaattgtccaccaaatcagcagatcttgggaatgatattgaagaacctaagttggtgaaaaagtttctcaatagcctaccacggaaacgttatatacatatcattgctgcactagaacaagttcttgatcttaatacaacaagtttcgaggatatagtcggcagactaaaggcatatgaagagagaatctgcgatgaagaagataaccaagatgatcagggaaagcttttgtatgcgaactctgaagaaaagtcagctcagaacaattggaatcccaataaaggaaaaagtcaaggtggtcgaggatacggacgaggaagaggcagagatcggtttgggaatgcacaaggcaacagagacatgacaaacgtgatttgctataggtgtgataagctaggacactatgcttccgactgtcccgatagattgcttaaacttcaagaaacacaagatgttaagaatgatgatacacaaaaggctgacgcattaatgatgcacgaagtagtgtttcttaacgagaagaatgtaatgccaaataaacttgaggcgagcttggatgttgataatgtgtggtacttggataatggcgcgagcaaccatatgacgggaaacttggcttactttggtgagattgacgaaagagttacgggaaaggttcgttttggtgacgattctcgtattgatatcaaaggaaaaggctcgattacgtttatagctaagaatgaagagagaaaaatcttggctgatgtctattacattcccgatttaagaagcaacatcgtgagtcttggtcaggctaccgagtccggatgtgatgttagaatgcgagatgaccatctaactctatatgatagagatggaaagctgctaataaaagcgacaagatccagaaatcgactttacaaggtgatcatggaagtcgatgatacaaagtgtttgcaacttgagagcttgagtgaaacgacaaagtggcatgcaagattgggtcatattggaactgacaacttgaaaagaatgatgcaaaaggaattggtcattggcattcctaatatcaaagtcgagaaagaaatgtgtggctcatgcttgcttggtaagcaagctagaaaaccatttccacaagcaactccatatcgtgcaactagcatactcgagctcttacatggagatctttgtggaccaattacgccttctacagtagcataaaataggtatatctttgtcctaattgatgattattcacgttatatgtggtcacttcttctcaaggaaaagagcgaagcgttcaataagtttaaaagctttaaggcatgtgtggagcaagaaactggtgctaccattaaaacgtttcgaacggatagagggggagagtttgtttctcaagagtttcaagcgttttgtgacgcctccgggattaaaaggcacttaactgcaccgtattctccacaacaaaacggagtggtcgagaggcgcaatagaacgttaatggaaatgactagaagcatcttgaaacacatgagtgtcccaaattatctatggggagaagcagtgagacattcgacttatcttataaacagagtagcgacgagaactttggtagatcaaaccccatacaaagtcttaaagagtaagaagccaaatgtggagcatttacgggtctttggttgcattggttacgctaaagcagaggctgtacatttgagaaagttagacgatcgctcacgaatgctagtacacctaggaacagagcctggatcaaaaggctatcgtttattagatccaacaaggagaaaggtgatagttagcagagatgttgtatttgatgaagaaaaaaggtggaagtggaataatagtgaagatgaaattaataatgttccaggaatgttcagtcttagttttgaagaatttggcaacaatggtataagagaggaggatgatatcacagaagaaacagagatcaatgatggagagaatcatgatcgtgaagctgaaattcctactcaagcaatagagactgtagaacaataagtagagccgcaagtcacactaagaaaatccgtgagagtgatctcaaaaccaagttacttagacgattatgttttgttggcctcaatcgaatgtgaacggctcttacttatgataaatgaagaaccatgggactacaatgaggcaaaggaattgcaagaatggaagaaagcgtgtgtagaagagattgcgtcgataactaagaaccacacttgggatttggtggatcttccgatcggagctaaaccaattggactcaaatgggtctttaagttaaaacggaactctgatggaagcgttaacaaacacaaagcaaggcttgtagctaagggttatgttcaacgacacggtatcgactttgatgaagtatttgctccggttgcccgaattgaaaccgttcgacttatcattgctttagcagcttctaatggatgggaaatacatcatcttgatgtgaaaactgcatttcttcatggagaattaaaagaagtggtctacgtttcacaacctgaaggatttgtgataggaggaagtgaagataaagtgtacaagctgaacaaagctctttacggactcaaacaagctcctagagcatggaataacaagttgaacaagattctcatggaacttaagtttactaagtgctctaaagaaccgtcattatattgtcgaagagacaaggatgagctacttgttgtggtggtctatgtggatgacctacttgtcacgggatctaacttacaagtcatacttgagtttaaagaagagatggcaaagaagtttgaaatgagtgatcttggaaagcttacgtattacttaggtattgaagtgtttcaacatgaaggcggcattatgcttaaacaagagaggtatgcaaacaagatcctagaagaaacaaaaatggatgattgtaatgcggttcagattccgatggatgcaaacctaaagctaagtaaagcacaagaagagaaaaacatcgatgagaaggaatatagaagaaatattggatgtcttcgatatttgctgcacacacgtcctgacctttcttattgtgttggagtgcttagtagatatatgcacgagccaaaggaatcacatggagcagccttgaaacagattcttaggtacttgcgaggaactcaatcttttggtctctgtttcaaacgaatgaataaaacagagctagtaggatttagtgatagcagtcacaatgttgatgaggatgatggaagaagtacgacgggtcatattttctatcttaatgactgtcctatcacttggtgctcgcaaaagcaagaaactgtggctctatcgtcttgtgaagctgagtttatggcggctacagaggcagcaaaacaagcggtttggcttcaagagttacttgaagagattgttggaaaaacgtgtaagcaagtgttgatattaattgacaacaagtcggctatagcactcacgaaaaacccggttttccatggacgaagcaaacacattcacaagaggtatcactttattcgtgagtgcgttgcgaatgaacaagttgaggtggagcacgtccccggaaccgaacagagagccgacattctaacaaaggcactcgggagaatcaagttcaaagagatgagagatcttgtgggagttcaagatatgacaaagtgtagcttcaagcttaagggggaaaatgttggagtaagcttgaagcttacttgaagaagaagcaatcaagcaaaaaggaaattaaaattagactttgtgtttaggaagttgcctaaatacttatgtgtgttttcctaataggattaggaaattgtctagttcttttcttatataaaggagttgcaagagtgttgcaaaacttatgagttgagagattaagattgtgtgtttttaggttttgagttattttcttaaagcaataaaagagagagtcttttattcataatcttgttcttattcttgagtttgatatatagtttgaatcaatatattttacaagcattcgtcacacatctgatatatacacattccacactcaatcaaagtatggcacggcacaatcccaatgatgcatttagatttctctcttctatgacattctccttccatcactactccatctgcacatcatcactttcatcatcaaggcgttttctttacatactccggttgagtttatgctcttctaaaaaacctgcaaaaatcaaatcaaaattttcattacaacgccttctgaatttcagaaaactatgtgcaacataatcatgcaagtatcatatactaatctaaaaataaaataaaaacctttatgcccaaatatccatttcagacatatattttagtttttcaaagaaactaatcttcttaataaaacagaactaggattgttatttttcctatatatcaatatgaacaattaaattcaagtagattctttcaagactgcctaatttattttccatttcaagacaattttaagactaatctaccaaatcaaataaccacgagaacagaggttaagcttctttgttattatcatcttatgtgacctcttccaaatatatatatatctcaaatgttttaaatctgaaagatatctagagcatcgtagttaaagaaataaaccaaaagagttaccgttatgtaacgttcaaatttacctttttctctaacgttccgactgacgtgactcttatgcgcactgtattactagaaatcaaaataatagattagtttgtttttttgttacggctaatagattacttgttataaaagtaaataaaataaaaagatcaaggaatccgattagattcaaatccgaaggctattgataagtacttaatcttcttaccattacagataatatcaaaccgtcacgtggacagccacagctttctttattataatatttgataaagtattaattcagtttgattaaagaatcttcctcttaatagtttaatcctaatcagaaacttcgaaaactatcaaatcaataaaatattaagaacacacacgttgaaaattcccctttcacttatgattctcataaacaaaactaagaaaaacaaacaatgttctcaatagtcaattccctaataagagtcaaaaaccaaaggcttgaccctcgttgaacatgttgcacatccatcattatatatcagaagaacataactttcacattcaaagatcaataaatatcagaagaacataactttcacattcaaagaattttaagcgacatctcaagtctcaatggaagcaacatcacaacaatttatgtctcagagttaccttaacgctcaagaaaccaccacaagggcaacgaaaaattacctaacttcgctccattcgacacgtaaacaaccttcaaagcccttgaagaggcctgcaatatcatcacctttgaatccaatgcatcctcatgtctaccgagtcgagccagtaaacttcaaagtgttggttcagaggctaaccggtgcacctgagcacgagactgtgcaggctaaaccgctcaagacttcggatgatgcagcaaagcagagttcttcgtcatttgcgtttgatccatcatcatcttggggagatttctcattccaaaatcctgcaaatatttccagatggtagcttctactcttgcaaaatgcttcttttgattgaaatgcttaacattcttgtatttatttttagtttgtttttaataaaccagaaagatgtaatcatatatttttcagactcgcattctagaattaatttgttatgtcatttatctgtaacacacacataatttgtgggagttaagacttttgattaaaataaaacataattggattgattaaggattctaactacattgggaataatttgatattttcattaaaagaataaattgaattaatcaatgattctatatacacatgtttaacatgtgagaataatttgaaattcacaacaattaacgttagaataattttacagctaattaatgatgattattcttatgtgtgtagatataatcaagatgagccgtcaatgttcttctcaccaagcaatcttcgtcgtcttctttatcgcagctctctcccgccacctcatgtaattttgattctatcatttcctgatgaaacacaatgaaacataaaattacaaacgaaaatatataactacgcatgaatcaacattcaacatgtgtttacgcatataatactaaccagactaagtgtatccgccggagaggttgtgaaggaggcgaagtaggcaggttcagggcgggcgctgcacgttagcatggtggcgcaaaggaggagagctatcgtgatcaaagtagagagatttgccattttgtgattatagattaattaattatggatatattgaaaactaatgaccaaagcatctttatatatagtcaatcatggtcaactcttttcttaatctagttcttattttaagaagaaaaaaattagagtgttttgttcttatctttttcatttgttaatgtttttatctattaaaaatgtagttgtaaaagttaaaaaaagaaagaaagaaagatgtatatctctttcactcgttttcaaaaaggaaacaaatgaatgtgtaatattcaaaattttatagtattttaaaattatatataaagaaaagtggatttgataaaagttaggttataccaatatgtttctaaagattaaccatcacacattacctcgatttatattggaaacatctagaagtatatttatagggaggttaaatggactgaatgttttttgctactactgattattattattttgccataatttgccactggtgctgttaagggtaaaggagattgttaattggaccaaaaccaatccctttttttttttttttccaaaaccaatccctaagaataataaaagaactttttttgtttggcattagtctatcaaaaacgttgacctgtttttacgtgaagtcaaccgttgattttttcatattgggccaaatataccaatatactggcccaatgcaattcaagcatgatggtggtacagtcggaaataaaaaacttgaaagttgaaacatacattactttaacccgatttaattagtaggtcgacacgcagaaaaacaatttatgaattggttatcagtaatttgatgtcactaattagtacaattatcgcaatagttgcaggccccaaccactataatgttaatatcacgagaaaccaatcgatttttaaagttgcaaagcaaagaagttcgaaactcgttaactaaacccacccttacgtaaacatttgaccatattctaatatgcatgtacatatacgatgcatacatatatatttggagctataaggagaaccctaatggctaatgacgtaccaaatgacgccacacgataaatctcaacgaacactccaccacaaacatatagattacaaaaagatacatttaaaaagccataattagtggattgctaacgttacttacttactttacatccatttactcatatatatatacaccacacacacaaaaatatgtgttaacacgaacgatgcaaggcgacaaaaatataaaagtaatttaggaaaaatatatcgctaatttgttgaactgtagaagcgtagagttaattttctggatctgttgagtacatccgacggccaaaacttaatcgacacgaaagtttaggtcgaggacccgagcaatgttagcatttagtcgccattgttcttagtcttatactcttattaatgacttaataatatcaattattgatcgtcagacttatatctatttaatatactaataaaaaattagttttatatatatatatatatatatatagaaaagtattaacgatttctccagtatgcgactacctggagactaaattatcttaaacaacattctatagtatttgtatccgtaaagttttttttttttaaatcagtactcaataacatcaaatatttgcaactcattttcatagaaacgacagactttttcaaagaaaattcaaatagcaagagtgttgcatgtggacatccattgccaaagaaacgacacgtttaagtttttccatgacaaaaataatagactcatttagggttttcccaatttacaaattttgtcgttatatggcctgtattctttttatagtgattaaaaaactttacatgcgtcatatttagaatttcttcaaactttttattaaagtttcctcctcgactttagtttaagatttttaaatttaatatgacctaaacggggctaaactagccataggctaagtaattagcataaatataagaaaagcatacacaccaagttgactataatcttacaaataagtatttgaagttttaacaaatttttaagaatatttgttcagatatgatctactggaattccgttacatttcaatgatagtttttgtggttaactttttttaaagaattaaatctttttaaaaaaaaaaattgtttttttcagagtttatatagtaaaatttataaatataggtataaaatcaaaatttattggattttccgtaagtttaattgtatgtatgaatcatcaatagtacaagatccataatatatacctatacgcatcaaaattggtatatgtttcctcaagcaaagggaagttcgttaattagcataagggtaaagaataatgtcttctacatgattcgcatgactattacttgagttatataaagattctatgtacgtatgtcttcagatatgtaaaggaagaattaatgtaattctaaaatgttctaaaaaattgatgcgggttttaatttagtggtttgtatgtacgaatgttgctaccctgttcgctgtccggattccaatatgataaatatgcgtgtgagtacaaacgaaaaaaagactattatagaacattaaatctttaaattattgagttatttacgtgttaaggctcaatgaatattcgaactaaagttgtgacatcaatttacaagtaaatgtgggctttccgtcttataaacttttttcatttcccatgacatgtgtattgaactcctttaatacaataatgaggtgaaaactttttaagataaagatttttgtaactccactagggaaaaatcattgtatcaaactttaaaaaatttcgaaatacaaatgttaaaatagaccacttagcatgaaatgttcgtatacgtatatagatcgagctttaagaactttgtactaattaggatcaaactataaaatattttgctaatatatcaaactgtatatgattatctcaacagaaccttgttgtaacttgctataagccatgttgaaagctggttcaccagccgggcacaagcttagctcctggctcatcgaccgatctgcgatacgactttttcagtggttaacaatagtaataggtccctccactcgaccttttttaatgtatataaaaagctaagatgtgagcttttttttctggacatttaaagttgagttcacatgagaccgaaccaaaacatgaatctggctataataaagcgacgtgtatatgtaatatatataagtctttgtcctctccactttattctatatgaaatgcatgtggccgttgctccacattttttgtttctcatcataaataagctaagtaaaggtatctaaaaattaatataattatagtatactaaatttaattttaatcagaattttgtactagggattgtgtgatttagaagtctaggcgcatttttcatccttattaattatctttccttagattggtaaattattaagcgaaaaagctatgtaatgccgtatatatatttatacaatcaattatgattgatgcagcattttaaccaaagagaaaacaattcaacattaagataaaaattaatttattttctatatttccattaattttctgttgtatatttaaacattatttacgaaacaatatattttgattcaagatttaacaattaaattattgaatttttcacattatatttctaatgaagaaactaatctaaaaatactctacatttgatgtatccttgcaatcgaaatattcaatgtttccgtgtagcaagcaagtatatatacttaactttttggtcataggttaacttatagggttctttacaaaaagcattggtctcatctctcatgcaaagcaccagtttggttcagttaattgaaaagtatgttccttagattctctgattgaaacgatgattctagtccctctccagtgtgtgtccatcccgtgttaaaagaaattgacaaaactaaaataaagaaagattgccattctctttaaaaaaagattgtctttctctttaagaaagattattaaacagtgaacataaagaaccacaaattactctattctgactgtaaatatcataattaaccagcatatgttcacatacaatttttgttttatctaatcactaactaaaatgataagtttattgaagataatatggaattgataattttttgttttttttgttgaatcttctaacaagaatgagagaaaactatatgaagtattcaattccaatatgaaaagttaaactttttctaggagtgtaaagaaatatctcattcttgaatttcttaaaacgtgtgaaatatggactgttttcttcatcactaagctattactggttacataattttcaaatttgttaatttatttttgttatatggacccaaaacaagctattggtgccctacacaatatttcctgcttttacaaaagttggctctgccaaataaaaattttcaagtttttaaccccaccatagtgcaacatgactcaaaagctgtttatacagtatagtctacggtcttacatcgtattttggaaatatgaccaaattaccccttggtttgtccataaatatcaagctccaacaatgcaattcttcccttttccccttctaatttctctcatctctctattagaaaaattattagcaattatgttgtccactgcaccggccttttcattctccgaaccgggtttggttaatcaattctcgggtttccaaaccgggttcactccttgggaatgggattgctctgatctctttttcgtggaccaaatgtctcttgaaccggccatccctagtccttgttatggtgaatccgacactggttccgtcaaaattaattccggttctcatgacatgaaaaccggttctgacgaatcttgtgccggtttcgtcaaaattaatcctcgttgtgacgacgccgacatatcaaacgatctaccgtgctctcaagcagatgaaccggactcggacgacacaaaacaattgacagccatcacaaatttcggttcgggagagaataaccataaccggaaaaaaatgatccaaccggagatgaccgacgagcggaagaggaagaggatggagtcaaaccgggaatcagcgaaacggtcaagaatgcgtaaacaaagtcacattgataacttacgagagcaagtaaaccggttggatttagaaaaccgtgagctcgggaaccgactccggttagttttacaccagcttcaacgagtgaattccgacaataaccggctcgtgacagaacaagagatactccggctaagattgtcggagatgcgtcggattctgatcattagacaacttcaacaacagcaacaatgggaactacataaccggagaatgatcatgactgaacaaaaccaccctcatcttcaatgatagatcaaaatatttaagaagaaaaaatatcgaaaaacttagaacaataaccaaaaaaaaaaagcaaagcaaaaaagaaactctcgctatgtctctctatctctctatgtaaatgaaatgaaggttaggaagagaaaatgatagttttctaattttcctttccactttctcgttttctatatgttgtgactccactacactagagaagaaggaaaacaaaacagatttttattttggttttctttttcccactctcgtgtatgagataaataacttaaagagttattaaattaatacaacgatttacattattacttagtggaaactggaaaggctttatgcgcattgacatcatgctacaacgcccataattgttgaaaagatacactgtattttaaagtactaaaccaagcctaataaaccggttgccacgatcccaaatactgtaatatcactacataatatatcttaatcgttaaaatgcctatctcggcccaaataaagttttggaacataaagcccaacaataatttaggtcctcaagtccatttttgttacgaccctaaaagttttcccttgatgaaagagcaaagataaaccctagtttgtaactgaacaattagaataaagattgtgattatatgaagtgattatcaaacaaatgattcagaaatcggaaacgaagaaagaatcagaagaacaacgattttctaatttcctctttaagctttagaaagacgaaacagaacataatgaaagagaaaaaacagagcttttctttttttgtttcctgccgcaggacttggtttcagttttcaggttgtgtaatgaaagtaatcgccattgtgtctgttgttctctgcaatggggctgctcacggagctgttgttagagagtgaacaaaatgtggacttttgcaaaacccctgtaggagaagatccaaatgttggactattcgttgtactgtttagtacttcacctagaggacctcctaaggagtttccccatgagattggtatccaagtattcacctttttcacagtaggctcgattgttgtttcatcggtttggatcgataggtcaagctcgcgggatagcctgagaggcgagagtgttgttttttcttgagcattgttgttgttgtgtgtggaggaaggggatgatgatgctattggaattgacattgagagctgtgtccaatctgatgtcagctcttcaggccaagaattgtgattgtgattccctgaatgcttctcttggttgctgctgaaatccaagaacgatgatccataggtctttgcggtattcgggttgagtaacgaatcagaggatatgtgtccaaactcaaaagggttgttgttgtttctgtgtttctgatgaataaccggagattccttgggttgtaagttgacggtggaaggatatatcgaaactcctctgttttgcaagagtcagtaagtgagatatgaactaacaatgaatatgcagagtattaaaaatctgttttcacctgttgttaggtaaagattctgtagaaggattgatatattgacttccaatggcgaggctgcggttgcttgatgcacgggcattgcttctgttagtattaccagcgacaacaggctgttgtggtgtagtaaccgctttggatgcagcagcggcggtttggttttggccagattggacttccacaggctttcttgaacgatgacggcctctgttgatgtgtctttcacagtatttctgatcaggaacggcgtctcttgagcaccgccatttcttcccatctgttctgcggcatctccctggctcagggtccatgttaccgcctgcgaaaccgagatggaaagttccccatccgactacacaaaaccgaacataaacactcattaaccatttataacaaaattccctatgaaaaatcctaaaagcaaccattgttgtaaagacttttcaaccaacaagacaaatcttgaaaaccctatgagcaatgttatgaaggatttagcaccaaaatgacataaaagactagataaaatctgattcttggattaagcaaccacaccacaaatgagttgatcaaaaccccaaaactttcacaaacaagtgatcgctcaatggaaagttatgtgcaactagaaattgtgttaaagagatggagcttacaggaactaggaggcaaagatccgtaaggataaaaagacttcttgatagagatgagcaaactagaaggaacagggacattggctgtgatgtacttatagatcaacgcctgttgctctaactcagcccattgagtcaatgtaaaaggtcctttaacacctgtgaagttcccttgcatgctcatgttcatcatcattccaccagaaccatatcctcctgcattccacagcaaaaatgtaaaaaatttgattattttacacaacccatttcaccaaaatccaatcaataaagagaagacattatcaaacctgagcttctaaagtaagaaggtggaggaatctggtgaagaaacggcgagagagagttcttgttattactgctattatccaaaccgacatatttactgaaatcaagagcgtctggtttatctgagaagctaagcatttgttcttgacggcgagaatcagaggaaagaggagaagcagatctcatgagaggaatgccttggtgaaacgacatcgttttgcaataagcagctgcaacagaagaagacaagttttcttcttcttccgctctagttgtcgttcttgctagcttcaagcttcgttgcaagcaatcctcaccgatgaatccggatctatcttgtttagttcctataagctcttttagaccaagtgactcattttcattactagtaaccgacccaagaacatgaacaccaatatccataagaagtaagtaatataaaaagaaaaagaaggaaaaaaagttagataatgacttgagagatagttgccatgggaggaagatagctaaagatgagagaagagagagacagagggagaagaacgaggcttacttttgattttcttgaaagagatatatattattatgtgtttttaaaataaaatgaaaatagttgtggtgaagctttgggaggagacaagaatggtacctaaaaacacaatccggatctcggacatgttagaacatatttatccaatgctttttcattaattttgcttttagttcttcttctttgttttgtaaagttttctttgcttgctttaaaggtacaaacttagcttccaatttgtttcaagttgtgtaaatttatggtcccaaattagttgtataatatggtggtagtttctctataagaaaacgtaggctatttctgtattatttgcagtacatatttcccaatttgtaggcatttttctttatgggggttattattttagattttagtaattttcttttgttgtgatatatgtgcatatagggaaagctagctgtaacattgttaaaaaaaagggagaaactagctgtaacctgtggagttattagattatttttgtaatgttcaaaaggaaaaatattagtggttttagaaatatagcaacatttttacttatagtaatagtcttaattcatagaggaggtgaatatatattgatatattttgtaatttgtaatgcctgtttttaccagaatttgcagaagaaaacaaagggtatacttgaagtgagatttttggaatattatactatatacacatatattcacacttttagtgagatttttagtctaggaaacaaataaaagaattgtcctattcatataataaataatagtattgagtggagtaccaaatatttatcaagattcacgtggttccaatgatatttttggaccatcttcttggtcgtctccccgaggatttaagttacatatatcggatgggccaattctattcttgagtgatattacatcaacggttattgatccatgtgttcgattacatatgtaatcagtgcaagtaaaaagtagtttgggatataactttgctggattttttttttttttctttttttttcttcactggatttattttctttgttcattaaaattgctggactgatgcggttagtaagcgttatttgctttgaccataaatttagtgacactccgatttcagttatgccttcgggtaataatttgcgaattgtcttttatttatcataaaattaatctgatggttggatcattggtatgtcatataatagaaacagtaaaaccaatgaacaacaaaaggattagataatctttttttcacaatatagtatgaacttatgtgaatgatatatacagacgtcgtactcatgattttaacttgaaaaccattcaatatcattcacttccaaactttgctattgaactgtccatcacagtttctttataatttttgtataatgttgaaatatgaaaaaaaaaaaaaaaaaaaaaaacactaaaactatatcagcaaattgactagcttgtggagcaaagtgaatataataacaatggaaaaagataagagtgttactaccaataccatccaacaagaaacgtatatgttagttaaagctttgcgtaaatgtcctaaaaagaaactaactcacaaaaagtcacatgtggtgttcatgcatcgatgatgtaaataattaccactccacataatattatgtagttaaatacgacattttggtttaatttcataattacgtcagatctgattttcttttagtcatgctccattttgttcgtattatttttttctcttgtaactttaggattcgtaatattattgacgagagattaagttatagcaagttttaacttttaaagattttactgttttgcaaaatcaatggttgatagaaaccccaaagaagttagccaatgtactagctaataacattgttttacattaatttttgcgggctaccttttgtacgtttcttagtcccctctctctcgcataggtttcgacctatatcccctgcttacaaaaccaatgacaataaacaaaatcaaagataataaaaccaattatctatgcaaccaaggcatttttgggaaagggatgcagactttaaaatatccgaatattttacacttctagatagtctacaaataaacaacggtaaaattatacgaaattgtatatctatactatgtttcatggatcataacatatgaaaatgtagatgtgttgtacatagtttacattctttagatatgatttgtgtgataaccagtaacagtatttatttgatttattactctctttcattttttttcattttttgaaacaaattatattgacttggtcttcaaaggctgagtatgtgactccacaaatacatagcatcctattatttgttatcttaatcgcgtcacattaattaattttcatcatgtaccactcgtacttgtagagcatttactacattagttacaccaatcattcgataataagaaataaacttaggagaattgattaattattgatgtaaccgagtaactggactacttaaaaatatatcgttttcaattttcattatcttatatgatgatatagatgcgtttcgttttcagtgacaataatagtattttagtatattattaactaattaactaatatcggaaatcatagtaagcaggaggaggagcgtggtgttgtcaggactataaaacgtatttgtggaataaatccctttacttagccaaggaaaaaaacgtgcaacagtatatataaatataaatgcatgcaaatattatgaattgaatgtaaaaaaaaacacagataaaaccctaaaatcgaactatgagtattttcctttcgtatggtagtttcggccaaaaccaaaattggctttgagttttttgacaactcaattattgggtacagattgaaacaattgtattttgttttcccaaaaaagcaaataattagccaaaaaagaaacaaaaacattgggaacaaggaaaaaaatagtgggtaaaaaggtaaatttgggtaagatgtggtgaataaatgaagtaggaggacattgggtggcgtgtgggaggatgtgggacacatgaagagtgtcgacatgataggtgagagatatgatactagataggttctttagtcttagggttagacttttgtgacttttgttagacacctacctaagtggttttgtcgtcaaatctgtttttaggactttggttttggtttaagtttttagtcaaagcctaaaaagctcatgcgctactctactatacacatgtggactcatcttatttaatttcctctctttttcattaggtgtgccgtgtgcatttatgcctagataagataaataagatagaaaaatatttactcttttactttatgttattctaaccagtaacggttttaataacataaaattttaacagattattaaatgaagagtatatgtaatagaaaatgaatcagtaactatccggaaccaaatgatatatgaagttttgtatctttagataaggatattttgatttagaagtcgtggtatccgaattcattttcatgtgatatatgaacaacataaaagaagtaaacttgtcattagctctgttggttaataggtaattaggtgtggttttggttattaaaaacgtaaaaggagtaatatggaatgtaagagaaatagctgaaaacgagagtggctgagagaagggatgtatgaagtagcaaagaaaaacaataaaaccttcgttccttgtgataatattattcgatgacatatgtttagtactttttgttactagtaaattcagttgaactgtactttgttcaacatagcatgtactaattctattttatatttacttatttagttaattcggttagagtttctttggtctgatctgatgtaaccttttaaaaaattaaagtaatcaaaacaaatttgtagtctgtttggatgagtgcttgtacacaattcgattggattatattaagtggtacttttgctaacattcgaattgactatcacaattaaattaaactttttaaaaaatgataaaaacgattgattaaaatttgaaagttttttttctgctatttaaattaacgattcaacatatgtatctacgcagcacttgaactacactaactacaattaataactacatcaatcgcactgacagtagtatattttagcatcatattacggatttacagttttccattagtttaaaatatttcaactatattaaaaaaaaaaaagcatcaatttcagcataacttccatatggtaaattatctgatgataattgtttcaaaacacaactcatagataaatacaggtttataattaacacatgagaaatgacattaaacggttcaattggcgtggtaaaggtgtagcaatgtagttactgtttgttggtaggaagcatagtcgcataaacatgcatgggtccaaatcatatcttcaaaacgagtttttaaaactttaaatgacaaattatgagaaaaagagaccaaattgaacacaaactttacatcgaaatggaaggttcgtagggagacatgggacacaataagacatcaaagcatgggctccattccataacatttccatattctcattctctttaatgttattaagactataacgaataaatatgtatagtattcatatgggtctccatttcaatttcatcaagtgtgtctagattacacacattcaacgtacattgctctctttatcgttctatttctcttattttctgatatttttatactcgttgcgatagctttgttcatgcacatactcgacaagtatcctcatccacgacaaaagaaagatatacacgataatattgcgaaagatctgaactgacgtcatattgtcaagtgtatgctaaaagttcatattaacatgttagtcggttcatatctatttttaatcagatttttcattaatttattgtcgtcgcatgttttttattttatgcagtcagaatacaatatttattttcggagaatcacatttctaaccctcatattgtcaattcgaggcgtcgagcctttcttaattgctgtccagaaagaggaccaaaaatgtccactaaaggcgggctttacattaaggcccaataaataaaactgttaccaatgtcatgggcaaattccacaatgggctttaagtaagcgtctaacggcctttgtttttctcgaccgtcagtgatttactttttctctcttaaaacaaaattttgaagttttctcaatgaccaccaaacttatgctcatttggtaaaagatgccaccagtaatttatggatatgaaaactctcttttctacagaaccgtactgagattttaatttggcaaaattacaattttcaagaaaatttcatctctgtaattaattaatttaaccccacacgcaaaaaactttctatatatatgaaccataaatatggatgcagaatttgaagaccaggtctgtttggggatagattttaacaaatgatccaacctgtccaccataaaaattgattaattgtttttgaaaataaaataaataacgcagaatgaaaataaaagaaaattggatggctgtcatattcagtacattccgattcaaactattggctattttcttttgttttattacaattaaaataaacataaagggtaaaaccagacacaaagccctctctttggtctcattcttattgcttttctcatgaaaagccaaagccaatatacagtgtaaagaaggatttagaaaaaaataatatttttgtagacgatattcaaaggggatcttgcagaggtcatgagaggcatgtatcagtaaaagaggcaccttcctaatttataaggattttggagttttcttcattatatgattttttttcatttgtttcctttttgttattgataatcagaatatgggaatatgaacactagaaaacatatggaaatccaaaatcaaccaattatttttgatgtgtgatcatgaaagctaatcttaaatttggagttatattcatacgcttggaagggataagtaaagttaagtttatagacccgttatgtcaaaggctaatctcgaactaagaaaacttcattgttataaaacaaaaaatgattgctatataaagatataaacattcaatgatccgatattactcttagtgtagtacatgcaagtagctagttagaagtctataaattagaggattgttttggactttttggtcttcgaagtttcaagctggatttcaaaatgtgttatgtgtatcaacaacagagtatctcaaaatcttaacattaaaataaagaaaaaaagaagaagaaaaaaacaaatatgtaaaattagggaacatattagggtcatctgttccaagaaaagtcaatcgtaatttgtataaatcttggatctacaaaaaaaaatcttgaaactgatatagaattgaagataatagattgttgctttgcatggcttttttccataagttgaattatttttaaaatataaattcataatgttgttaccctttagacaaaggagagcgacttcgttagctttacatatcctcagtgcctttttgtcaatttttgcgtaagaatatctaactactaaattttattttaagaaaacaagaatctctgattacagagagtttcttttcaacgaagacaaaaaaaagaaaaggaaaaaacaaaattattttcaacgggatggaatagctatgacctttttgcatgtatagtatacgtaggtagctttatagagaaatacttcagtttatttatttattattattgataataaatgtgaatgaatctaatactaataggaataaattttgtatacgagtaaagatgacgccaaaggatggatccaatccatggttaatggatatgcagaataaagagagaatgacataaggattcagatgtgacgtgacatattggcctcgattacttggactatgacatttcagacctaccaatttttacaaacttttattccccaaaattttgaaataacaatactataatttttgtaaaaaaaactatttagatcaaacaaatagtataatttataaacaattagttgaaagttattgactattttatgatgtatgtatcattttgttttgttgcagtcatataagttaaaatttctataattgttagtggttttactagttgtagcacttaaaaagtcgtacaaacttacaggttttgagattagtgttttacgaaaagctgttaattaatttttagttaaattaagtttataaaaatgtctaatgacaatcgagatgagacctgatataaaacaaaaacagatacaaagagagagttaaatcaatagtatcagtcctatcagcaacttctgattaaaattcagtaatatcgtttaattaaatgcatatgaaacaaaaaggcccaatgggctatttatttttctttaaattttattttcaagcgtgcgaatcgcaataaaaactcacaccaataaaaaaaaagaggaaaagaaaagtagaagacatgctctgttaagtggtcgctgtcttcactctctaatcttctctgtgtatttggcagttgaattttctctgcatgcaaaatctaattttagatttcgtgttggattctcattaccttcttaaattcccaatctacccctgtcatcaaacgtcaacgttaatatctctctctctctcttattcacattttttgggtacaattttaataatttattgtgatttttaatgattcgtctattattgtgtttctcctttctctttcaccatacatgcaaaatctcctgcatttctgtctccttcgggtaattatgtgaataatagtggtcctaataattttttaacatctaaaattagatcctttagttagaaaaaactttctttgtacgtgtgtgtgtgtgttttaagttcaattataactagtcacatgtgatatcacaatatatatattgaaattggaattattcatattaatgagttagcattaatatatatacgctgacattaccaaccaaatgtttctgcttttatggatagttctatatgttgcacttgattatagatactatataaaactgggtttatttaaaatccgtacccataacaaaagtggaccaaaacgagatccatggttttgtgtttactttgttggttaaccagataatatgattatggaagattaaatctttactaaattataaaataatttggaaaaacaaacttaaatatgttgagtgtcttcagtgctcactgttcaggaataatctcgtgtagtcctacttgaactagaggttgatatacataaacacgtgaatattttaacgaccgtacataaacacatgtatcgatcaaatacaaattataatgagactagaatccaagatgaggatgactctagcagaatatacacagctaagaatttgtacaagagagtcgaaaaatagattctaatcatttaaaaaagatatggatttcagttacggattgatattaccattacgcagtagtacatacacataattttttgttttgttttaccgataatagaatgaaaatgttgtgttaaaaatattggttttactaaaactcgttttatgttaactatataatgtctttccgcatgtaaattgaaacaaaactgtaatacaaattatgttaagccattgcaattaaaaaatccacgggtagtaaatcctcagaagattatgttaagtctacaaattttctctttagattagtaaggtttaggacaaaattatgtataccttgcaggggtataaaggtcactgcatagtcagactcagcatgaagccaaagagtcgtctctgtcctaaagatatctacagctgcttcgcctgtgaatagagaagaaattgaatgatgagagatcccatctagcgtttcacgtttgcgttctccgtcgcaactttggcggttgttgactttttttcttatgtcgttgtttgactaattttctcagagtgagagtgtaatcaagaaaactaatattcgaaaagaaagaaaaaaaaggcaagaaaactattgtcgaaaagacataaatgacactaaaattggattattaaaaatggtatatatgtttggtggaatttataatcattaccaaaatcaaaggaaggagagagggacctcttcgtgcttatgatttccctcctaaacaactgctcccactatccttttttacttccaacaaaatcattcacacgagaaaatctgtctcgtgatcactttcatgcaaaattaaactaaattttggtattttttgtcaagttcttgctgttttaagtcgattatttggtaatactatatgtgtggatatacacatccaagctaatcaataattgatctccttctcttatcaataaattacaccacattagctaatcaagctaataaattacaccacattctcttatcaatttttatatggtataaataaaacaaccgactataggctacagagttggtattaaggcattattgccttctagtcgaaggaatttttttgttatgataacactcgtgggaaaaaaatccagcctaatatgctcatttaaaggataattgatttaaatgctttaatcattaaaataaaaggtttttgcttttaaaggttaccaccgcttaattcatcattaggagaatattaactttgatcgaaattccaaaatacttttttaacacataagaaaattttcagcatttttaaataaagggtacatttattgggttcaataaatatgtttccacgtaaagtttggaggtttaaccacatgaatgttttttgatttaaaaaacacataaattttcttagtaattacacatttttaaccgtccatccagattgtaataagtgacaaatctgaaaacatttttttttttcttgaatcttgtttaaattctctctgctgcatacttgcaggcatttgaccaacgactatacatattgaaagcaaaatatccaccagggatgatagggttagatcccacattcaatatcttttgtctttgttatttatgaaaaacaaatatttatcaggaaaaaaacgtttcttctctagtggtataagataataacaaaatttaatacttagttaatgtatttactatcttcaaacttaccatccttcaacattaatattgatcaatttttattttttttactaaactacttccactaaaaaaatgcaaaagaagagatatatatttaagtcaaagtaattaaagatggatgggtgattcttcagcaaaacggcgccgtagaggtgtcttatcctacattacagctgggttgtggcagacatcatagggcctacgtatatttgagctttactgtacgtaaagctttaacatatctagttagttctcactgtacaaacaaaacaaaatccaattcgtaacatatatacaaatactactagtactagattacgctacgtatacatcgctttttcgcaaatttctaaactaatctatacaacaaacttgaatgtttgttttgtaatttatcttaaaccaaagttttgaattgtgcattgggagctacactctagtccccttttttccccaaaataatctccttacatcgaccggttaaagtatttaaaccaacaaattttaatttgttgctgaaggtacaaacatgtcacatatatagagacagcatcgtttatacaaataatgttcgatgtattggaaatcaaatataaatacgagtagcgactcacttggtttaatagtttggaagataatgaaataaaaagatgaattcaaaggatacagagctatatatgtcgggtcatttagagccgtgaccaaaagtttcgtcgtaatttctacggtcggtcataagaaattttggacttttcttcacccttttatgaacttctgtatagtttttgtcggattatatatttgtattcgtatattttttgtttctaataatgatacgtaaattcacgataagaaagacttctttttatttaatttgatttaaaacttttgtttttggaaatgactcatacacaaggttaaagtttgatggtatccaatttacaaaaatgtttcgagagtgcgttcgagtgtcctaccaccatcgtaccaactcgtatgggtttattattaggtttttttcttctttttccaatgtctttataattgaaccactctaaatttctttttttaaattaggttaagaatcttgaattttctgttgattttaaaccaaggttttcaattcttcttagcacaaaaaaaaaaaaaaggttttcaattattaaagaatctaaattttttgagttcaagagtttaatgatagctgaaaagttatgaatgattgcaagtttgcaacagaatggtcgatgtagtacatatcaaaaacatgcatcaaaataaatattcgtgcttagcaagagaaacgattgaaataaacagaacaatcgttaaccacttaaaaatcttagaataattttgtagtgataattttctgtaagagagaggtatcatatcttacaaaaaaaaactcatttcagataaaataatgttgtccaatcgttaccaagtatgtttttgctgtcatcagttgtattgtaactcgtctcttagccatatagttctaagttttaaatgttttcaaagactttacaaaaataaaataataataaggtggaatttgtagggctaaaagcgaaaaataaaaataaaataaaagtaaagaaacgtctttctcaataagaacacagatcccaacggattcaaacagcaaatttgtgctttgctcttctctcttattataatatcctctcaaaaaccctctcctatatcctcctaaagccccccttccttgtttctctaccgcaacaaagaaaaaacaaaagtttgagaaaaatggtgtgttcgttgtgtaaccaatgattgggttttagcttactacttcgagagattataagaaagaaagagtgaagatacattatagaaagaagagaagcagaaaccaaaaaaagaaaccatgaagtctttttgtgataatgatgataataatcatagcaacacgactaatttgttagggttctcattgtcttcaaatatgatgaaaatgggaggtagaggaggtagagaagctatttactcatcttcaacttcttcagctgcaacttcttcttcttctgttccacctcaacttgttgttggtgacaacactagcaactttggtgtttgctatggatctaacccaaatggaggaatctattctcacatgtctgtgatgccactcagatctgatggttctctttgcttaatggaagctctcaacagatcttctcactcgaatcaccatcaaggtcagtagtagtaatgttggagtttttagttttcttggtgttgatgttgttgtgtcttgtttgatgggaacatgtttggttttagggatttatgttttattttttatactaaggacattttctgttttttttggttgttatttagattcatctccaaaggtggaggatttctttgggacccatcacaacaacacaagtcacaaagaagccatggatcttagcttagatagtttattctacaacaccactcatgagcccaacacgactacaaactttcaagagttctttagcttccctcaaaccagaaaccatgaggaagaaactagaaattacgggaatgaccctagtttgacacatggagggtcttttaatgtaggggtatatggggaatttcaacagtcactgagcttatccatgagccctgggtcacaatctagctgcatcactggctctcaccaccaccaacaaaaccaaaaccaaaaccaccaaagccaaaaccaccagcagatctctgaagctcttgtggagacaagcgttgggtttgagacgacgacaatggcggctgcgaagaagaagaggggacaagaggatgttgtagttgttggtcagaaacagattgttcatagaaaatctatcgatacttttggacaacgaacttctcaataccgaggcgttacaaggttgtttttttattttataatattaaactttgtttgactttcgttagtaatgttacatatacttacttaaaaggttatgtgaaacagacatagatggactggtagatatgaagctcatctatgggacaatagtttcaagaaggaaggtcacagtagaaaaggaagacaaggtctagtgcttttttatttaattatcattaagctaaacatagaaactttttaagtagtttatgatttaacgtattactgacatttgagttttattttcttgttttctctatgtgtgataatgatttgatgatcttcttctcagtttatctgggtaagtacacacttcaatcttcatggattcatgatttccccctcaaatttctcgggaaaataatgatggattttgacttctttatttttgtttgattaaatctttattaggaggttatgatatggaggagaaagctgctcgagcatatgatcttgctgcactcaagtactggggtccctctactcacaccaatttctctgtaaatcatcttttctaaactttatgtctctttgaccttgttgtatgatttatttatataatatgataatggatatttgaaggcggagaattatcagaaagagattgaagacatgaagaacatgactagacaagaatatgttgcacatttgagaaggaagagcagtggtttctctaggggtgcttccatctatagaggagtcacaaggtccttttaaattacatttatataactttatataatacatagtttaataatgtgaatattgactttgtgtgagttttttgtactagacatcaccagcatggaaggtggcaagcacggattggtagagtcgctggaaacaaagatctctaccttggaacttttggtaattcatcatgccgatgattttgattgttaaaacttaacattttcaattgcttgtgtcttacgaaatcttttgacactatcataggaacccaagaagaagctgcagaagcttacgatgtagcagcaattaagttccgtggcacaaatgctgtgactaactttgatatcacgaggtacgatgttgatcgtatcatgtctagtaacacactcttgtctggagagttagcgcgaaggaacaacaacagcattgtcgtcaggaatactgaagaccaaaccgctctaaatgctgttgtggaaggtggttccaacaaagaagtcagtactcccgagagactcttgagttttccggcgattttcgcgttgcctcaagttaatcaaaagatgttcggatcaaatatgggcggaaatatgagtccttggacatcaaaccctaatgctgagcttaagaccgtcgctcttactttgcctcagatgccggttttcgctgcttgggctgattcttgatcaacttcaatgactaactctggttttcttggtttagttgctaagtgttttggtttatctccggttttatccggtttgaactacaattcggtttagtttcgtcggtataaatagtatttgcttaggagcggtatatgtttcttttgagtagtattcatgtgaaacagaatgaatctctctataacatattattttaatgaatctcctttgctaagtccttctctcttcgttacgtattttcgatatattatacttattcatgtgctaaaaaaggtgaaaacaagggaaatatgttggaacaacacaaaaggttgcatgaatatatctaaactatgcgaactattatggctattgatagaaacatgaacatttagtagttgattttatggctttgatagttttggcaattgattagaatgttaatctctttatagagaaatagtaagaaaatatgtaaagagaatgtgcatggagctgaaatgacccatatctaataattaggtttcttgtcactttatttatctttttgaaacacattgttcttttaagtacagagaaataataagatgaataatggtaaatatgtaatgtctctccaataatgcgatatgctttattgaccatatcgttccacaacaatccaacataccttcaccacctcatttctaaattccctccttttgtctctttttcacacccccaccgtatcagcttttccctaaagtttcaccaaaattttaaaatattccctcctccatcatatttagtgattttttttctttttgatatttattaaagttagtttatactgtatctaaaaaatggagaatttattggttggaacttttaagagccatttactatgtcccaaaataaatatgggggcagcaaatttactgtaacccatacgtggggtaaatgaagtgagtagttcaaagttgaaacttgaaaacctttgatctttaaacataatgtccttcgcacgtgttttccacacgcgtggagtagtttgcagaaactcggaagcgaaagatggttattgggccttggaccattataatcacaaatctggcccacttttatcttttattcgaagcacgtttgcaggacattaatttgatcgtgcttttcactcgtgaggaagagttggtttagaatccggagagaaacgtagttattgggctccggcccaagtttaatttcaaaactcacttctcataaacccaaattttgggcatatgatttgagttggacaggatgtgattctttttttttttgtttctctaacaatataatgtcttgggttattttgtggtgaatatgttgtagggttcaaaacattatagtccacatgaaatcatatttttgggccttgatattttcatatcaatcaatcgaattaataacacattaattgcatcgaaaatgtggtttttgtttgttataccaaaatacgaaggcaaaactcttccacgcaaaaaactcttccacgcatgcctctaacttcatccagttctgttcgttatgataaaaaaaaaaaatataacaaaatctataagatttctaatttgatcagaactttataaaagtctaataacttttgtcacattataagcttttaggaaaaaataaaacgaccgaccttatttaattgcattgtcctaacttcccaaacgttttaatgagattttgcgtaatagagaaacaagccacgagttcgattcacagccacaataatctttctctaccaaataaagacttgatctttctcttctccttctatatccacgcgtcaattcgtaaaaccaacggcttgaaccaccggcaatagccgcgggattgcggcggaggattaatcaaaaaacgcaccacctgaaatctctctgtgtacgctaatggctccgacgatattcgttgatcactgtatcctcacaacaacgtttgtcgcatccttgttcgcgtttctgcttctatacgtcctgcgtcgccggagcaagacgattcatgggtctgtcaatgtccgtaacggaaccctaacggtgaaatctggaacagacgttgatattatcattgtcggtgctggtgtcgccggcgctgcccttgctcataccctcggcaaggtaagatcttttcttcttaattcaaagttttaactttttacataattttgactttttttgcttttgtcgttattcaatttcacttctatttctggtaatcatatcattaatcaacgaaatggtttatctttattgaattttgtggtttgaattgtttattagtttatttatcgtctagctcaatcacattcttgtaacacaagttatgttttaggtttctctatggacaatggttttcttaaagataaagttgcgaactttcgccttaatatttcaaaatcttgaaaattctcgtgattcttaattcacgggtaaacgtgttttgcttgttgcgttttttttgccgtcacggaatcaaatttagtgactttagcttttgtgtgtatgtgtgtgtgtggttgtaggaaggaagaagagttcacgttatagaaagagacttaacggagcctgatcgaattgtcggtgaattacttcagcctggtggttacttgaagttaatcgaactcgggcttgaaggttagaccaaatcaactaataaagataataacttttgttggattagtaaatctgacttgtgtgtattgatttggttactacttggttattgtagattgtgtgaaggatatagatgcgcagagagttcttggttatgctctctttaaagatgggaaacacactaaactctcttacccgttggatcagtttgattccgatgttgcgggtcgtagctttcacaatgggagatttgtgcagaggatgcgagagaaagcttctttacttcccaagtaaacatttcgttttccttatgagttttgaaagcatacatcttttagtttcttattgatatagaatgtgatttgagttttcgatattcagtgttcgaatggagcaaggaacagtgacatcgttggtggaagaaaacggaataatcaaaggtgttcaatacaaaaccaaagatggccaagagcttaagtcatttgctcctctcactattgtatgtgatggttgtttctccaacttgcgtcgatctctctgcaaacctaaggtgtgtaacatggttgttaggattagattttgtcatttgctctgtttctttgggacttaaattgatcaataacactctccgatcaggtggaggtgccatccaatttcgttggtctggtattggagaattgcgaactcccgtttccgaaccacgggcacgttgttcttggcgatccgtcacccattttattctatcctatcagcagctcggaagtccgttgcttggtagatgtaccaggttcaaaacttccttcagttgcaagtggtgaaatggctcaccatctcaaaacaatggttgcaccgcaggtaccacctcagatccgtgatgctttcatttctgcagtcgaaaaaggtaacataagaacaatgccgaacagaagcatgccagctgatccaattcatacacctggagctttgcttttaggtgatgcgttcaacatgcgccatcctcttactggaggtggtatgaccgttgcattgtctgatatagtcatcctccgtgatctattgaacccgctcgtcgacttaaccaacaaagagtccttatccaaatacatagaatcattctacacattgcggaaaccggttgcttcgactatcaatacactcgcaggcgctctttacaaagtctttttagcatctccagacgatgcaagaagcgaaatgcgtcgagcttgcttcgattatcttagcctcggaggggtttgctcatcaggacctgtggctttgctatctggtttgaacccacgacctatgagccttgttcttcatttcttcgcagttgcgattttcggggttggtcgtttgcttgtacctctcccgtccgttaaacggttatggcttggagctagactaatctcggtacgtcgtcatcttttgttagaactcttgaaatactttaaaatttgagaaaatattgaatcgttgtttcttcttgtgttatgaaacagagtgcttcagggatcatatttccaataataaaagcagaaggtgtgaggcaaatgttcttccctcgaactattcctgccatttacagagctcctcctactccttcttcttcttctcctcaatgatgaatcagaaacattgctttgaagatttctcaggtgttgtaagaatagctactttgcgattatggtacgaatgaaccgggtggtttgatttggtttttacgaactttggtttgaaatttgtactcagtccattacagacaaaatcatcaagtaaataagtatctctttgttaattgttagaaacatgcgttttacataatgatcaacgtaacgtacaaattgtatttgataagtaataacataataagattcttcaacaatttcatgttcatatatttgattgttagaaacatgcgttttacacttggttttgctttgtgttacacaaatcaaaaaacgaaaatcaaatatatgaaccaagtgtttttacatgggctcttgtagtatttttacctggactctcgaaaaaactagtttgtttgttgggcctaagggttgaagcattgatgggctgcagatgcatgtaatcacttttttgttttagtcatgttttcttataccattttaacttagtggagaactttaggcaatggccatataattccttgtaactatatcagcaaagcaaaaatcttaatggatttggatgatattttctacttgtttgaatttgacagtctatatcatctattttactttgcccaataataacaaattcgaaaatgatgattaataagattgtcaatcaccttcaacttagaaacatgagggaatgggtgataaatgatatgaaaacaattgaaagggatcaaaaaaatgtattggatttatatacattaaggagtggagcccaagtattagcccaaatctaaatgctacaacatctttaaacccaacattcattgtgatgttgagtctctctttattttttttggtcgtttttgagtctctctttattactagtacatttatcaaaataattcagcctcctaggggcggagttagattgtttaattttactttgggttgaaaaaattattagtgttttcagaaattataaatttttacacatgttaaagaaacatgtcaaaacattccatacagaagaaaaaaaatctaagtttggtattctattctattttgaaaatgagatttataatttaaatcggtttgtatactaataattatgttatacatagatcgggttcaatctatcactcccatacgtagacaagcccccacgcacgcatctacgtaacgtctcccataaattaaactctctttctccaactaaatctttcctcacacattgctgtacaccattaatacctttgttgacattgaaacttcattattcagtcaattaaagtctctatgtcccaatttgatatactgtatatcctccacggcaaagcttccattttaacaatcgtggtctaatgttttaaaaatgatggtaccgataacataatttttgagaagtagccgtaggcaaaaatgttttgataagagtttttattatatatataaaaaatgttaataataattatcagactttattatatagtgttggagtaccagttctttgctcttatggataatatacggatttagttgacgacacaatatgtgtacgtaattttcattgacttcgataatatagatatcgaccaattctagctgcaacttgttaacaacacaagatgtacacatcaaagcctaatcactacacaaacatgtaagcttccaagaaatcgcggttattagttgaatcattatcattccgtgtacatgttgcgtgttttcatttcctccaacttgtacggacattaattaaaacctcacatgtattttggaccataagatgatttaaatctcaaataaatctcgaggcctaatgtttgttacacaaatagacgcaacttatggattttatcgaacatataggttaatgtttttgagactgtccagtaatgatttatagtattaatttttaaattatactctctaggatttgtaattctcatattaacaatgacaaaaaatcacaatgaaagatttgcgtcgaataataaaaataatgtaattaacttttgacttcaacaaaacaatgaccagttgaatgaaagatcgaatttattcaacggtaccaatacaattgtcatccgagtcaaatgtacgacatatataattggataacatttgaattttttgtcacgatgaaatgatcgagctgtttttgtttttatttagaaaggaggaagagacaaaagaagtaatgtaaaactgaaggtggatgggttgaagaagggtcctacgttatggaggaggtgaagcaaattggtccagagagtgtctctcctaggaacttcttgaggatcagagcaacgtgaacgtcacgttagttgtcactcaatttcaattgtacccaaatttattattgtcattggtaatactataaaacccactccatggaaattcacatcgtgcctattaattttgtataaatatattttgcagacacaaataatatatgacactgtgggacatatatgcgtttgggttttcacgtgctcattcttctctgacatctctaatcatctctttcttaaaatttggatcattagtgacgactaaattttgttaaaacaatttctatgaaaaatcgctaggttaaaccctaatttgaatagtttgaaatgtatcatttaaaatatttataaaaaaaaatagagaaaccgagctatatatattatcaatgagattattgttacaccaacgttttcaaatgttttgacccattttcattgtattatgtatatttattttaagttttcctttctcattttggccaaaaaaaaaaaagttttccctctctcataaaacattatacataatctaacacaatctgtaatttgtagagaatgggaagatcatgtctccaaggtaaattatctcaatgactacatttaatataattaaacataccaaagaaacatactttcaaagatcagttcattaattaaggctaagtatattctttgggatttgcactccttttggaattatacagcaacttgtctttacttggtgttgttgagcttaaaggtcgcaaagcgcatcaaaaaatcagatcaaagtaagttcgtgtcggaagataaacatatggacccatttttgttgcatcttaagaaaatataaggaccctattataatcctttggtgtttcttgttaattttggtcgagcttttgttatttacttactattttacgaatatggaaccatttgcaactaaaaattctagttgaaagaaatggagaggctaccagattataaataaataaaaatcatgaaagtatggttggatacatgaaaaggaaaatttagtttatatttgaaatatcataaaaactatttataatatgtatgaagaataaatatataagaactggttatatatatatgtgtgtgtgtattaaattaatatggtgtaaatttttgttttactgctgtattcgaaattggagagttttatttcttaaaattatgtgaaatatcaagtgatagcatcatattttttagattttttctgctgactttattaaagcataaaaaattaaccagagtatgactttgttgtgtcatttttaggtgataatggtaatgttttagtcgttatatgagaaattatactgaagaaacgaaaatatccatattatagtgatgtggtttgaaaaaatataagtatctcaagctgaagaagattttatggcaagctattaattctgaccatagtttttcttaaaagtaatcctcaccatagtttgactacaaatctacctataatcaatgaatatcaaactaaacatacacacatttggtaattccggtcgttcaaattatacaagagtattgttcaaatagtcaaaagtctgtcgctaaataattattaaaaatctataaattatgaacgtcaaaaaggcagagaacgaagcaactctgaacattcgtatgaaaacacacaacatttaaaagctgagaacacaacaaaaataatatatatatccctttttcttatatgtatatttttatcttactttttcgtccgtgtaagtttttttagtttgtgaaaatagtacttatttttgtaaaatgtttatgtattcgttaaaaagagaaaaagaagtctaaaaaaacgggtgtgtagaactggtgatcacgacgacgtgcttacaatgggacactctcattaatcagggagctataaactaagggcaagttactggaccggtttagtaagttgttgaacaattaataactgttgtcccaatttatttatttattttcattattatttttagcattttaccagctgggacaacatatatacaaacagaaatacttaagtagtatcaaagttacaaaattaattgaacaaaaagcaataggcaatcgttgagccgacatgtgtgttaaactttaaactgaaaaacacgttgttagtttatatgattcggtatcataagatggaaacatttttcagtttcgggaaatacaaatcgagaatgagaaatgaaagaagagtatgatgaatttcatacctctaaaaagttaattaattattggttccatgtcaactatttttattttgcctgaaataggcactttggcatttattattaataaattaatactatatataagtgagtggtcatcattatgccaaaagaagaagaaaaaaacacgaattgaacttggtaatggtatgttccgacacgtttccggcgagaactaactacatctttcgttcaaagatttcatcttgttcttgttcccattggttattaaaacattttaaacacgtcataaagcatatggtaattttaatatggttagagaaaacattcattcggatttttctgattctttttctcatacgatgtcaacaaccttttatttgcactatatattgtccaaaaatcatataaaaacatgttgaaacatggaagttagtcttacaaaaataaaaattatgtttgtgaatactcttacatacacagagagactattagctgagctagaaatgaaaaaaacagccgacacggttaacaatatgtttagattatggagcagcgtggtggaccaaacattacattaagacggtccaaagagtcccgaattgtaacaatgacaatttcacatattcaatttttttttgtaatttacttattattgtttatttttattttttaatttacttattattatttgttgccgatatagtttttgttagatttttaaaaacatttctttaattctctgtgggtcgcattatatcccatttacatggagatttcctgtcggtatgccatctcattactattatgtactaaatatttttgtttactaaccaaaataatatttataatctgacagtagtaataagtaaataactttaatctcacgtaatccacacaactttagagacaggcataaaccgttgtgttaactgcgataataactctttaagctgagctcaattttgagtgtgtttcagggtcggtgtggacggaaacgcgtgaattcattaatattcttaattaattaatacaaaagaatcgaattaaaaaatcgaatacctgactggtcaaatttctgtcgtgggcttggcatgaaaactatatataaacagccacacatgcctagagacctctcgatcgtagcttacctacaaacaacactcacaatccaatcaaaacaaaacactttttattctctctcaaaatcttcatatctactttattctcctactcatccatctctgtctctctatctctagagctaattaagaaaatgggtctcttgtcaaagaaagctagttgcaacacgcacggccaagattcttcgtatttttggggttgggaagagtatgaaaaaaatccttacgacgagatcaagaacccagacggcattatccaaatgggtctagcagaaaatcaggtaattcattacactaatcatcaaaacgcaacgtactttagataagtttcgatcatgtatgatataaagtataatatcttacgttcttacttgtttatatcttgcagttgtctttcgatctcattgagtcatggcttgctaagaaccccgacgcagccaatttccaaagagaaggccaatccatatttcgggaattagctctctttcaagattatcatggccttccttccttcaagaatgtaagattatccggacccgaaaacgatatgacaacgtaaccattatcgtgttaaacgtttgttacttataagtttgttttgtcttaaatatttttaggctatggcggatttcatgtcggaaaatagaggaaatcgagtttctttcaatccaaacaagcttgtcctcaccgctggtgctactccggctaacgagactctcatgttttgtctcgctgatcctggagatgctttcttgctccctacgccgtattatccagggttagttaactttttgtcaaacccttcgcgtcatgcacaagtaacatgaaaacttacgctaactaaaatactttttattttccaatgcagatttgatagggatttgaaatggagaaccggagctgagattgtaccgatccagtgtaagagtgcaaacggtttccgcatcacaaaagtagcacttgaagaagcctacgagcaagctcaaaagcttaacctaaaagttaaaggagtccttataaccaacccatctaacccgttgggcactacaacgacacgaaccgaactaaaccatctcttggacttcatctcacgtaagaagatacatttgataagcgacgagatctattcgggtaccgttttcaccaatcccggattcattagcgtaatggaagtcctcaaagacagaaagctcgaaaacaccgatgttttcgaccgtgtccacattgtttacagtttgtctaaagatctaggcctacctggttttcgcgttggggtgatttactccaacgatgattttgttgtctccgcagcgacaaaaatgtccagtttcggtctaatctcttctcaaacacaatacctcttgtccgcattgttatcagacaagaccttcaccaaaaactacctcgaagaaaaccaaatccggctcaagaacagacacaagaagctcgtctcgggtctagaggctgcaggcatcgagtgtctcaagagcaacgccggactcttctgttgggttgacatgagacacctattaaaatcaaacacgttcgaagccgagattgagctatggaaaaagatcgtttacgaggttaagctcaatatctctcccggttcttcgtgccattgcaacgaaccgggttggtttagggtttgttttgcgaatttgagcgaagagacattaaaggtagcgttggatagattgaagaggttcgttgatggaccgtcgcctactagaagaagtcaaagtgaacatcaaagactaaagaatctaaggaagatgaaagtctctaattgggttttccggctatcgtttcacgaccgtgaacccgaggaacgatagtctgtttttaaaaaaaagttaaagtgtaataagtatgtttttttggtcattatttacaagtgattgttgggcaaatgtatattttttttaatatcagaatttgatattttggtatagttttttttagggagaaagttcactcattccgtaagtgtaacggataatgcagtgtggcttttcttatgtataatttactgtcactttctaatgatatttaaaagtaataattgtcaatatctttgtttcaaatttacgttaaaaagtgctacgtgtgatttgccggcgacctttctggttgagaagccgtaatttgggtccggccaataaatccgctcattaattattatgtaattaattagaacctacttcttagcactatagtagactatgttcacatttgttaatccttttgaacaactaggggaattccttttttactctagttgacaaaagagatcatttggtgcatttaatagtgattctctaattgctttaattggtttcgaagtgatcgatttcgtttaaatgacttgtaagtcaacgaaaactaccattcaagtcaaaagatgaacccaaaatactcacaggtcacagccacgtaaataaaatataatttccacacaatattcaacgtttttatataacttttatcttaagtattttctaaattattgaaggacttgtaaatcagaacaacgacctcacctaccttataacagtctttcttatctaataattcaactttttgttttctcattagttatgggaaaaaaaaaactacattttgatgatatcatatttcttttatctcaagccttaacgcatgtatatacactgtacgcgaaataaatggtactattcgtaaaaaaaaatctaaagattgaggagaaaaataccgaaattctaaaatgattagttttttttttgttaatactgcctaatttatatgtaacagttatggactaacaggcaaaacatgggagttcttgatactgcctaatttttttgttaatactgcctaatttatatgtaacagttatggactaacaggcaaaacatgggagcgaaaagaaaagaaattaataaggatggatgtcatgggagttcttgtcaaatgtcaaagtgtcatgtgggtttcacatggcaaaagaaaacagagaacatctgctaatagtttctgattggtcgttcgacaaatatattctaccataaattatatatattttcgaccaaccttgtatagatatttgttcattggtggtgctatgttatgttcgtgttgatttacgcatccgggggccacatgaccatgggcctcgtttgctaccacgttgcttcatcgccacttgtaagtcgtaagtattgtcacactacaacccttcaaatatatttttaaaaaaaaaaaaaaaatttacaacccttcaaatatgtcatgtagaattattgggtatccgtattatgttcttgcagtttttaataattcatatgatatgattatatatatatatatatatatatatgattatgcaatcacataattatgcgctatttttattttatttttcaatgtatcctttgttacctactccattctttttgcaattagattttttgaaaggttagagacattacatatcatttccacatttccgttgctcatatatttttatacgattctttgtatgtgtaatattataaagtaaaaccactatatgaacatacataacaataagagtgaaaaaaaaataaaaaaataacaacaagagtgtgcatttagtctaatatcggaacaatactagtagcaggttgtattttcatatattgataactataaactaaaaaattaatcaataacgaaatctaaatacatttttatttatttggagtacgtaaagaacattaagcagacaacaaatttcactgtcacatatttgtgttggagactaatggcattgttttcttcgtgggaatatagtatatgtttcgatgtttggaactttgaagacaatgcactatgtttttcaaagagctttaagctttgtttggtctagggattttcccaacattttcaacaatttaagtaattttgtattcgacattgcattacaagctttgggtttgatatccaaataatgtaaaatctgttgatacatgcacctaagttgatttactacattgtatgtgccaaatccaatttaattaatctcacatatattgtcgtaagttgaagttatgttgcaataagggatggattcaataagtagatcatttcttccataaaatgttagcatggcatgatgattcaaatatgttttttccaacattcaaagttgtttatgattcaaaaactaaaggccgaaagcaattcatgtctttgcattagctttctccaacacaaaagtttacctttattcgtcttttaaaataaagattcgatcttctttcttggtgatcattcttttaggattttcacgtatttttttccttattattattataacattatcacatttttttcaacatctgatattttgccatacgtggcccaaaaggaaaaagtattttcagttgatattatcagagtacgtaacaccaatacattttggtacgccaagtgtgccaactccctagtgaaacgaggttggtaatggtctctcagtccttacaaacttaaacaaaagcttatgaagagtaaaagatgaaaccaaagacaaagaagctgggccaatggagaaagcaatagggcctataagcccatataataaagcccatactatagaaacccacgaagaattagggagattgaagtggtatacttctactattgggcttgagacattacaaccttcttttgtcagagactaagccctcaccatcataagataaacttttttttttttttgggtcaaaccataagataaattttaattcaaaaaacttcaatggtatatttacacgtctatatttgtgggtgtgaccaagtcgattcacaagttgctatatgcggaaagtagtagacgaaatcaaaatccagaaacatgtgatatttttatttgtcttctttagcgataaaagcaattttgtgagaaaattgtagttgatttgttgggtatatgtccatttcaaacattgcatcaccactgttcacacttcatgcacttatattacatgggaattcatgtgtactcttcaaacaaaacgatcgatatatgaagaggaagtatataaggaggataacattacatttattatataaaaaacattacatttttaaaaatgaccacgagataataatctttgtttcggtccaaattaatactattggcccaaatgagttttttttttaatgatcctaactcgaaatattcttgagtaaatgtatttgtaactataaataaataatttttcatttatccagaatatatcacatgttaaaattgccacatgctacataattctgttgccgacaaaatcataaattgagtaggcgtaacgacagtaattaaggacctggagaactcgaagatttacaaagaaacatttaacaaataatttgaagtgataaggatttgactttggttacaatatgacgagctaaactagcgtccatatgaaatgttttaaaatttatatttttattgttagatccaacgactcccaaataaagttgaaaatagtgttgactttgtggatatattaatcacactattgttttgacaaacagattatcaaagtctcctccgttcgtttgtagtcaactgctttttgactttatggtgttgatgatttctaatggtatcctactcactactacatataacatatgcaaactaataataatattatgattttttgggggttaaaatagtattatggttggagttaagaaacaaaaaaagtttattatgaatgtatgattgttctcaacaaaagaacgccaaatattatgatacttgtagttattataaaagttaatcatattattttatgtatgtcgtctatgaaactagactaatgatgaacatctttgtagaaacaatttatgatccttacttattaggtctgattgatgatcaaattaatagaactgctttctgtaaagaaagaaaattgacaagcttaactcccaaactttcgtggtatatatcttcatttttgaggaattgtagaaacatcaagtcctaggattcccattctttcagcatcaccttgagctcgattaacgagagcataataaaggtagctttttcgcttaaataaatgaccgatgataaacattaaaatagaaatataataaaacgatatcatcatttattcatattgcaaagagcaaaaatctttgtgtaatacacttctagggcttttcttctttcacgccttcaacattttaagagatcagacaaacaaaaaacatgatttaacctaagtacattggcatataatatctgtatctattaatgatctaattaatccatcatctactcattatcgtatagaggataatcaatgaaggagctaatatcgtgatccaagtagttgttattgatcaggatctcggttccgtcaaagccattttctaccgtgttgttgttggctatctcatcaaatagctcggcctggaaattctcaaacccgtccataaagaacatatctggttgatcatgatcattgtgattgacggtgtagtgagacatttgtaaagatgaattattagtaccaatactactagtactgctcatggagttcaatgatggggatgcatgatgatgataagatgaagcagctgcatcataatcaacatcaaacaaaaccttgtttggttcccaagaaaatggttccaatatctgattcttgatcatgctttgttcttccatggcaaaagctctcattgatggatccaccacttgattatataatgtttggttcgatttggtgttctcatcatgaaagatttggatctggttctgactcgatgatgatgatgttgttccacgctcaaatttgacattaagttgttgatgaaatgccttcccttgcttgctcaatagcttcttcttcagcctcgtgttccaatagtttttgatgtcgttgtctgttcttcccggtaattgtgaagcaatgatagaccaccttcattttaataaatatacaccaattattgatgcagcgtttaaataaaatcatatctatatcatataggataataggaatatataagagatctagctaggtaacaaacctgcttccaatagtaatgtaaaggctgcaaatgatgtaatcttcttcatcggtgaagcctccatgctttaagttaggcctcaagtaattaagccatctcaaacgacaactcttcccgcacctctttatcccttctcatcaaaatgtaaaattgttaagtattatatgtcacaactataaagtatataaaagaatttaaaatcaaacaaaggattttatagaaataccaattctctgagggagggaaatccagttgttgccggtgccgtgtttttcgatgtaagacttaagcacggcatcttcctccgtcgaccatggccctttcttcaccgccatcttgtcgcagcacggtgctcttcccattttcttcttattctttttttttaccttctttcacttttagatttttggattagtttttatttcccttcccctcaatcttgttctctaggtatttatcttctatagtctctccactatatgtgtatatatatgagcaagttagctttatgaagaatgatgacaagtgggtttctgtctgtacatgtatgtatatggtgagaaaaaggcaatgatatcaagggaagaatcggtctcctaacattcaaataaatgtgaatatgactaagaaatatattatcgtaagcaaactttatgaaagtaatattatgttacaaatatttcaagactgaaaagagaggaaatgtagtaaagagccaacaaatgggattattatttgtccgtgtggtccagcttatgtgataacatatttcagtgtgaattactgtaatttaatccaccatgcacctctaacctccagttatatatataaatgtacaactagtataatggagttgataactataatgattttatcatattttaaatatttatactagtagtttcaatgtttagaatatgcctgatccagtatattcaacgagcttttgtgtaagaaatttaggattcacaactttgattgcattggttagcaagtaactgtttttattttgatgccggttattaatgtaatagtaaattgtatttgtatctaagctacgaaagtacgtaactacgtattacaaaatttatacgtttaatacagtctttctccgttttaattcttttaatatcgtaattttttgttgttatctcaattcatattatatagaacgtttactttctagaaaactaaatgacgttaattatatatcgttcttaaatatttaatatgttttggattatgtttcctaaggtaattatggattatatttaaactatcataatcttctagatgaaaaagtaaatggctgacttgacctgagaccgagagaattagtcttggaaaattgtagataaaaaaaattacattctttatatattccagtttacgaaaaaagtaattggttacaacttacaacttagaagataaagtacgaggaaatagaaaaacgaaaatttatgaaaataactttttcaacgcgctaacgaggaatcggtcttctcggcacgacgagtacaaatatttccaaaaaaatgagattattatctatttcattatgtctactctcatgattaattaagaaatgaataagacaaataaagcgggttaaaacatttgaattcttgacttcattatttaaatcttttcttactagtccacgagccaatgcttggatcaggtctttgagaccaaatctttacttttttataaatagaattaaagattgataaagagtcttcttctttgatttttcttctcaaaacgaaatcgatacttgattaagtggatataaatacttctcgtacttgaaaaatatttaacataattgatttgggttttcacaatgtttaaatgataaaatactatggtatttttttctcgtgtaacctaaaaaggagcagaaaaaataatgtcatgtattgtttttttccgttttttctttttttttggttttttcacttctcaggatcataaggtggacacaacacaatgggctttagatctgtaaaaacataatttaaataacagaaattaaaaattaaaaaagccccatgcaaacaaagggaaatccagcccatctcgtagaaaagctcataggcaaccctaatgggccagaagttcaaaatcaacagaagcctatagcccaaccgaatgtgtcatatattgttgctgacatgataaccaatgtgactcttttaataaaaatagtaagaaaagagcacagggcctgaaatccgattttttaaaaaatacagtttattttaatagattttgtatgaaaataatttactctaaattatcagaaagctaaaacagtaattattttttgttgttggacaaaaacgtcttctactgattttgaatacgatttttaaattgtcgaccaatttgtagttgcgacaatgtttgacatcttatataatgggcaattctgtaatgagattaaattttattttatattatacttgggctgtacttatacccgtgggcctcgtaatacggcctcgtaataataccaaatttgaagtgtaaaagacatttttttaacatagaatataaaacattgcaataaaaatatgatagtgacggttatttcaacagaaagaagagtttaccaaaagacaatcggtgtgaaaatcaacgtcacgagtcaggacccagatatcttcaagatctttcgttgggaaagacaaaactgcactatgtgtttcttaagtatggtccctgctcaaattgggggcaattttgtcatatcctagtacgtgcgatccttcatagttcatacttcataatcatcatatattgctttatctgatgggctttgtcttcgtttcacttttcaatttcattaaaattttgataatcgcacaaacgaagctaatctaattataaccacgtatcaaacaaataaaataggttttatatgtacaacaacaataagctgaatacgactttatcttaaaatcatatgaaaattatttgcgaaaaacaaatactttaatataccaaatttaattagttataatactttttcgtcgagctaactaaaacatcgaaaacaaaacttttcatgagctaaaaaataaagttgtttaatcaataatcattatatatagggggacctatatttaagacttgacaaacaaaatttgtgatatacctaactaaatggtataagacctctcacaatgatgataatagactattagaaggacgaagacacgaagagacacaccgactttatttggccgactcgaaagcgaaaagaaaggtcatcgtttctttgtcctcgctttttactttcctttcacaaccacacacacttatacacatacgtataaaactatatatatttgatagacaaatattgcatcatggcttgcgtttacaagtcttagtccaccatagtcactaatccactacggtgactcactcttttccctaagtgtacataatacatacatattaaaccccaactgtttcaaaatctatgatgtgaaatcaatatgatgttttctatatgtatattgtcataattcagaactggccacacataccaaattgaaatttcgctgaaaattaatattataaaccctaaaatatgacgaagcctaaaaacgtatgtaatgggagttttgtagtctggtcattaccttgcatattaggcatgcacacacattcttttggtattctctaatatcgaccatctatttggcctatgatacgaccccagaggccagaccttgtaattattttttgcttaccttgattagttcacaatagttaatgatagatattcttaagagtagacttttgttgtcaaaggctcaatgattcgtccctttataaagtcaagatctcgacgtgattggaagaatatttacttatatattcctgttaatcatgcagtttttttatcctatgaattaatgtgattattcatttaaataatcaaattcccttcctttttccccaatatggttcaattattcgcgcctgtatacatttgagggcaatattcgttacgtgcttttgaatttagaacctgcgaatagttgataattcctcatgaaaggcaaaaaaaaaaaatcatctgttacgttttagatggtttattttaatcgaaaataaaaataaaacaaaataaacgagagtttttgtatggtttataaagttcattaagcgtgcaaactaactgtgatataacatcacgaatataatatgaatatgatagcctttaattagcacacgcttaagacatgatatacagttagaatcaatttcgttcgataataatcttctatatatgcattataacaatgtaatattccttttgacaaactgctaaaaatcatttgaaaaaggaaaatacatctccaattccaataatttcggcatataattcaaagtatatattctgattaacttagataaaactagaccgtcagttttggtggctttgttaaaatttaaaagtggtaacagacggctcttttttcgtgtcattattattacccgaaattgagtggatatttgaaatgggattataacaaataaagaagcatcatccatgatttgacttatgcaaagttctatattttagaaaaggaaaataaatagaaaaaaggaacaaaataaaagacatgaaaagcaacatgtctggttggccgtagaaccggagatatgacaaagaaaagcatcagacaatccttctatcattcatccaacttaattattagtccctcttttactatacatacttattttccaaagttcaaaaatatattttctttttgataaaacctcccactagttttcttatctgcttaaccaagtcagaaactcaggacatgttttccacgctttaaaaccaaataatacttaaaatacggcttaaatctaagttcaacaacttggtttcctgatttttattttttatcaaccaaatgtttctgcaaaatctaaaacattacttaaccaaatgaacaaaacacaaaacataacatagtaattgaccaaattaggttaaaaaaagtaatagactaaagtaaaccagatcaaaccataactaagttaatttttaatttgcagcatgcttaactttttcggaattctccttagcttagtatattttataaaagtaaccaaacaaaataataataataataatacggccgtaatgtgggggctgaatcggaattagatactctctatcataccaaatcattgaagggacctacatgtctggagttgacacgtgtcggacctaacagacaatgatactgttttcaagtttcgtaattagctctctctctctctcttttgtgtcgtgtggataagtctgtgagagatcgcataatggatggtgcctaagtgttgatgacatgagaaccaccactttaatttctctctttttgttatctatttttcttataataccttttcttatgaatatatttgttcaccgcgccaattaaacgactttatcattgttgccaacaaacgtatttaagttttttatttatttgttattgttgtggttgtggatattttgtagttatcgtttgggtttgattagtcttaaacctaattttttaatcgtcttccaatcatctaaaccatctaaaaaggtcttgcgagttggggtcacaccgttatttcattattattttgtatgtattaatactctgttttataatacgacatctttttgccttttgtctttattcttcccctctttttcacacatttttaattggttttaatttttcccctaccttttcaagaagtcaatatttatcgatattcctgtcattatttaaaatcgtgttattaatgacttattgccgacatattaaaaaaaaaactcttcataatatatactccatgtgtattagtgtatgtataacatttcatctatcattatgcatattagcaaacatgtaaaataataagtatatgtgacagtttacaaacatcatttgtctgattaaatcattaaaagataacaaaattgttctgaccatttcgtaaaaaaaaaattaagtagtatacaatagaaacaaataatttaagaagtcgtttattcagaaatgattctggtaatcgcacgaagcttattattcatcatcgttatctttcatactataagataataattaagaagatcctagtaaaatttggtctttgaatctgacctcttttctacgttctatattttgtcatgtaatgcgattattttgatatgatcatgcgtcatagaacacacgctccataagacaaaatgtgataacatattaaattcgataacaataaataagacagaaacaaaactaatcatgacgacgtctagttacaggaagatcgcctaaatgactaaattaaataaattatcgggtcaatacaattactaatttgtcttctcgttctaactttgaaatatttagatattgggtctttgttgaaaaaatatgatttaatcatgtcatgatttttctaatcttgacacctcgagttttaaatacaacactaggactatgtaattattaaataatacatgtagttaataaatacatgtgtcgtcgtgttcatgagtttgcctcacctttcctcttaggagactggtctggccgtcggggaccaatgctctgagatacaaaattatttttatactaataatttatagtataataatacgtattctttgtatgcaattcaaattgttttcatgcatccctctctttaaatgaattgcagcttgtccaaatggttaaaagttctcgttagttggaatcaaatatctatatcttcaacattctcagaactatatatattctaaagtttcaataatttttgttccaaacaacaaaattgactctttaaataaagtcaggaagattttggtaatggcgattgcaatctttttagtcaaaagacaccagcaaaatgatcaaaaggcgaatttaaataacttcatttgtaacttctgacgccccgactattctagctgttacaagtgaccaaaatggctaacaatgtacacgttaaacttttgattttcacactaccatattttataaaaatcatgatgttctaattgattatataaataaaatgctttacatatgcatgtagttcacattttttttttttggtttgcaattgtttcttaaataaataaataaaaaacctaatttaaaacaaatcagaagaaaaaaaaattgcaaaccaaagtaatccaaataagctagtattttaatcggattgtgagtactttctccacttctccttcgaggccacgcttatatattaatttgtacaatatgggtaacctaacttggttggaaaatagaaagtgccaaaaaaaacaaaatatgtatggctaaaaccaataaaacgtcccacgtcgactttcaagttaagtccctcaacaatattatttctgtttgacgaatcacattccaccaccaccatgattaccaatcttcttctcccacccgtttctaattcaggccattcacaatatttgatacagaataatgaaacttaatgttgaactattccgccattttactgtttcaattaattaaatatttatctaaacgaggtgctgttagtaaaaaaagttccaatatttttctagctaattctataaaaagacactttgtactgtaagagcagagacgataaaaacagaaaatgtaacgataatttgttacgtcctgtaatgaattgtttaaattcgagtaatgatatttatgcattttctacatatatgctactagtaatcaataaaagcatagtattatcaaaactagaatgcggtggaaataaatagatagaaatcattggataaataagtcccaacacaatctggccagatcaagagaaccgaacctaaaacaagaaagtggagatcacaatccgaaaccctaaataataatacaagaaaggggaatataaaaagaaattagaagaaattaattaaaaacccaatgtgtagtgtgaggaagttgaagattggtaggcaagctgacatgttacccatatctaccttcttcaagcaaagcatggagtgggagacaattcatgtggtctcttatttaattaaagttgcctcttaattactctctattgacaacttattatgatactcctacttagataagttaaatgtatcatttgattataatctaatttattttaaggaagtcttcagttctgttagttatatttaacgcttcagtggtatattacaagaatatctgtactcgagtaaatattttaaaatatcaatcacagaacattggatctttgaatgtgggcatgggaggatatagaatcgtttcgtcatgtgctagtaattgtattgttgacttgaattgaatttgtggatatatatcccgattaacaaattgaaacaaacatgtaaagcaatgtataaatggtaaaagatagaagtaagtttatcaggaaatgcaaaccatcaattcggatataggagtttaaaagtctaatcgaaagttttggagagactaaaatctattacacccaaaaaaaaattgcgttgaaccgttttttttttttttttgggtttttaaaactaatttaattttcataccacgtcataaaaattatattctcagagtataaatttgtatactatgaataaacatactgaaaatttatgaagtgggaataatagttgcaagtggggtgcgcatttggtcaacctttgtaagtaagaaaatacaaaggagagagaattgtgctatcataattttccacattctttttttcgaaaattccatataaaaaagtaagcaaaataaatacattccttgattaattctaattattagccacccacccacccacccatcaaaaattaaaaataaaaattaaaaagacaaaataaaaactctcttccccttcttaagaagaagccatcttggtttcatttcgtcccataatcttccaaacttcaccagaagaaattcttaacaaacaattttcttcataatattaattctcaagatcttaaagattatattaatacgaagagaaaattcaaatgggtcttgatgattcatgcaacacaggtcttgttcttggtttaggcctctcaccaacgcctaataattacaatcatgccatcaagaaatcttcctccactgtggaccatcgtttcatcaggctcgatccgtcgttgactctaagcctatccggtgagagctacaagatcaagactggtgccggcgccggcgaccaaatttgccggcagacctcgtcccacagcggcatctcatctttctcgagcggaagggtaaagagagaaagagaaatctccggcggcgatggagaagaagaggcggaggagacgacggagagagtggtgtgttcgagagtgagtgatgatcatgacgatgaagaaggtgttagtgctcgtaaaaagcttagactcactaaacaacaatctgctcttctcgaagataacttcaaacttcatagcacccttaatcccgtatgatatagttaattatttccttaattaaactaatcagtctcttcttatttacgttaatcatatcgttaattattttttctatgaatttacagaagcaaaaacaagctcttgcgagacagctgaatctaaggcctagacaagttgaagtgtggttccaaaacaggagagctaggtaaatataattgattacttttgtgaattttaatatcatacttttctttctttattttggttcataaaaatattttttaattaaattttaatttgaacagaacaaaactaaagcaaacagaagtggattgtgagtttttgaagaaatgttgcgagactttaacggatgagaatagaaggcttcaaaaagagcttcaagaccttaaggctttaaaattgtctcaaccgttttacatgcacatgccggcggcgactttgactatgtgcccttcttgtgagagactcggcggtggtggtgtcggaggagatacgacggcggttgatgaagaaacggcgaaaggagctttctccatcgtcacaaagcctcgtttctataaccctttcactaatccttctgcagcatgttagttacttattagttatttaatttctttttgttggttttttttttgtttcttaaatcaaattaggaattagttagaagataaatcccagggaaaaaatattacgttgaaattggggggaaatggggtatagtctttatagataagactcttcaacgattccactttatttttcggtgggattgttggttgatgaagaaaaaaaaatagtttgtaattacaggtttaaatatgtagagaaaaaatgacgaatatgtattatcttgtttttttttccttcgaatatgtattacggtaatataaatttgcttgtaaaaataataaatatattatttgataaattttgtacaagtttatatcacgtctgacgacgtatccttaacaaatgattgttcattcatgtgagtataatattgatttatactgttaaatgatatttaaatatgggttctaatttgagttcacactttacaaacataaacaaccaaacactcttccgtattttaaagattcttagattgattcttaacaggaggattcgtgtatatatttgtaaagtatccactacgattttataatttcagagtttctttaattagccaagtctctattattctttactaatcgttcatcttaatgagacactggtgccaacttggttttgatttcaaccgtcaaacccaaaaatggaaataaaattgattgaaataatttgccaccgataaataaaacacttataactagtataactaaatagatggagaatcctaaaacttcacgaaggtaaaggtatgaaaaaaataaaagatgagacggtaagccaaaccaatctatatcaatacatcaaaatatatttattcaaaattcacattttattagtgttttttttctgactcatcagtcatatgacatatatacatttatttgttttggctccagatataataattatattttttattatccaaaagaaaagaaaagaaaaaaactgaaaaatcatttgatgggtgtgaatgattttaagggagagagataaagggtgtggggctaagaggttagctcacgtgtattgatacatctccttaaaaccttttaaatttatccaaccaataattataataaagttatagtaaaaacaatttaacaaaaaaaattataataaatctttaaactatataacactgacaaattagaagaaccaatacgcaccatgcaaaaacgtgttcacatatgtagtcaaatattatccataataacaacaataataaaaaaaaaaatatcatcatcttattacaatgcttaattgcaaagaaaagacctctatttaataaagatacgtttgcgaaaaaatctataaatggaaataaaattttaaaaataaaataataataaaagttcttgaagatttgaagcagtgagatgctccatctttaagaggtaaggtgggacatgcttcacgtgattttctcttcatttttcttctcacgaccatgttatagatgtgtgggattaattatatgactcttcttcatgttatacccatatttgctatacacgtatattcatgttttttaatgaatacatgacaacgagacgtattagttaacatatttatgaaaatgacagcgagaaatattcataagtattttaccaaaaaaaatattcataagtaattacgtgattcacgcaaaaaaaaaaaaaaaaaaatttacgtgattcacgaacacaagtataattcatgaatcttccagtttcaacacgtacatgcacaagatatgagtaaaatttgattttgatttttattttatttttaaaattaagtttttgttacttttttacctgaaccgtttaattttataattaattgtcgtatgtagtagtacatctaatcaataaaagctgatattgatcgcgactaacatttaataaaatcattgattttctaggttgtgttaaaggacgtcgaggtctcgaagatctcgttgagatttgatcttcacgaggcacgagtaatatgtttgcatgtttttatctaaagtaataatatgtatgtgaattagggtgttaaaagtaatttggttcgagaacatataataaaaatagaaatttaagcctttataaaacaaaaggaagataaattttgatatagaatgtaatgcatgcgtgatgatgggggatggatgagatgacgagagagtccacaagaaaatcataagatcggtgaccctgaaattatggtggtggaccatttaatgatgagatgactttccggagaaatcggtgactttctcaaaatctccattctaatttcacggaatcattcccttgtagtgtctccttttctcatttttctctctttctatttttttcgttcaaatttgtttatattataagatccaaatatagttttatcccataatgctaaatcaggacttaagggtgtgactgatatagtattagagtaaatgagtagaaaatatataaagagtaaacaaatagaaagagaaatttatttttcttcaataatatttatctcaacgttaagaaaaaaaaaagaaaaaaaaatattttttaattttcatcatgatttatatatgaccagtacaaattgaacagaaatgaggataaaaatatcttctttttttcaccatctagaaatcaaaatgcaatatagaaaactaaatgtaaacggaaataatcaagatataatccagtaaatgaatccctctcccttcctcgcctggatatcataattatatataaaaaaaaaactaaagacagtgaaagctatataatatgtatatgctatatctctactcttttttttcatgtcttctttaagaagattttcataaacatttgggagtatacataaatattttcaatcaattttcttgcttatcgaggtttatttatttgccttcagttttgctgtcgattcaattgtgtgaggtaactttttttgatatcccaaaaaatattctaattaataatgcgcatttttttattccacatatgtgctcgtctacaattacatgcatagtgcgagtgaaggttcataattggattaacaaaaaatattattttaataagcattgactaagtcaaacttagaggattagtagtattcacttttgaaatacacatggtcattttgacaagaaaattggctcaatcaagcgaatataaaaaaatatataataggcgggaaagattatgatgaaacgtcaaacgtattacatatttacatcgcccgaagtcggtatggaaataattaatgtatatgaagacgatatgtattttattatgaatatgagtgtatattaagattagtcataggttaatattatttttacttatgtaggtgactaattatttgggttgtttcttttaatgattgatagatttgctttacgtgtgcacgaacgtacgtaattagtgtattaagaacggcaaaagacatgtgtcagttgctggttaaattgtcggtttgtcgaattcttgttcccgactttttagtttataatatactgctactttcaatcactaggcatgaatttggtagaagactccaaaaataaatatttttatatatatcgaatgttaattcgtttactaaatttgatataacaaacataaatcaacataacaactctcgtgtcatagctaatctttatacgcgttatcttaccaatatcaatagaatactctttttctgtaacaaaaaataattatcatatacactttttgctttacttttgtacttcagtttaatcattactttatttgatttaacaatctagtagtatatgtactcgtggtggccttatgcagttgtaaatattcatttcaatcggacctaaaaatgcgaagtcatatacacaaatatattctaactgcacaacaattatattctatatacaatattaaccaattaaaaggtgacttgatacctaactatataaggttaataagaggcttaaagcttgtaagctaatcaacgttggttgctcaacacgtcttgacgcaccattgcgcgtgttagttaaaggttggtagattaccttgaatatttgtcagtttaactaatttttcccctgaaatcaactttaaatatatatcatacaagcaactaaaataatgttaggtttgaacccatgtaatgggcgctctaaagtgtttttgatctcctagatgaaaaaatgtgttccaattatgtaacttagaccagatattatcgggttgactagatatatatcaacatagagctagttgaaaagcctatctatatatgcatgtagttattgtccacgaaatgggtttaaaattttcaataatagaggaagaaaatgggactattgaataaatggaacatagcaggattactagatgcggctcatagcatgtgttaacctacagtatcttttagtttatttaaaaagcagtagtgtatgcccattttgcttcacttgtcatgtaccatattaaagaactttgaacccttttaagtaattgattgatgcatataatgtggagaaccatgtgattttgtttcccctcctccggactttttgtcaattatatacgttctctagctttttgttgtcttctgttataagatatataaatttggtacaaatatatactttcttacatatatctaatatatcaagtactaattgttatacaactttaatttaggtcgaacataattaaaagacattgttttcaaaatcactcctcaactttcaatttattataaaaaaaacttgcaaaatttaaatgaaagattgcatgcatttaagtgatcgtttcaattaataaacacgcgggtcttatgagtttcattttccatcgcatcacatgctcttctaatcatggtcaaagcatttttccgttagtcatgaaattgacacgtggaaaatactcttttcggaacacgtggatgttcctcaaatgatcacatccttataatagaatactcttttcagatacatacatagttagaagatacgtctaaattttaactaacgaaacttaaagagtacagaacattatatatgattaacatttgtctcgagtctcacggctttaaagatacagtattgagcaggtgttaaatcaaattacatcatcacttttcatttccttatcgctatattttcttttgtacacataatcatttaataaaagatggaaacagccaaacaacaggtcaatatggaagtttcaagttgtatttaaaagaaaagaaaaagccattagcttagtcatcactcatcaattcgttcccagaaagttacaaatttggaccattccaattatctctaatggaccccagtaatcttatcttttcgctaatttatcccataactttacttttttaatcaaatcaaactctgttttgtagccatctcatgtgctggcctcatccgagaaattaaaccccatttaattaccatcatcacaatcatcatcttttgccatctgcatcgtgggctttgtttttcttgccatcaatatcaacaaaggactaagacactttttaccaactttacgtacggactattccatatttgatctttaaccttttagaattcagattttggttttgtaattttacggaccaggctatggttaactacaaaaagtaaaataaaaataatggcctcatgggcttggcggactaacctaatttgactggctctcgcatggttgatcatcaatggatcagaccgaaatctaaagcctaatgttacttttctttggtttaaaaccctaattttttcaaaacctaaattgcgcacaagactatgtaaattggatcgaccggactatatgaaaacctcaaagcatattattgcctcaaagcccaagacaatactgttaaagagaagaaggaaaaggtcaccaggcccattaagatgaaagtaattttcagacccaggggaccaaacaaccccaatcatgaagaccaaatttctgttttagtggaaaagagtacggaatattaaattcaactgtacaaaacaattataatacatggtctataaccaagaaatatactgcaggttttgttataatcaatagtctcattctcaatactgatgaattttagcttaatattgatttctttttctcttgtgttagatttaatattccatgtgaaactgttccataccgaacgagggccaaaatacccactccaacaaacaaacatggttctcttcaatagatcaacaaaacataagacatcatgaaaacaaagtaaaattcaaagatatacatatatatatgaacatttgaccacaatcagatcgattatgagcaattcaccacataccacaagactcattaatcacttcacatacattgcaacgttgcttatggaaccacttcgcacttgttttgcttttaagacaataatgtttggatcagattccagccgagcattctggaggtggaacaggaaaacgagatttgtcagtgcaataatcgtagaccatatggttcactcggacccatctataacttcgagcttccaccggactcaactggtggtacgcactgccttcccaccaattcttcgaattagcgggacaatctgcgggtcctggaaccggacatccttctatatcaaaatctttgtaataagcataaaatggcgctctcgaccaattgattttctctattcctccacgtgtcgcccaatcatcggcttcccataacgtggaatatacacccattggttggaatcttgggtatggtactttccttgcctcattgttcttgtaaaccctgatgggcacattgtctacgtagaagctacacaccacacatatttagactattagaaagtgaataacagttctacatatattgttactgcaaatagaaatatctttgatcatttgtttttttattcttataaactgatggccattgcctaatggattattaaaatgtcattaccaaaaaaaatggattattaaaatgtgggacatttataagttcaaatcatgaacgcctctaaaacaaatatgctgtctctttcattctcttattacatggcccatgggtcgacaaaatatgaaaccaatcatgtctctcgtgacaataatgaaaaagacaagaatagttcttcacatgaaaaccaaaaaacaaaaaagacaagaatagttaaaacgaatctatagtacaaaagtattggttaatttgctatagttgattcaactatatgtcacattccttttaataattagacagagattgtgaagaataatgataattggctgtatatgtgtatttatatgtacacattatataatgtgacttttttgttttgtttggaatgaatgttaaatttattcaaacaattaaaaaaaacctgttttacaatatatgcaaccttaattgggtttagacataataatgtgacttacacaatacggagatggttccatgagatggcatattcgtggaaatcacgagaagggtcgaaccaaaggttaactctttgctctctatcgcctttaccatgagcaaacacattggtttgcactgtgtaaggttgtccacttcgatttcctaagaactcaaaatcaagctcgtctcgtaccgaatcggtatctgaattcatctgcgcaaattagtttcatattataaccaaaacttttgaaatgcagtgacataaacttgaaatatatgtatatatagttacgtagaaggcagtgacagtcccggcagaatcaccggggatcagtttgattttcatgctcacacggccgaacaagtattgcttcttcgaagcaaatccacatcctaaaccaatgttaatgaaaataaattaagaatatgaattgaaacttgatactatgtctgaatgtaattaagtataacgtatgtaagaacctgagctagggtccaatttgagctgaatggctctgcctccgtcaatttgagtgatatgagtatcggaccatgcgatcctaaagtcatcttcaaacttagccggtctactcataaccggctggtataatgctgcaaataagcataagcttaacgtatagaaaacatttctggaagagaagagtgacaccaccattgttgcttatgatgatgagtttgttttggaagtagaagatcgaaggcatatttatatggagatgcatgcaggcaaatgtatgtacaattattgaggaacggtctcatttagagcttagattttcagtacagctaatcactgatcgatttgtcacaatgattttggacctaccaattttctattattgttgttattattatgtttttaaattcactgaatatgtctttgttttctttccaaaatcttactgttctttcactttttttttagaattcaatttattctgtgtactttttctcctagaactattcacattattattgtgataaaagctaaaatattttcttggctctcagcctcgcaatgattgaagcataagaatttcccagtgtatagcataactgaaaggcgtggtgcggttttactgggacacgtgtcagcattacattactctgctatgtctcgcagatatgatacgatcgtcgtatctttcgtagattcttagattttattatttgttgccacacgatcgtttcttagattaatttttccttaaatacatgtttatattcgtttgttatatagaaagaggtttcattagtatatacagtttatcttgttctcattcgagatgataaatttgtaatttttttttaattttcttacatattttggcattttgctccttttccaataaattatacattattgctttaatcaatgagagtataggtgcagtatttatgattgtgcatgaactttctaatatgattttctttttttttaaatgaaaataaagatatgaaagttgttaaatgtggagaggcgtgagagtagggatgtgtctatgttaatttatgaatatgtagctttcattttgttatccacaccacacaagtcgtgttcgatgaatagttcttatccccatcttcatttatatcatttctcactcaatattagtcccagctagcaaacatcgttaaaaaaaacaaagattctatgaggcaatttcgcattctagtgtcatttgacatttgtagtacaaccatttttggttggctaaatcgctctagacaggaccatctcaagtctcaggtcccaactcttgagctatttgttacttatgtgcaaaaaaattatccaatcgtataattaggatcttagaacaaaatattttctaattataaaaataaaatttggaatcctattctaagtgaaaaatacggttttggctatggagcatataagttgattagattcctactaattaatagagccaattgtatacttcaactttgaaaaactccggcaaaaaactattgatataaatggcaaggttaaactcacacattccgttttgatgcaatatttggctatgttaagctatcatgtaataacaatgtaaaatacaccctggatttttttgcatgaaaacgatggttatcaaaagaattaagtctaattaatatagaaggagacacaacattggacaaatccacatggaagtaagaactatggataagtaattgacagactccataaatttcatgaaacaaagctctatgtttttttgattaaaaaaaaaaagaagaagaacgaagactctattcgactcaaatttaatgtcatgtctttgaatgattttaacttttgcattataatttatttaatatgatatccatctttttcatccatttgccacctttttcttgtcgtacttgtttaaaaattaaaatagtaacataacacggccgacaataaaaatgatttgagctatattggaaacaaaaaacactagtagtagttttctttttcgttaatagtagatttggtaaacatatcttaaagtttttatagatgtcaatttctgtgaatatcaatactctgcacttaatgtcgacactctgatgtatccaaataaactgaaaaaaacaatttagttttcctacggtaagttttaaagcattttagtattttacacaagattggggatttttgtgggtttagccagttttgtatgtgctgtacaaattgaagaaattgcatgtactatattatatatgtaattgctgaatctgttgggtctttagaaattgagaatatgccaatgatagacttttcgtaaatgggctttcttcggctttttatacaatcatgggctttgtatgcccaacagagacatatattactcacatatattcaaccaaaaaaccttgtttacaaatgatgcatctttgttttgaatgttaatactcacatgatacttcagtttgaatgctttttttttttgttaaatagtttatcttaaaataaagcataatatatttcaaagttaatgtgtcttgtgcctgaatttcaaattaaagtatttcaaatatctataacagatgggtttatacatttttgctagtatcatcaattaaagaaaaaatgtttaacagcggttaactggacatatccattgagcatataattgattaaatcattggaaaaagcaattgggaagagtgagcgaaacgtgttgagacagttctatataaatattttagataaaatatgacccataaattacatatataaaatatataaaagtttttggttagaagaatacgaaaaggcaaagaggcacggtattggtcggtcaggtgaagtagggtcctttctactgctccagtcagtctattaccacaagaaaccgcagaaaccagaactcaaaaagcaactttcatatttttttataacaattgtacaatacaaaattcttatagacaaaaatgtattttagcatattgcttttatttatttttgtttgtgtgtattgtattgtcacttttaaaacaagaaagaaatatttatctgacgaccaaaaaaaaaaaaatttatgtattttgtcgtcttcaaaactttgattttactattggcttgggcttaagtatttaacattagaactgttcttttacgttaaaattaattattcatcctgctcttttgtacctacgtaatttccttttcacctgattcttgttttattcgactcttgtagtcttgtagacatacgtatcaatcaatacatacacgttaaatagaatctgactacagttaattatacatcaaattatttcaagaaaattaattttccttgtacttatataacataattacataggtcccgacatatttttgtttgtttattattcaaatactgactctgtaatagttttttatttttttttatttttgactctgtaatagtttaatacatactgtgtaaatctgtgatgatacaaaaaagtgtatataaataatattcataaaaagacattactattattaatgtcaactcatatataaaagagaaacgattacgtgtataaatatgatatatccatgcgtgtagtactctttaggaaaaatttatttgcccttcatagggtagtcactttcctttttcttctttacttacaaatcttcctctacacatcaacacacagagaaagagagagagagagagacagatagagagagtgagaatagaagtgagtgagagaaagtctaattgtttctcctgtaaactgcaaaccgatctcgtgtctgaaaatggtgtggagcagcaacatgtcaagctttctactgattttgctcattcttaattcgacccatttcagtctaatggctaatggtaagtaaatgagtcaatgtcacatttccttcttttcaaacattagtttttccataatcataatgcttcttttacttcttatgatatttttcaggtagaccagagcctgactctgtcgaattcaccaaggtacactttttcaacatcctctgttttttttgttcttcctctactaaaacaagagtcaaattgatcttaaaaactcgtctttgatttgaaacagagtggagatcaagatgtgaagatgatgatgagaggtctaataggatcaagaccaccaagatgtgagagagtaagatgtcgttcttgtggtcattgtgaagcaattcaagttcctacaaatcctcaaacaaagcttcactctcctttaactacttcttcttcttcttcctctgagactattcatcttgactacaccagaggagatgatagtactaattacaaacccatgagctggaaatgcaaatgtggtaactctatctacaacccttgaagaacattttgttttactttttcatcgacaatttttctctttttttttggtgttcaaattctaaaatctctgtgtatataattatatttttagttgttttttattggtcaaacatattttagttgtagtaatcttcatattttatggtatttatgttgttgttgtttattatagtgtagttaaaaaaaaacagagatgaataaaattttgtttatccaaaatgattttttataatttcattgctaattgtgaaagtaaaaatctttttgacacgcatcgtaaagagaacgcacggaaacctattttcaagacgatttctgacaaataccaattttatggatgaaagttacatcacacacgtacgtatgcatctacttacatatatgtgaactttatgtatgaaaatatttgctggtttatttgagagacaaagatacgtttgatacataaatccattagccgatagacaaaaattcagccgctttgctgtcgtttcttcgaacgtcgccgttttcattcacattggattttgggttgtacttttttttattataaaaatgattaattttattagtgaccaccggtgattttctgtgtcctagtacttgtttcagtagagttctttttggtatttattagtgatacatattttttaaattttaatataacagcaagaaaaatcataaccaaatctgtactactttgaattgatatagtactgaaactataattcctattcaaatataatccttattttccaacgggaaattttcagagaaacagtaaaacctgggccatggtaaaaaaaaatacacattatactgtacatggagaatgatatgatatatgtaaagagtaaaacctagaaaatgtaatattaccaaatgatgatagtctagcaatcaaatcatcaagatatctacttaaagccagtgatcaatttctacttaaagcattgtcttcgttttaagtcagatttaacattaggaatataaacttgtcgaaattaatatgggattggacaaagcctattcataaagaaaactgaagagtgtgagagttgatgggattgaacatatggaaagagaggaagggaggtgacaaaacaaaagaagagaagatgtgtctttgtgtggggtttactaatttcacaaatcaagcaaagcaaacagtcttgattctctacactgttcttcctttgaatgactttactattgttttgttttcatttcatttattacttaataatgcaacccatatatagttgaataataatttttaaaaatacatatttggaatttggtggagactcaagtgtcaatcaaagtcggtacactgccaccatgctactgcttgaactaatcttctcaatgacaacgccgctccgaatattttatacaatatcttctatatgattcactatatatctaacttatatactacaatacacattatgctaatatccaaaggttcgatggaaaatactgttgtatttatacaagactcattccaaaaacatatcataacattctcagtagttgaattccaaaaattaaggtttgcatctagtctgcgatctgctaaagagtctcaaaatcgtagttaaaatgagtggtttgtcgtaaattcgtcttgattttggtattttgaagatggagcattttaccattgtgaatcctttaccaaaacttcttagttacgaatactttgggtttgtgataaaattttgtgcccttcaaatattttaatatatgtgtagttgtgtataccaacagatctcaaaacactattatttcgctataaaaagtttttgaaattgggaaaaatgcattttgtttggagactattaattgcacattgtatcacgatcgagaaaaccattaaaagcaaagtgacaaaatgaaaagactcaaaaagatgaaacaacaaagaaggaagaaaaatgagagttccaaagcaaaaatactttggccattccgatctctttttgtttctgcgtctcaccgtttacttaactgttttcgatcccttccctgttgcatcacttccttggaacaagtattaagaccaaagaaaataaaaaaggttaagagatttatgcatattggagagaaatcgttaaagcacagagttgacaaggtacagtcacgtggaagcattttggacatatcgataataatctctttctctgtttcaatgatcttattcgacgtcaattgctccatacctcattcattgttcttgtacgacacaggcctttgttcataataatatactatatggtatatggttaatatatactatcttatttcgtaactcaaaaagaaatatgattaatcgtcaaccatatcacctcgttacataaaagctagtggttttgctttttctaaaaaaccatcgtgttactatatcgtatctagtattttacaagatctatagtttaaatactgatattttctgaaaaacaaaaaaaattgaaatttgtatacttatatactatagaagaatgcagagaatagttattttcaaagagttgaggacaaaacttacggggacaaaaaagtggatcgaggagattccagtggtccaatattgattttggatagtggatatgaatatgcgcacgcaatagccaatacatctcaaaaagtcatttttttgtcaacatctcaaatgttttatgcaccaatattcaaatgaattctcgactctacgttgttagtggatacatctgcggttaattacaaatgtaacatacacgcataccatggaaatatatatatacacatatggaatttatggtataaccaccaccatgacatttgtaccattataccataaaaatcatgaaatcgtgtccaacaatatgatcattttagattggactatctacaattatatgtatgaaacgtacgtggtactcgatgagtacgtacatggtttaaagcttacacgggatgggaattttgaaaaagctatgatgggctcttaaattcgttgaaagcttacaatagatgaaacaaagaaaacctgcatacatcaagtacgtactataattacactaaggaatgaaaagaaatcatcaaggctttcatgaagtatccgtatcaataatttgtttaggttacagaaattgactacaactaatttttatttttacggttccatgcaaattaatccattttaaacaaatcctccattgttttgtataatgttggagattagtaggattagtcggataatatggcataaacataatatgatgctaaattctaaagaaacgatatgaataaataatgcagcagtataaaaactgtaccattgcgtgggtggaggattttaggtcattgttagggcactttcatggggaccatttccgccttaacgaagacttattacacacaaccgtcaatgtgggctggaaacttgcagtgcaatccggtctggtcctataatttatggccggttagggtttacaagtttttaatctatcaattaaatgagatggacacaaaatgtaatcaccagtggaaaagaaaacattacgagacttatacaatgtctacaagaagactcgagtggggcaacatgttgtacataatccgacgtcgttttgggagtcagtaaataaagttcgagaaatgacgtcgttttgaagtcatccgagagaaaatgacttaaagtgaccgacgttgttttgaagtcagcggaagagtaaagaagtaagaaacgaagtcgttttgaagtcatctcttcagatatgtttgttctaattaaaatttcccaagtgggaattagtttgtaattgaaggtatgcacgatttttagttacaattttaattcttcttcttcagatccaagaactctcagtctctgcgttcacactctttctttgaatccttcatcatcctaattcatctccaagaactgaatcagaagttgtatttcgctaattcaacttttccaggtaattttccattcctcgattattcgaatttgggtattaaatcataatgcatcgggaaatttggattctttaggataatttttccggcaaatccgattattgagctagtttctgaatgtttagattctcagtgtctgtcaattaggttttgattttggaagtagagaagttagaagaagaatggtgagaacgccgcgaagagggcagagatcaaagggaattaaagtgaagcattgtattcagttgactctattgcttggtgttgggatatggctgatttatcaaatgaagcattcacatgagaagaaagctgagtttgaagggacttcaaagattgttgttgatgatattgataatacagttgttaatcttggaaggaaagatcttagaccgcgtattgaggagacgaaagatgtgaaggacgaagtggaagatgaagaagggagcaagaatgaaggaggaggagacgtaagtactgataaggagaatggtgatgagattgtagagagggaggaggaggaaaaggctgtagaagagaataacgagaaggaagctgaaggtaccgggaatgaagagggaaacgaggattcaaacaatggagaaagtgagaaggttgttgatgagagtgaaggtggaaatgagataagtaatgaggaagctagggagatcaattacaagggagatgatgcgtcgagtgaggttatgcatgggacggaggagaagagcaatgaaaaggttgaagttgagggagaaagtaaatctaatagtactgaaaatgtcagtgtccatgaagatgagtcgggtccaaagaatgaagtattggagggttctgttattaaagaagtttctttgaacacaactgagaatggtagtgatgatggtgagcaacaagagacaaagagtgagttggattcaaagactggtgagaagggcttttctgattctaatggtgaattgcctgagactaacctgtcaacttccaatgcaactgaaactacagaatcttctgggagtgatgagtcaggatcgagcgggaaatccactggttatcaacaaacgaaaaacgaagaagatgagaaggaaaaggtacaatcatctgaagaggaaagcaaagtcaaagaatccgggaaaaatgagaaggacgcgtcctcgtcccaagacgaaagtaaagaggaaaaacccgagagaaagaagaaagaagagtcttcgtcccaaggggaaggtaaagaagaagaacccgagaaaagggagaaagaagactcttcatcccaagaggaaagtaaagaggaagaacctgagaacaaagagaaagaagcgtcttcctctcaggaggagaatgagattaaagaaactgagataaaggagaaagaagagtcttcgtcccaagaggggaatgagaacaaagaaacagaaaaaaagtcttccgaatctcagagaaaggaaaacaccaacagtgagaagaaaattgaacaggtggaatctactgattcttcaaacacacagaagggtgacgaacagaaaactgatgaaagcaagagagaatccggcaatgatacttcaaataaggaaacagaggatgatagttcaaaaacagagtcagagaagaaagaggaaaataacagaaatggtgaaacagaggagacccaaaacgaacaagaacagaccaagtccgctttggaaattagtcacactcaagatgttaaggatgctcgaactgatctagaaactcttcctgaaaccagcaatggattgatcagcgacaaagttgctgctgagtgatacttgttaaatgtgtgaagctgtcatgtattgtatgcatattctatacttctcaccaaatgacgggacttaagtcccaatcaaagtagtattgagtttttaatcgtaatcagtacatgtgtatgtatacttttatatctaattctctctgagtctctaataatgaagaagtttttttttttttttttgagattgaatcacaagagatttgaaggaaacataagtcttagataattgaccaagcaaagtattaacttttatttcccaacaaaagaaaagagattggagtagcaaatcgttgacaaacggtgagaacaaatacggtaaaacattttagcctttcaaataaaccaagaagacgttattatgaccacgcaagactcagtgctctttgttgtgcttcacctcaaacagaccatccggacctgagaatggcaaatagaaagcgtcagattcagaaactgattcagaaaccgacccattacggatattacagagataatctttgatgatctcttaaggtttttaggagagacaactaaacagcattatcaaagctgaagatcacgaaatgaaagacagtaagatggacgataggaaaactggaaaagtacacataccccaaggaaactccttgttgcggatgtgcatatgcggataggcctgcaacaagtagacaataatggttcatgacagtttcaggcaatgtatgcttaaacttaaaaagcagaatgaatgagataaacgaaatcagtaaaggcaaaaaatgtagctttcgtaacattctcatcatctgcatacttctatccgttttcactggtgatattaacattgtctcacactaggtgagattccaaatcagaagttataatactaaaccaatggaggagttgtaagagaagcttacaggagggtcttcgccgtgatgatggcccttggataaaacatagacagctagagcagtgcaactagcaatacccagataagttatcttctcccacttcgcagcttcatctgtgaaatattaaaaagaacaaaactttgatgaataatcaaaagttatcatgttccaagaaaaaaaaaatcgatcctttcaacagagaaatgttgtagatttgatccaataagacgcttcagatattatggagaaaaatcaatttcaaatttgaccaatcgatctaccaaatcaattcaaaattaggtatcggttcaaaaattggaatccgggtgaaattatactgaatctcaaaaccaatctacgaatctataaactcatcgaggcgttctccaaaatcaaatcagaaaacctagatcgtcgtcaatggaaaatggtaaaaatagagaggagagaaattacaagcatcgtcatggccggcggaagaggaaaagtttcgcttaggagcgacggatgtcttcggagctgcgcgagtcactgctcgggaaagagctgaacgtacaatcgccgttgccattttccgggatcttccttgttctttttctctgcaagtgttgagactctttccaagagggttatgtgactcactaatctggcgtcgttgaatctaaagtctaaacccaagtttaatgggccttttatgggctattttagcccatcattgttttgttttcttatcaacaattttacttatgtacatacatactagtcattgaaggatgttgaagattgaagatgaatgaagtttagatggaatctttgatgttttaaatcttgtttgtagcttcatataaaaaaaagttggattatgttaaagtcttatgtgtaatcaaatgttcaactttttcctttattcaacaaaggattcgtatctataacattttagagagagagaaaaaaaaaaaaaaattgtcttggccaaaagtccactgagtgcttgtaaccgagttgcaaaaactgaattaaggagaatgttatcgttgcaacaacctttgtatagttcacctccatatgtcatctcctaaagtcaagaaaacataaaaacaggaaactagcaaaatgagaaaaaacttgttccaattttcatatgttcagaaaatattcaactcacttcgatttcttcatctacgattctttgaatccaattttcagttataagcttcaacctgtgtaacaaatggctgcacaacaaaatgcaaaacgaaatatttttagtatctcaaaatagattttttttggtgacctctaaaaaccacacaactttcagaagaagaacgacgaaaaattaataatagaggaggagaggaggagcaacatcactactatttctattttttcagccaatcagagtgctccggaattcgcccactcgcaccaacttcacctcacgcgctccatttcataaccagatgcaccgacctcgcgtttcgcgcgtgtcatcaatttctgtaggggtaaacccacaaaatcatgtttatttctaatctactcgctttgtttccaaaataccaacgcgtgatctcgaaagcattttttttttttttttttctcaaaaccgtattaattatataatgcaaaccgaacccaaattaattttgattttaaaaccatgtaaaccgaaccaaagattggaatagttgggatgataaagaagcttggaaactaaagattctcactttcactagtgaataatacattcattttttaaaaagtttttttttctgttgttttatttctttctaaaaaccaaaataaatttggaattttattttcatttctagttaataaaaaataatttatattgtaattttaacttaaattgtaattaaatagacatgactaaacaaaataaaatttagttcttatttgattgtaagaactacaaaaaagaatcatcatcgtcacttgctttcagaatcttgatgaccgtcgccacatgcggcaaggaagagagctccggcagcagatccaccgtgagaatgctcaatgacgacgtgatctgataactcatcaccaagcatttcccaaacgctgctatgaagatagtttctaaataccctataatgatcatacaatcctccttcaactatcacaatgctcattttcttctctaatcttccaagcttctttatcatcccaactattcctgctcccgctaaacgagccgctcgttccgcgactacatcgcatacttcaactacaacttctctcgccgcaagagttgaatccattatctgcatatggttcacacaagatattcaagatttgtttgtttttaatacaaacgcaaaaagactatcgaaatttctaaagcgaatgagtctctatgaagcttacaccgaaaacttccttgagctttttgtttacagtctcccgttcttcggatatatcttgatgcattgcagccatatctggagacctaaaacatgctcggaaaaccgcagtttagtctatagtttcataacttagtctaagagaagtatatagttaaggtaccataaaatgtaaggaattgtgagttttggaggtagtgtatctccaaagagagcagattcttcagacatttttagtaacactcttcttactatctcccctaagtatcttcctgacaccatcttctcaaatatcttcaaacagagaaacagacaaatttctcaaaacacactatagaaagtactaatcggtatgtgttcttactcgatgtccgggattcaagctttccgcgtcaagagaagcatcgaactcggttataggaagatggcaagatctgaaatctccccactctgtgctaacaacctataatcttaccaagtacaaccacttgatataaaaactttggaaagctctatgatattgaactaagtgtgttgaaagtatcttaacatacgatctcttgtggctcacgtatcgcagatttccacctcgatatctcttgagcttgttcaatgtaagcagcgttggttcccatacctaatgatactgcagccacagtgtccttgtgataataccttcctccagccaattctcctatagtattatccacctgatttcaaaaaccagattctcaaaagatacattaaaagtcttagattaatcgtcattgcggattatctttagacttgcttaccagcgctgtgttcatccgaattttcagaccgtgtgtttccagtgattcattcatatcattcaccaaatctttcaaaaccttctcatcatcgtcatttgctaaactcttcctatgtatcgacgagattgaatgtgacccaatctgctcaacagagcgcgtcaacgtaaacccgagattcttcacttcttctgcttctccaccgggattcatcgcaagaaatttaacaagctccaatgatatgaaatcgcacaactcctggatccaaataaaactccagcttcatgtaacctaacgtgttaatcaagaaatcttgtatctctattcataccttgaaagaaccatttaaaacatcgtcagggatcggaatctcatgcttctgtacatcggaaataggctcttcgttaccacctagcgtcccacgtaacagtaatagttccttgcctctcaagttgactccatagtgtacccctttctcatcactacacgttaaacaccgttaaataacgctcatctaaggctctctgtatcaaaaacagaggattctgatttacccggaagggagagaaccggtgaatgaaacgagcatgttgagggaaccgcaacactcggcggttaaagaggcggtcatgtcggcgaccaaggcgtccgccaccgcccaaagcttcgaaaccggcgtggcgcattctctagcgaatttcctcaaaattctctgcgtatgtttcaaccgccgctctttcctccggatccaccgacccattagtacacctgctgcaaccgccgtaatggttgcagccgtcacggccagaaccacctctttcctggtcatttttaccacagaatatgtttttttttcgatctctgattaacacagtaacaatctcaaagaaaataagatgtgttcggtgttcctcttgttagctttttttgcgtatcaagttgaatcattcaaacttttttttttctcactaaaccggataactcggtttaagcaaaatttacttttgggttatcagtatgaaatatttttggtttgatttggtatggagagaagaaacatcggtctggttctgtttaagtaaaaaacaaccgcaagtatagtgtttcgtaattacttggcgatatcttcactaggtcgcgattttccatgtgaaacaaatttaagctatcattaaaaaaacgtttttacaattgagttattttattcgtatcattaattgctctctttttcataaacaaagaacacaagttgctcaatcttcgttgagaaattaatgagtaaatatagattaaggggaggggtctaattgtgcacacgtgatatcacctgatgtagctcacatggtgcgattcctgtgatttgtcatacttgtcccttgtaggtggagccgtggaggcttcgaggcgagtggatcatttcattttttaatgtaactacaatgacaatactaaagcactctaatgaagaatttgaaatatttttaatgtgtgaaaataaatgatagtccttattgatttaaataaattgaggaaaagttatctacaatatcataagataataatttcttatgcttttttattagtgttttatattaatggcgagctgttttaatggttaactctctcgattactgaaaatataagaattttgataattactaaaaatgtaaggttttttaaagttgagaatgaaaggacatataccctcctaatcatcaaaaaatatactattgaaaagtgtacttaaaaataataatcaatcgcaaaactaccttgaaattgaggcagataatatgtgaacatttatagcaaatatagtttctagctcaaatgagctttatttagaagggaaaaaaaaagaagaaaaaatggaattatttataagaaccaaaaacaattgtggagaaatagagattgccgaaaggcaaccttcaagttatatttcattgatttttcataagacatgtgattagccttgcaagaaaacctagttacatgtatgatgggatatagatggctttgtagccatgtggtgtatggatttatatatagctagggtgctctaatggagtaaatggattcttaagttctttttggaatatgaatatagtgtcataaaataaattgttcatttttctaattgactaatttgaattttgaccatgcttgttaatatgtagctttatattattatttctctaactgtttaagattgatagagtaaagtgacccggtttcacacaatgatactgagtccactgaatttagaaattttccacgtttcgatttcatttatatatgccaaaaatagcatttccccatttttcagcatattacgtagttttgttattattcaactatatatataacggaaaaagattggttagagtaagtgatgcattatagagcgagtcgtcatgtcatatatgtcgtgtggatgtcgacctttagattatatatatataggtagatgataatgtaattaacttaactaattatagtgtttttggattggtattggatcctgaataaagtatgctatgcatttgaaagcaacatcagtcacatgcagcatgtgattgttcgtacagcgtaacatcgcaattgcgagtgttggagtcaacacaagttctgacgagaaggagagaagaataggcgttgagatacaagtaaatagatcaaccaatcgaactctaattttttatttcgtaaccaatcaaactctaattttaagttcatatatgtatagaaaaaaaatattatttattaatgcaaccaataaataccattactaggtaaataactaactcctaacaacatggatgtgacgaagtttctttatggttacggtttggtattgccgtccaaaacagccatatgacaatatgactgcgtcatacaaatgttcttgtgtaattagtttgtcatcttatagccataaaagtatattgaattgaaccactcttttcaattatctttctgggttatatagtagattatataattttggtaactttcagattattgatttggattatttctaaatttataatactagctagcgttggattatttggacctaacaaagacaaatccggcggagttataattggtcacattattttgacctaattgatactgacataccgctaccgtaatcaagaatataaactaaaataacgatatgtcacgtttttaatttgattataataacctcttatatgtctttggtaacccggttcgtatttgtaaggaagctgcttatttatttgttgtatttttttttttgtctttttgcacggaataaataaaagtaatgagaagtactggagaaaagttttaatcaagatagttttgttttaaatataaaaagacaggaaggagagttgacgaaaacaaatgacgaaacaaaaaataggtgagttgtcgcgtcaatgatagaaacatttaggttttgacagcgacccaaattccatgatacatgtgttgtacttgtatactaaaaacttttacattagctatctgctattatatcttacactgctatttacagttgtatttatcaaggagcgctctactaaaataccacttatgaagttgttattcctaaggatatatcataattataaaaaatcctagatatagacaaagtttttgaaatgttcttagaggaaatgaatggtaggaaggtgtcaaaattttcgatgccattttgggaaaaagaaatactttattgttttgaaaatcaattcataagtttgttaatttgaacataagaatattcaggacatgtacgtcaatttatatccaccccaatggggttagatcgcttaaaggcaactatggttagtttggacttttgaaacgtataaatcgttttctctttttatttcaaactagtaatagtagaaagtaataagttagcgattaattggcacatatatgtcgtataaaaagataactaaacatttgaaccaaacaaaagataactaaacatcaatttctaatttctaattggcactatatccaggtgcaaaacgtctgaatcgtgtatatataataaatctggagctagattcacataatcttcactggatcatattatcataaatacccttttttgtctagttccgttgcaataatatgtaatatatatattatatatacacgattcagacgttttgcacctggatatagtgtttgtatatatgcatatgtacacatattatctattgttttgtgaaatgtgaaaccataattgttcatttttcgcattgcggatataatatttttattatagctgaaagaaagagaaggatagttatccactttccgaatccacgatttgtccaactttgttagtatcctatgattatccttgttgttctctaacacggaaggaaagacttggtcgtcatgccgcattccttgccttgattatccaagtgataatttttttttttattatgattttctgaatctagaatgtcttggactgggtactttgttgtatttgacagtgctaatttaccatatgttactttgaattcaaattactcttactcataatgacagtaatcaatcaaattcaatataaattgctctaaatttttgtgcaccaataacttgctctaactcctcccaaaaaattattactacaaactttagtgatttggtataagattgaacagacttacaaaatataaaccatataatacaaatacataaacggaagtgctttacatctttggaaacagcaatataatacataaagggggaaagaaccaaatagagaaaaaaagagaagtgaattttcaactaatttaatcttatttatatatagaattatagataattaacagataagaaaacctccaatcaaacttataaaaaaaaaaaaacattttcatggcaaaccacttatgtttcgtccatgtgttcaacaagatctcccacagtagaaattgacgagaagcatgaaagttaatacaatcatatgaaattcgacaaagcagaccttaagctctttacaacatccatgagtgtcatgtcgaaatcactctccttctgaaaaataaacatcaagcgatgttactctaaaattaagaacaagttcttcatttatatgtataagtgtatgcctgaatatacatttgcataccttagctataatggtgatatcaagagttggtccaaaattcaatacacttgaattagttatcaagatatgaagtttctcaatctcggccataatcttggcaagatgacccttttgcttctcgcaaaggatcttgattagaacatcttcatccgagaatcttacctcgatctcgggaagatccaagtccgagaagccatcttcacaagaagaagagaatgattgattattatcgtccaagatcagcttagacttcttcacaagaaccattgattccaatcttctttctttcttctgttcctccaactctcccactctttcttggagatactttatatgctttaatgcatctcccaacacagaagccttgtccatctatgcacgcaattagaaaaaaattacacctatagattcaaaaacatgtatttttttgaaaaaggtaatcaagaaggaagatctgatggtatgtatacctttttaaggccaggaactagagcggaaagagctacgaatctttgagtaagcttctctctacgttttctttcggctattatgtgatcctgagcattggattggtttcttgaaaacggttgagccctcttggtcccttttcgattaaactcatcactcttctggtgtggttgcacttgagcctctaattttgggctaaagattgagtttaggtaggtgggagagtactcgtgttccatatcatttgaaccataatcttcgaaagagagaattcttgaggaagaatgacggtgaatatgatggggctttgaatttggaggaagatgagaagaaggtgatatgtaagttgtctcaaggatctttggtggtttcatttcgatcaaatcatcataagagggatcattgttggtcgtgaaagagtgtggaaaaatgtattgagcttcttggacctctcccactattgagttcatgtgaaactgttgaattatgctattttcttctatttcctaaaatataacatcacacccaaaagaaaaaagaacaaaaaacaatgaaaaacagtcccagatgacaacatatatacatgagtgtatgtgtttatgcgcatatatacctgctcagaaaaccatcttgtggataagatactcattgctgttgcctctgaaaatctgaaaatggtaaaaagaatattagtgtatgatttataaacaagaaactgtatttaaccaagaaaaaagataaattagcagatcatcttgggtttcaaatacaagatttgacgtatagtaaaaacccaagatcaagaaacatttagtaagggttgagatttatgttttttgaatcacaaagaaataaaactcaccagcttctaggagaagagagagagagaagagagatttgtgtgtgaaaacagtggaatgcacatgcatatatgtacatgtatatatagagatggacacacatatgaagtaatttgcacgtgtgaaaggcaatactactcaactttcacactaaaaatattccttttttctcacagcatttgggtgtcaaaactaattaattatattatagattgttttatatttgtcaaatttcacaggttgttcaaagttactcattgacgtatacagtattttgaggtcctatttgaatgaatataaaaatgttgcgggccggagacaaaaagggtattcgtctattgaatatatcaggtttttgagtttatattattaagtgtatttttagggtttcttcttagaaacaaaaaaaatcgcctcaatttttattttgttttgatatatgtttactcatcttgtttcccttggttttatttttaaaaaaatattagtttctccataaatacatttttcaaaatgcatccaaatttgacatgaatttatgtatcaggtgtggtatgcgaatatgaaaccaattaaaaatcaaaactgttcaaaaaaatattttctaacatcatataaaaatattaaaccttatgacgcgcatcaaaatgttgttggccaattgtaaaaacatttgtatatagaaagcttgtattcaaattctgctattattactgagtaataaacttatatatatagtcaagtaatttatactaaagtgtccttcactcactatctgaatatgtatgttgttgaagaaccaataaaaggaaagcattcatgattaattttcataaatttcttatgataagcgaacttatgataagcaaaaatagacagaagatgacaggaaactttccataatcaaattgtgggtccaattgaatataatctaatacatattcccattagttttatacttttctcttgtaaactaaaaatgtgacaccaaccaaagatctcgctacgattttatggtatattatatggtattggttacgacattaattatttccacgaattttctttttttcaagaaaattgtaaattcaacaataaaaaaaagattaaagtatgatttgaatttaaccattggcgttctcttctaaaagctctcatcttttatacacagtttgattaaatgtgtgaatcaccatgactgtcaaagacgttcgattatgaacaaacaaaatcacaaaagtttatattttattcaatcagaatattcaaacattatactacaagtgatcgacactaagataatttttactttcctggaactcatgtgtcttgtgtcttgtgcaaacgtgctactcttaatatataatcgattaggtaaaaataatcaatcaaacatgaaactcttttatgtaaagttgatattttaagtcaagtatttgtcggaattgttgaacttcatagaaatggtaagctaggtaaacaaaatatacttgggatattataatctaagtactaaaatagaaataaaagccagttcacttacaactagatctctccctcttttcctccattactacgccccatgacagaagcatcttggcgcctgcaaaccaaattcagtgttttacaaatctccataaaaatttaatactaaatccctcgaattttatatttttatatagtatttcatttctcaagatctaaatactaaattaactataatattatcatgagtatattttactctatagtataaaatgtgatagagtatatatacagtacattgtacacatttacaaatagacgattattttgtttctatctttttcttctttctctttcactctctctctcaagagtttgttacagaagattgaagattcctgatatggtatcaaagcatctaaatatttaacagttttctggatctatatcactatattactatatcacatcaccaagacagtacatcccatgaaatataagcatcttggctcttgcaaacaaaatttagtgtattttttttacttctgcataaaaaaaaaaatctgataagttggcgtcaaaaataaaaataaataataattaatattaggggcccttatattattccttttctaaagctccaagtacacatacatgatgattaggttgttaattttaaaatcttattgtccatttctcaagatctaattctaaatagtttcctggatccgtatcgttgggtaacgtgagagaataattagtttttgaagtcaaaaccctaaaattgaaaccaaagagatcaaacagtagatacagaaaaatagagaaaccttattataagcttttgcattatgtcatgtaagaaacactttagtgagacttgaacaatttttattattatcttctctgccattatgtgttggttgataaatatatagcaattggccctataattgatggatttgctgtagatttgctatggatttgatagcactcttcatcctaatcctcagttttgaacaaaaatgaaccaaaagaagacttcaaaaccctgtttcagattgaaatcttgttgacatcaatttgatccctaagaagagggaaagaataaatggtcaagtctcacctaagtgtaacaaacaaagaacaatcaaacaaatgccaatcattgcctgataaagaaaacagaaagaaaaaaaactttccttgcgtaaaactctacctgattattaacaatatcagaaatcaaagaagaaaagtaactttgaaattagaaacgcgtagattctttaaccctaaaccacaattcttcaaatggctaagtttctgcttcttctgccttctcactctttcttcttcctctaccaaccgcagttgttccgcgtcttctttcttcgcaagtctctcactgtatcaaacaacaaacaaacaagaacattggtgtcccgggaagattctaaaactacattgaaaacatctgaataaataataacatacctccgtttctcttccctcatgatatcatcaaagttggcttccatgcacctatcatcatagtcttcgtcacgccctgcaaaacgatcagtcttgcacatctttctaaccatttgcaaggccaaatcatcttctgacattttcacaggctttttcttcactcgcttcaatggtggtttgctaatcaactggtgtttcgcaggaggcagttgcgaccttgtgagttccaaggaaacatttctctgttctaccctttgttgtttagaatcatgtctcaatggctttgttgaggacagtggtctctgatggcctaatttggaacttggttggcccttcttgttcattgatttccgcttttgagagttaattgccgaatcctccctcgtgtgagcttgtacattatttgatgaacctggtcttggctgcatttggctctctgtggaacttggtctagaagtaggtggttccttgatggaaacaggaagctgagcatcatcagagaaaaggaatgagtagtctcttccatccttaagtttttcagcttttcgtttgacctcattcgcattcttagtccctgaagcatcattcattagaacagaacttttcttctgtacacaagacacaaaacagttttaaaaagagtaagaaaaaaaaacacttgcaacgtcaaaaatgtgaaaaagaaggatctgatgagacatacgttttgaatagagtttaacattttagctgctgatgtctcgttttctaaaagaggcttgctttcttgtaagactcttgaagcaataacagtctgagaaggaccaaaaaaggaaccaaagctgcaaaaacagagttttttttttgtttgtaaaagcagagttagaatattcaattcatgctaatctctttgaacacaacacaaatacacaatcaaaactagaaaataaaacttactcgtacggaagattacttttgctctgatgtaactgtgtctgtgaggttggagcaataatagtatctccgctttgcatcttcgtcctaatcgattccttaatccgttgacgcaattcaagaaactctgattgcatatttcttggaagacaacttgtcgtagtaattagtgcctgcaatttaaagatctttaattcaatatgtgtgtattcacatcaaaacacgtcaaaatatctacaagaagcaactgtaaaaagaaattgatctgcttcaagaacaaccacaaaattagggcttctgcgtcatatcaatcaagttcacagaacgttaccataactaaatagggttcgggttctgtttcttacacagaatcaggctctaatgccaattcccaaaccaaaactctaaaatctttatgaattagtctaaaaggtgaagttaacttacgattcaagttagtcaaaatctctaaactaaatccctcgttaagaggaagtaacattgaaatcgacagaaacacatttggagaaaagataacttacgtttgagaaacgtagtcacgcgaatgaagcgaaaactggtttcagtctgaactctgaagcttttgcttgggaatgactttaatggagagatcaagaaatacaaaaagacgttgaggcactgagacgctttttatacgcaaatagagttttcctttctttttttttacaaatttccttttttcagtcactacaattttttcgttttcacaaaagtcgaaagaaataattaaagtaatatatacagatgtatgtttgtgttcagtcgctaaaaggagttatgtattaaccatatattaatttactttttgtcaacgaccataaattataatttactatactttacttgtaatgaataaagttataaagttttctatccattttgaaaatcatcatcagattggaccagaatttatattattcgtacttggttctatcatgtaaatgttggcaaaggcccaacaaaaatatatgacgatggatagtaataaattacatatagtcatcatcattatccatatcgcaccacatttggaacattaaattctctctattattcagagagattatcacagcaaagaaaaacacaaagtctcattttattcttcttaataatagtagatctttctttcttttcgacaacatcattcagagtttggtttttctaaaagataggaccagcagcgagaatctcctccgtaagcttaccatccacaccaatcttatggttagcaaaaacctcgaagttcttcttgaacagacctcccagtttcaccagagtatctttgtgtgccttcttatcagaccactgcattttcattaaacccaaatcaacaaaaaattgttcatcatcacttaagcaattacattatacagatttgcagaaacttacggagttgacggggtccaagatctctgaaggtatcccttcgatctcagttgggatttcaaatccaaagatttcggttttcttgtagtttgccttcaagagactgcccgaatggattgcatcgatgatctttctagtgtatgccagcttgattctgtttccaacaccataactgcaggaaataaaacattacagatcatgttaatagcctacaaacatgtgttacaaggcagcgttttgttgtatcgatttccatagaaggacatatatacctgccaccagaccaaccagtgttgacgagccaaccagtagcaccttgtgacttcatcttctcagctaacatagctgcatactttgtgggatgcaacattatgaaagctgcaccaaagcaagctgagaatgttgctgttggctccttgataccatcctctgtgccagcaacctatatatgttgcacatctttggttatgcttttgaaatttatgaagacgatgtgcaaaataaagacttttactttggccttaccagagcagtgtaaccactgatgaagtggtacatggtttgtgccagattcagcttgctcacaggtgggagaacaccaaaggcatcacaagccagaagtatcacatttgtcgggtgtggaccaacacaaggtattttcgcatttggaatgaactcaattgggtaggcagcacgtgtgttctctgcaaccaaagagaatcgaaaatgatcattctgttaattgtgaggacgaagagaatgaaagaaataacaattgttttacctgtaacagatttatcagagtaatccacttctctggtgtgctcatcaaacacaacattttccaaaactgcaacaagatcagaatcttattgttatatcactgctttatgtttttttctcaaaaacaattccaacgtactgtctttctacctgttccaaacttgatagcgttccagatatcaggctccttctccctcgaaagatcaacacacttagcatagcacccaccctcaatgttcgaaacaccagtctcagtccaacaatgctcatcatctccaataagatacctgttgtgatcagtagacagcgttgtcttcccggtacctaaaatcatcattcatagaaaacaaaaaacacaatcatcaatctcaattcacccgctaaactcaacaaagaggcaagcagttctcaagtcagttcagcagtaattgtattgtatcatttgatttatcgttccttccatcatcacccaacaccatagttggtactgtctctactatacctgaaagtccaaagaagagagcaacatctccatcttttcccatattgcatccagaatgaagggagagaatacgacgcttaggcataaggtaatgcatcacactgaaaagacccttcttcatttccccagcatactgagtaccaagtataaccatttccctcctagccagattaaggtctacgctagtggacgaagtcatgtaatgagtgtaacgattacatggaaactgcccagcattgtatatagtaaaatccggagtaccaaagctctcaagctcctcctgagttggtcggatacacctgacaccctccccagttactaatttgttgttttctttcacccacaataatggattgacatacaaggagtcaataatgattttacttacatgttgtgcataaacaatgaatggtaagctctagctgagacaatcctgactttgattctgttctctggatcccagtttaagtattggtcattgacaaagacctaaaaaccccaacaacaacagaaatttcataaacttagatcaaaagttctacactcaacaacattgattaaagttttcaaaatttaataccttttccaaggaattcaagtaatcaacagctctttctctgttcaccatgaaagtatgttcatccatttcgatattcggcgaacccctaaaatcaaaatcaaactccaaaatcaataaacgaaaacagagcataaacccaaaaactccatcaatcaaaatcgagattaggaatactcactttccccaccaaagctcatcctcagtagtagcatctctaacaacacgcttatctctgggagcacgaccagtcttagcaccagaaagcgtcgccaaagctccattagaagtgataaacgaacctttctcatacttaatagcttgctcataaagctctacaaacaacaaaatcacaaaccaaatctatcaaactcgttgcagaaacatttatcaatattcagattcggattctaggtttatttgttgacctgcaggcgaaagattgtagaggacgtgagtaaacttcaaggagctatcactgacagcaccagtagccggagaaaagatagaatgatgttggccgtgagcgtacgccggagtagttgaaccatcggtcttcttctccgccggatctcctctcaccacctttggtcctgactctctcgttaacgatgctaacgatgcactgtttcacaattaatcaaaattagtttccacgtgtcgttttaaacacgtgtcatgtacattaaagtattattttctggtaatagtcacaatagcgcattaacttgtccataaatgtctaatccaaaaataaacaaaaacaaattatattgccgaattaaaggaagaaatagtaattgaaaattttcaagtttagtgtatatcacgtcagaaatatttaatactacaccatatatttagctaaaagacactttttccatgaaaatgatcggacacgaaaacgcaataatcttccttaattcgatataaagtatgttataaacaaaagtaacgtatgaataatctgtatatgtgaagttattataaggacctgatagattgaagctgaatcttctgacgctcctcctcggagacggcggcaaaagcagcggcggcgttttggttgatcggtgtggtaggagcagaacgtttcttctgtaacgaatgaagctcatcgatggttgtggcattcaccgtcggaccactatcgtcgtggcagactccgctacctctctttgctgctccggtcgttatcttcggcatcaccggtcctttagggaaactaaaccctccgtcaccgttagtagcatttccgttaccggccgacatctttttcctgtaaccacaacacaaaaaaaagacagagttacgaagttgattacactcgtactgatattaaaattaccatcgacgttaaaaattttaccggaggaagagagatcacgaacaagaagaggctgagaaagattaaagagactaatgatcggaggagaagatcatttaacgttttcaagggatgatacaaaatgatgcgaatgtgaagagaagcgaaagtggttttttaaaggttagatttttagaaccatggttaataatgaaccgtgagagtgttaaccatggttaagatctatcttcctaggaagagccccttttttatttttattttctctcttaacataaccggtggtttataaagatgactataccatttaattatgatagaccccacacgaaaatgtgtaagataattttgtaaatttgtaagatattatatgtgaatttttacgtgttttttttgtttgaaaaactctatagctcggctacctctacgtagttggtataatggtatgtataattcagcttatttttttggaaatcaaggataaggtttgacttcctttttcaactagtattaaatcgaattaaaaatattcatctaaaatagttcagatgtgggaaataaatctttaaagaaatcaacgtgttataagcgaccaacttgcctaatttattcaacttgataaatgaaaaaatctgtaacttgcatattggtaattgattttacggtctaatattcgtgatctccatcaaataattttcgcaagtgtcacttattttatcaagttgtttgatgatgataaaaattcgtttgatggtttcggccggggaatatcgaaaacgatagacatagctccgattgtattttaggagatgggcacgcatctcaaagtaagtagattcgtgagaggacacgcaatgaggttcaacatatatatacgtatacttattttattttttaatattcacactatattattatatgtatcagtatgaatcaggaaaagaatactacaaggaacgttacgaacatgatgattgttatttcacaattacaagaaccttcgtcacgtgttgttttggaagttattgtttatgttcatcattagattgtaattagtttatgtataattagatactccagctttctgaatccaaaagtgaaggagaatatttttatcagaaagactctgcaatttgcatgctagcatgggcgcaggataatgaagacaacaatatatacaaaagtttaataaaacatttttaaaaagaggttttctaataaaatgtggcaataatcgacggtttggatattattttagtagaaatcttgtcatataattaattttgtattaaagctaatatgaaaaaggtgcaagtcataaagcaccacgtactctcgtgcacaaagtctcacgggatttgcattctgatcacaaagatgtgtttactacaactcattttatgaccataattcttgttaatgcctaaaaattaatccgatccaactttaatagtctggacccaatcggccgatggactttaattactattggttttatgagttttgaaaattcaaaaagaatatagaaaaggttaagcaaacttaaagtctttcgctgaattgtagctttttaggaataagagtctttttgttataagaaaaaaagtcttccgttggcacatatattatcgcgatggagagagatcacgactcacgcgagagacccccgtgaaagtttcatgacaatttttttggttgtcggtctcggccgtgaccgattagatgttcacatcaatgacccacgttccaaaaaagatgaattaatttgcatttataaattctaatctatcatcgtttcaaccatttttatattcagaccatacggtaaaccattttagacaacaccattagtcatatagttaaataacgagtagggctacaaaaaagagagttgaatagttgttcattgaagatcttctcgaatcttgacataggtactacttgataatggaatccaacgctgtagattaaccatgtgcaagggagtggttaattagtactattatatgtatgtactctcaatttctttcacttttgaatgttcattggttctttctcttattgattatttacattcccattatagattccagttttgtcaccttgtgggggaggccgattcactcttctcctcttcccttttcttggatatctcaattcacagtccgcaaaaagagtttctactgatgtcataatttaaacgcgttattttctcctatatattcgttttggtgggtttctcgtattttaacaactattgaaacaaataaaatgaatcacacgaaaaaacacactatagagtctatatcttcgataacatataacatacatgatttgatgaaagcaaactgagaaaacgtttttttttttttttttttttctgttttggtcaaagaagatgtttttattttattttatcaaattattatatagttttaactatatttttcatacgaggacagatttttttttgcatgtttgatatcttaattttttgaaaagttttgtggtttctagtacccatagttttctatttaaagtggtttcataaaacattaaaattctggtttcgatgtagttttctatacacactttaaagtgttaatagcactatttatagacagaaacgaaaattcaacactaattgattatgaaattttggaattgagttctcacgagcttgtgattatctgacttggacgtttttataaactattgtctttttttgtatcttaattttcgtggctttattcaaaagttaaaaaaaaaaaattaaaataataataatcagaaattgaaattttaaatttacattacgtgtaagcagaattaacttataatttttcataaaagcaaacaaaattttaaagactaaatgtcaaattcagtttattttcatagttttaaaatttaacacaaatgtttttaaaaatataattcactattgatttaaggttattcttaaataatgtacaattagaaactttagttacttcattaacggtaagaaaaagttgccgttacactcgttacaacagtcatattttgtttttcactgcgtaacaatttatcaaaatgtaaacatagagaagcggtagttgggcctttttctctcctttcaaaatatataatgggctttttagttcacggaagacctagagcttggaatcgtctgtaatatactccacactaaagtatatctaacactaaacaaatccaacggctgagagtcttttattcactataacacgtgatagttctccctaactcgtaaggataataatctgaaggagtgatgagaaaatattaacgaaaaacaaaaaaaaaaagacagaagacaaaaaaaaatcacgaaatctgattttcctctcttttgctcgaagccaagtctctgcttttactttgatccaccaacttcatcttcaacctctcgattttaggtacgtttttccctttctttgtgtatcttagaagtcttttgattttcacgctgattcatttctggaagtttttcgatttggtcttcatagattcctgaaatcgttagtttgaaattgattgagatctttgattctatatagaaaatttatctgatctgtttattctggaatcaatttgtgattagaggaaattgtgtcctctgttttaagtttctgattttggatttgaagatccgatttttgcatcttgatgattcatttcaaaaaatgtctaattttggtatgatttttgcttgtctcaggtaagattcttagagtgattttgacttatctaagaatggagctaaagagcattaaggatgcgtttgatcgtgttgcgacgaagcagaagctctcttatagcaaaactaatgagattgttcatatgttgtctcaagaaatcgataaggctttgagcatattagaggagacaccatcatcagatactatgcttcttgatcatagatctatcctcgctgatgtgaagaaagtgtttatggagattgctccaatcactcaacttgaagctactgagaaagagctacatgcggctttgaccaagtaccctaaagttcttgagaaacagctgaatccagacatatcaaaggcttatagacacaatgttgagtttgatactcatatcgttaaccagattatcgccaactttttctaccgtcaaggaatgtttgacattggtgactgttttgttgctgaaactggtgaatctgaatgttctacaagacaatctttcgtggagatgtatcggatactagaagctatgaagagacgagatcttgaaccggctcttaattgggctgtttcgaactctgacaaactaaaggaagcaaggtctgatcttgagatgaagcttcatagtctacactttctggaaatagcacgaggcaaaaactccaaagaagctatcgactatgcgagaaagcatatcgccacgtttgcagatagctgcctcccggagatccagaagctcatgtgttctctcttatggaacagaaaactcgataaatcaccatactccgagtttctctcccccgctctgtggaacaatgcagtcaaagagctaacccgacagtactgcaacctactcggtgaatcatctgaaagcccgttgagtataacagtaacagcgggcacacaagcgttaccagtactattgaaatacatgaacgtggtgatggcgaataagaagcttgattggcagaccatggaacaacttcctgttgatgcgcaactatccgaggagtttcagtttcattcggtgtttgtctgtccagtctctaaagaacagtcaagtgatgataaccctccgatgatgatgtcttgtggacatgtgctttgcaagcagacgatcaacaaaatgtcaaagaatggctctaagtcgtcgttcaagtgtccttattgcccaaccgatgtagacatctcaaggtgtaggcagttgcacttttgaaacgaaagctcgggaatttgtacgaccgatataaactggaactaagttctgaatcggtgaaatctgtgtcaaaattgtaaccttgtggtgttctctgtttctttttttcatgaagttttttaagtgatggggctttggtgtacaaattgatcaggggaagtttttagatgattggacatcccataagaatgtgtttttggtgttgttgctatttgtttgttaaaccttttgaatatagaaattctttacactgcaaatttagtttagattagctggaaccctggaaattaagctctcttttagaattactggtcacatggaaataaaacaaattgatttttgctgcgctcatctgttaaatagagaatcatgtcttagttaatctaattttcgtacaatcattgtttggatgggttagacacatataacgctacaatagaagtagttcttgagttagagaattaggctctttctttattatatgtgaggcaaatgttggtttattgtgttgttcgtctcttctttggttagcttagacactttggccttttcaagactcgtattggtttcttctttgattagcttagagaatttggctgtttcaagactcgttttggttagcttagagaatttgaattcctaaacaagatttattgggcttagaccccaaaagatgggcttaagctt

SEQ ID NO: 682 - DNA, 147215 bp, Arabidopsis thaliana
gaattcctaaacaagatttattgggcttagaccccaaaagatgggcttaagcttgcacttgtgtatatgtcgattcatacgtgtgtctcgttcatgcgagtcagcttggttttgaatccacgaatgacgagacctattcttctcaaaagagtacacaaaatatatccaagtttaaatataccaaaaggcaaaagcaatgaaccacgttccacgtatcaaaattttctacttcaatttgaccgattgactagagtgtattggtagttaatggggaacataatggggaacacaatagacgcacaaaaattggtaaataaaagagaaaatgaagaatcatcatgagtttttattcaattcacaaaagtacatgagacaaaaacaaagctcaattccgccgtaacaaacaaatagcattattatgttagccagttttttattttattttctggagctagcacccaccacttaaagaagttattttttttttctggtaaacaccactaatttgtattaagtgtttatgtacctttctgtttctttgtatcacatcattgcaaaatttaataaagtttaatatgaatgaatgtttacccttctatatatatcatatatatatatatactatgtttaccaattataaaaaaaaaatgaaaatcttgtgagttgtgaatatcatatacaaattcaaaactgttacttatatccaaaactaatatccataatttgattaaataaagagaaacaaaattccataaaaaaattcatataccattgtatttctttgtatcacaccattacaaaacttcgtaataaaatagaaacaacaaaactaaaatctagcattttcgaatccatggaggtcgctgactctattcatatgcttcctcatgatcgccactttagccaatctctcagccgctctccacgctgaagtcggtgtaagcggctcactcttctgaaccaccggctctggactcttcaccgccacgtgtctacctctcaaacggttcaaatctgccagctcagcttccaaaccacgtaagcacgaatcacttgagctcaaaccgtattgcaccaacaaggctctagctgatgtcagcattcgctcagcccccgagtaatcattgacttccactaaccgccgagactcggcaacggctcgtgtgctgacgtggaggtttcgtagccttgcgatgctcgggtcagatgatctaacggtcgtgggacgtggtatcattagcgcgcgatcttcatagtttttgatttcctgagtcgtaggatccacgtggcgtgatcggacggtcatgattctctgggatctactagacgaaggtgatttgagttccaccaacacttctctttcttcatcgccgtacatgtcacccaaccgaatcaacccggatccgagccaaacgggtcgacccgagagtgaataaactgatgtcacctttccttgacccgacccggaaactaatccgagatttagagtaagatcttgaaccgataaactcaacagactcttgatacgtttggcaaacacgtcctcggggagagcgtgattacacgcgccaagccaaatagtgtgcgttgggatttccaaatgagagaagcgcgtggaagtcacaaaatccggttgggctaattgggcttggtgggccgagtttctattacggtccgttaacacgaagatggtggtgaagagatttttctgccggcgatcttcgatcactttagccgctttcttaacggcatcattaacactcattccgtcgccatcaccggaaatatcgtcgacgattcttctagctaatcgccttccgttcgccgtcattctccgtaacggcgtcaatcgcttcgagctcgacgagaacgagaccatcgataaacgatccgtttctcgtagagacgatataacttgcctcatcgctcgcttcaccatctcaatattccctccgctaacgtcaataaccgttacaagatccaccggagatctacgcgccgtcggtaacgacggagatttgattttcatgagcaccgagtacgtctcgttacctctcccaaccgccacaattgcagcttctgaagacagcttaacgtccacgtgtccagtaacggaatccgttaacattttcttcgtcgttaacggtgacggcgtgttaacgtaaaaccctttaaattctccgtcatcgttatcttcttcttcttcgtcttcgtttgattccggtatagtgttgaaaccggtacgagagattggagatgaaatcaaaggctcgtcgtcgttgtaaactcttaacgatttgttattgttctttgattctcggatcttggaatcggattcggatccagattcgtggagagaagaagagagagacagaggaagaagcgaagtttctctccatgaagcaccacaaacaggacaatcggagagtagattccgatcaccggcgcgtgaagctacgcaagggaaatgaaacgtatgtgaacattccgccgtgaaaatcgccgttcctcttccagctttcgcgctttgtaaacaaattccacatttgctactactgatgctactctgttcataacacaaacgtaaaaatgttaactttgagttatttttaaaaatgttaacttggttgtttcgatttaggattcttactttggtgaaacagagttttgatttgagtagagaaaagctcgccggagatttaggtgaggaaggtgtagaagaagaagaagaaacgctgaggaaagagagaggacttctgtttctcgtcggagtaacgtccccggaagtatcgcattgaagcttgggactagcgggaagagacggtgaaggagtggagatagctgtagcagaccaactctgacaaggaatggtaggagagcaggttacagaatcgggtcgggtctcagaccttggagtagacgggttagagaaaaacccgaatcttgaagttgttgttggtttttgtcgatcaagtgaatcatcgactctgttgttgtctttctttttatgaatcgaactccaaaacgttcttctcaaaccattcatcatcttcaacttctttacttactatttcttcgtagtgacttcaactttagattgatgagaggaaaggaaatgtttttgaggttttaatgtaagacagagagtggagagatagagatagataaagaagaacaagagaaaatggtggggtttgagttttttttaataaaagtggcctacttttgtttatttcacaattaaagttgtattgtaaagattgattattgggattatcaagatttttctgaagataaatgaaaaacaaaaaatgttctctaaaaaactgtaaattattttaaaagttactgcttggcttttggtctagagactgaatcaccctacgagtctacaaatgtaattgtaattcttttttgcctttattaactcaagctccgaatcattggtgtagcttgttacagtcgaaattgttctattagttgatattagtactgtattaaagacgagattagatagtagttgtaattaattttatcgcgcagtcaaaattatcggggtgaaaaaaactttttgtatggttggaattgaatgtgatcagtaagagataaggaaacataataaatgaacgagagtgaactgcgaagatgatctcctttattcagagaccgtagcagcggcctattactgagtatgtgtgtgcactctgcttcaattctcttgtcttgagtcggtccatttttatctctatgtttctctcttttatttaatgtgttttttgtcactttatttccatatcttcttacacctgttttttataacagctttttaacgtacatggcatgcactgattcacacatatatgtggagtatttggatgcttcacgtgtatatatatagtggtcaattatgtaaaaagattaatttcaaacggctctagtttaaagcacgtctaacaaagtggtatgatttattttcctaggtaaaaaagatgggtgtcttttgtctgtatatatataactatatcttcacgatctgaatattgtggttaaattttttatgaaaataataactaatatcttcaagatttgaataatgtggttaacatgtatatatatgaagatttggaggtatctaacattttaggacataacaaaaagatactgacatactactgctaagactaaattaggactaaaattttatcttagtattctaattattgtatgtttacaaattaactttgcacattccctatgtttcagaagattttggttgtttctttatgttccatgtgccgcaccgaaacacatatatataaaagtatactatggagaagtgacaatttacgtgtgtaaatatgctctatttatacttttgtatatgttttagagcaacaacaactactgttggtacttagcttgtattctttcatataggagaggagtttacataattaaaattgatttttagaaaaaacaaattacgtaacaggaaccatttatgtaactgtatatagtttcatttgttagttttgttcgttattttattcaatatgattgaatatatagacttaaatgttggtaataaccaacgtataaagacaatgaaccagcagaacaccgtccaaaaacttgaatttaaataattgaattcacaacgacacgtattatttatcacagctccaagttccaataaacctatttcattaaactttagatttggaataatctctttcgacaaaaggataaatctcaaggaataataaaccagatagataaattatgataattaggttatccaaaaccccatcttatacaagtaataacttaatttttgtagctcattagttgaatttaacaaatctaatacgtctaggcgagccgcaccagtggccagagcggacatgtttataattttttatttttttatcttaaaacttttatcaaactattagcttaattaaaaaataaagacactatacgacaccgtatcacataaatccaaatagtaggtcattctcgagaagtgtactcatttgttgtttattcgtcgtatttttgatatatatatatctatatatatatatatatatatataaaatctaagacgtctaggtcacttattaattttgtaatgttgttggtcaacaatcaacttaaaaaaaaaaaatcgagattaaactctacggatgtattttagggtacttaaatgcctagtgaatctaagttgatggtttctaaatttgatttttaaagttttgatgtcaaaccaaactcaattcataatttcatatgagtgagagcatctcataactttattatccacgcggttcttaatcattgtttcttttctcttttctgattactgtttagtcaaatactattcgaagacaagaaaacgtcaaatctattcatgtgaatgttttgatgcggtgatttgactgtattgaccaagaactaactacctaaaatttcacacatacattacaattcttatcgagtcttcgtatgtagttaagtttactagatttaatcattgagatttgatcaagacccaccaaactttgaaaataatataattcgctgttgaacggaccacttaaacacttgtgttcctgaaataacttgatgccaaaaacatcggcctaatccattcttcttgtcggatttgattatatgatgatgatctataaaatttcgatcctaattaacagtaatacttcgatatatattaaaagatcaaaatcaaacaaaattgttgtgtggaagtagagccatgcggcacgtgacatgcatgaaggtccaggatactaaatatgggtttatggagacgattcctcatatcgacgataccctctacctggaccagtttctttcataactaaagtcttatttgctctaaattcgaaacctgaaaaggagtgtttctatcactgtatgctatcaagtgttcacattacttacactgatgtgtcacaattgtagagaaattaacaaccatttccgttgaccaattcttatatactttttatatcgttcgttatatttcatcaattaaccgaaaaaaatcaaaagaattggatcgtcatttgaatttttatggtgatttagaatctcaatctagttagaacaaattatcagcctttaactaaaccaagaaaacaagaccacaacgatttagttattttgtgtaatctcagtcataatcatcatattttaagtcaattaagcgctgatattagacttttcaattattattaaagattttgtgaaccattatgtagacaacaagattgagtcgcgtgagattaaaaaactcaggtagtggtcatcaagtatttaatttgtggatttgagcagaacaatcatcgaaattttgaatttttcaaaagagactttaaattcgtgaatcttactactaggatcaagcaagatctaatactttacacaaatatatacatataataaattagacatcataccccaatgcgtaatttattgattaatgtagggttagccataattaaacactacacatgtaaccaagcaaagaggcctcgaggggacatgtttgccctaatctacttggacattttatattttaaaactgttgttgttttttttctgtataaccaagcaagtttatatataattgtatgttttgttatttgtcaaaaatatcttgaaaacaataaattggatttttttttagttgacaaaaaaactaatctcatcaaatacaactatcaaatataacccgcagtattcaagcccatcttaacttgagaaaattgcaaatgttgtagctcatcttaaccttattgaagctagaacaactttttggtgcctaattagtttacaattttctttaaaaatttaacatataataaaccttatagctttataggaaaaaatagtacaaaaacaagtgttaaaaatttaaataatgtgtaaactatattgaacctagaacactttttaggggtttggatgatgtattcaattagtttacacaaaatttaaaaattcaacacttaataaaaactttaatagtaatataaaaatatagaaagcttttcacaaataaacaaaaggagaaaaaacggtaaaaaaaaaatcatttaaaaacaaaagagaaacgaaattgttattactaatacctggtttggatttgggtggttgggagtatgaaaagcccaatttcgaaggcccattagttagcctttcactgcaccgtctccttgccgaagaaactcagttttgatcaacattcatcgaatttcgaacctgctacattcatagtcgtccttcctacttcctagtcgccaccgtcgccaaaatccaccggtgagaatcgcgtaagaagcatccatgataacggatcaaatcgtacggataggttttgagatgaagaatgaagttttaagaaattcacaaaaatatgcttttagtgttaaaaaggagaaaaagatgaaagatggatttttggaagatggatccgagtgagagtttttataagcaaagcttgtttcaagaaaaaggaaatatttcgattgtttccttttgttctccgacgaggttaagaaaaaggaaatttgctcgtaacggtcataactgactcatagtgtatttgttgaaatagatcaatgggatgttgaaacagagatttgctcacaaccgtcatatttgtctcttagtgcgtaacaatttatcaacgtcaattatttcaagtttcttatttgttgaaacagagaaactgagaaacagaggccaaatgctgcaaagtggctaacaagttcagaaccaaagaaaccttgtatttgagctgacaagaagaagatgaacgagaacaataccaagaaaattcaacacttgatcagacccgattgaaccttcatggtttcagagtagaatcatcttcaaaagttcatgtttcagcctttgttatatatataagttaactagcaagacacaacctctatggtttcagacaccattcttcttcagctttatggtttcaaacaccctcacttgttacaacattcttcttcagcttcggtaacttgtaaaatattatagaaagaaataaaacaacagaacaaaaaacgtttttaaaaatgaatgtattattcactagtgaaagtgagaatctttagtttccaagcttctttatcatcccaactattccacttgtggatggtcaactagaactgtgccaaacaatatgattcagcaatggtgcttcttatgtctatcatcaatgagacactagaaaaatgaaagagtcatgaatcaacctcagcccgaagaggagatttcatgaaaccattctccaatttcaatcaaatcccatcacaaaattgaccactgaagaatcaaaaacagaggccacttagtcaaaaaaactctgaaactccataaactctgcccactcttcagctttcactatcctttgttccttacacaatttcacaacaagacattacaatggtgtttattagaagtaaagagtttcaaaatccatggaagccattgattctatagaggtaccttgtaatactcctcgagtcctcgtcctcgaaatgaagatttgagcagatgggcttttggaggttggaatcaaaggaagcatcggatttgagggggttttcgaacattctcttggctatttcgagttgatttctcttccaagttgtgtcgtctccatttttgttgttacagtggccgagctttttgttttcacagcgatgggtttacattggttttgaaattcaaattgatctcggttcggtttaatttggtttagagaagaaaaccaaaaaaaatacgacacgcgatgggtttttgagaatgaggtgcgtggatccaaaaatgcatgatttttgtggattaacccctttagaaatcgtagacacgcgctcaacgcgacatgagtgagagtggctgtgaaatagcacgattggtaaaagtggagtatgaagtggagctctctcattggctaaaaatataaaaaatagtagacatatagctcctatcctcctcctctcctgctgagaatgaacttcaaattttattcaatctgaaagttgtgtgtgttttagatacaattgaaaaaaacttgaatatggactttgtgatactaaaaaatttcctcatcattttgttctgcaaccatatttacaggttggagcttataactgaaaacttgattcaaagaatcaaactaagtgagttgaatattttctaaacatgtgaaatatattggtacaagtttgtccaatcattttgctattttcctattttaatgttttctccactttaggagatggactttcaagtgcaaggaaaggatttcagaccaagaaactttaactcattgatcagactggaaccagtaaggcttgcgtgaggttcacaagaaggcttatgtgaggttgacactggattatgatactttaaatgctgcaatcaagactggaatcatctaaaaatatgaatccttcagcttctttaaccagtaatatgtagattaacaatatgaatcctttgttgaataaaggaaacaattaaacgtttgtttacagataagactttacataatccaaattttatatgaagctatctgttatttattacaacttatgaattatgataagcacgtttttaacaacatctccatcagtttcattattttgttgactatattaacattacataaccatataatatatatcacttttgttgattagaataatcaagctgtaactgcgtcgttttctactgatggagcatttccattagcattgttcttcatcatattaccacatcctccaccgcaattaccgcagccagtggaaccgccagtgcaggatccgccgccgcagccttctatctttgtcatcccaccgcacctaccaccaccaccacatccacctccacctccacatccaccacaacctccacaaccaccacagtgaccaccttcttcttcaatcatgttcccacttagctccttcgaaaagcacctagcaccaccgttgatcttctcggccgctacagcaactggtgtagtcgtatccacatccatcattgtttcttcttctagcttttcttgactcaaaacatcaatctccgtactttcctctgttattccattagctttcaccgtgtcttttgcggctgcactaaagccttccttcttaagaagatcactgagtatgaaagaagataccattccaggcaaaaccagccatttctcatttgcctacatattgaaacaaaccccaagtcagaaataacaaaatggttgattacaagatcaaagttgcaaacgttacctcaatagaaccgaacttcaaatcgagtaaccccacagctttaccataaggatgttgctttgagaattcaacagcagtcatgaaatcttgctcgcttcttagctttgagcaatgttttggctcatactccagctttctcccggagtaaactttcaccattcgagtaccggaaagctcaaacagaggaccatctgtggcaggattgcatgtctgcttaagtgaccattttgagtcgagcagagaccagaaagtgccatcatactctgccaaaacataagtttcaccacactcttttacaccaataacttgtcttctatcaccttttggtgctgcgtcattggagttcctcatttggaggttgatcacctctgtttcggtttcatcaacaacgcgtgtaaaactcttagcaagacgtacctttcggagcataggaaggaaacaagagcctttcagtgatggtcttgcttgaaccaaatgtagaacagttggacttcgagttggcggggtgaacgagacagcgactctcaaagagatgggattcggatcatctgcctttccccttttagttggtgttaactccaaccacttctcaacagagagtttagttactggagaaagaaactccgaaaacgataaagaagtgaaacctaagctcttagacttggaagacattagttggaaactaagctctcctgtaggctcacactggaacaaagcaacttgcttttccccacaagactcagataaaacggtaagcctacgctcagcgttaaacagagaatctggttgagttttgctgaacagaacaaagacctttcctttgtgagcatctggtaagttcttaaccccaacaatctccaagataacttcaatgactttcacctctggatattggattacattctgggactcttcctctttcgcaattgatttctttccagaacaaacataaggagaagttgtgactggctttggggtattaccacggttcatagcaccggctttccaataccttcgaccaaatgtttcttcccattgagcagtagttccagagaaaccagtatcaagcttcttacctttgctacggtcagagtctgtatcatcatgctccaagaccttaccaatcatcttagtcaaatcattgcaataagagatagcatgaagctgatgtgtgtgccagataagatcaatatcgtaagtcggaacacagaaaagtttgatcgatctttctcggttacccttgatcaagtagagaaatgctttgtatctagccacagcttcttgcagaaagacgtcattatctacatgagctcttgaaacctgcaacaaagatacacaaacaaaatctattacaaaaccttgcaacaaagtggtttgagacaagaagctgaccatgatgttacctggtagaaaaatgggctttgtctcttgacagctaaaacaagatcataagtggtacatttctcaagagctgagacatctgctggctctgagattgcattggcaaaatcaaggtcataaggctccgtaggatacaatcttttccatagagtttcagtttgtgatttgcagtttccatttacggaagatacaacgccagaattgtccagaactctcccatagaattgctcacaatcagtcttatacctcacctgaaatgattaccaaaacattttgagctttgtatacaatctaaagaagaagaatataatcggattcggatatagatataccggattaagcctgtggcaatgccaaacccattcacagtcaagaggagggactaatggtccttgacagatagaagaagactcggtgtattgagcaagcaagggaagccaataagcattgtatctacagatacaatcacccaaatttgagagttttgaaacaaaattctttattgcgatggaaagaacacaaaaccaggattaaaaacgaattggtgatattgatttaaacctgtagatggctctttggagtgcagggccatcgtagagacaacggttccgatcaacagctccgaggaagagaaggtgtttcttggctgcagccaaaaggtcaacgcttatatctatcttctgtgcttcgttccactccaaagtttgctccttttccttgtccatctcttacaaattttcacctgcaaaatacaaaatgaaaagtctatataattgacccaaagttttggtctttatcttcttatcttgcaaaagaacacgcttttgaaaaagtttgaataagagagaatcaaactgtaccaatgggggaaactttctctgataaagctgactcttgaattttgtttgagagagaagacgacttcaacagccactatttatagcggtgttctttgcctttagaaaattacgatattacccctctgaccaggaggaattaaaaaaaagtttaaaatctttaagtatggaactgtttcttctatgtcgttataatttaattttcttaatcaacatttgaatatgcgttccaacaattttaaaaaggtggaaattgcgtgagatcataagattatcgaccttcgaggaacaaaatgcatgtccataatttgctgacattttcgctaactttgtctccgttcatggacaaaggtaagttccacaagtaattgaatttgaggccttacaacgacaacgccaacaacatgaccaagtctttttcatcaagcttctttgcactacaaaaaccgacaaagcccagattttcctataaactgttttactttcaaagttccaagggttacaaaacaattcaattatcgccattcttcatccataaaccaaacttaaaaggtcataatcttatgtgaaattgactcatttaaccggtcaagataataaccgtaaacttcatgaaaataaccaatcaaacaaactacatccgggactctcaataggtttcgaagagatgatacctctcaaataaggttttaaatacacaaaactaatcaaatttgtgagggaggagataagcatgtaaacttattttgggaaaaacctgatttctgtatggaaccggttagcggcaacctcacttccttgaaccactggcctcctcgaattcagcttcaggcgtctgctcagtcccacttgtaccctcaccagagcttccatcggaaccagatgatccagatcccttagacatgtgttctccgatcttcgacactgccttgtttgcagcttcgaccttagccttgatgtcctcgacatcctcaccagccatagcagtcctgagatcagacactgcagtttcgatctcagaggcaatctcagctggaatcttctctctgtattcactcaagctcttctctacactgtaaattgttgtatcagcactgttcctaaggtcgataagttgcttcttctcttgatccttctgtgcgttaagctcagcttctttcaccattctgttaatctcatcgtctgagagaccacctgaagatctgattgtgatattctgctctttacctgttgctttgtctttcgctgagacagtagtaataccatttgcatcaatgtcgaatgtaacttcgatctgtggcattcctctaggtgccggtgggatgccaacaaggtcgaattctccaagcactttgttgtcagccgccatttcacgttctccctgaagaactttgattcccacttgcatctggttgtcagcagctgtggagaaaacctaagaaccaaatcacaatgacaaaaataaaagtcagcaacagttttcagacgcactctgatattgtactctgtcaagattcattacctgagacttctttgtgggaatagtggtgtttcgtggaatcaacttggtgaagactgcacccaatgtttcaatacccaatgagagaggaaccacgtccaaaagaagcaaatccttcacatcaccacggaggataccaccttgaatggctgctcccatggcaaccgcttcatccgggttaacacctttacaaggactcttcccaaagatctcagaaactatctcttgcactttgggaacacgggtcattccaccaacaagaagaacctcatcaacttccttaattgtgactccagcatccttcaggcagttttggcacggggatcttgttctctcaatcaacttgcccaccaaaccttcaaactttgacctagttaaggtgatgttcaagtgcttagctcctgaagcatccgctgtaatgaaaggcaggttgatttcggtctgagttgtcgatgagagctcaatcttggccttctctgcagcttctctcagcctctggagggcaaggttgtctttagtcagatcaatattatctgatcttttgaactcattaaccaagtactccaacaaggtgttgtcaaagtcttctcctcccaaaaaggtatctccatttgttgctttaacctgataagagaaaaataatcatatacccacaaaagagaaaaggcaattcaaaaaaaaataacatagcagaagaagaaacaagggactacctcaaaaacaccacttgagatttccaagatagaaacatcaaaggttccacctccaagatcaaacactgcaatgacaccttccttgttgttcataccatatgatagtgcagcagctgtaggttcgttgatgatcctctggacatcaagaccagcgattttcccagcatccttagtggcttgtctctgtgcatcattgaaataagctggaacggtaacaacagctttgttgatagatttcccgaggtaagcttcagctgtttccttcattttagtgaggacattagctccaatctgactgggagaaaacttttgtccattggcttcgacccaagcatcaccgttaggtgccttaacaatcttgtaaggaaccattttcatctccttctgagtctgtggatcatcaaaacgtctcccaatcaaacgtttagaaccgaaaatcgtgtttgttggattggtcacggcctgacgtttagccggtgttccaacaaggagttcccctttttggttcatagcaacaaccgatggtgtggttcgacttccttccgcattctcaataaccctagcggtctgcaaaaacaagatcaaagtcaatacctttagaatccagaagccaaaatcttaaaaaaatgatcacagtgttgagacaaattaagagagttttacctttccctccatcacagatacacaagaattggtagtacccaaatcaataccaataacatcattccccacaggcctcgagctagatatacataacaacacacaaacgaaagtatgagataatacttcaaaagtgattaagttcttcattcaataccatatactcagaggttgatgttaccagaaaggtctcgccaagtaacctaatttcccaaacatagaattctttccatttgcggaaacctgcagagtgaagaatactaacagtgtaaagcttcaatccaaatttgaaccattcaaaaaccctcagtgaattattatcaaatcaacaaggaacaaaattagattgcttcactgatgaattcaaagaaagaaaaaacataaagtacggaactttaagaaacctagatcgaaacccctaaatcaattcaagtacaacataataacccagattcaaccgatgggtaatttcaatcctattaagtgttaacgatttcagatccgaagaaacgtgatttctcaagtaaaaatgaaaatgaagggaaagatacatacggatttaaacgcagatacggaagccatttggacttcacggcgacgaaaagaccgtagaagcgcgacggaggccatttgattggattagagtcggtggagatttttggatcggagggtttaaggtcggagagatgaacaagaaatgttttggctgctgcttacgcgtagggtttaaggccttataataaaggttgattaaactcaaaatgactgttataaccttatggtgtttttataaagtaacatagattacacggggtaatataggaataccaatcaaaaatattcgtgggctacaagtattatgttgacttttcttactaacctggaccctacatgggcttattgatctcatagccaggcccgacctttgccaaaaatattaattacaaattagacctcacatttagtcgtaattgcaattatagctgagaattctacaaaattactcttttccccattacataaaaggtactaattgtaaacagagtgtgttcatggatttcacaattttcagttcaaaaaatcttcaatagtcgtatcttcttcttccttctttggagtttcatcagccacgattgttttcttgtctaaatactcgtcttcgatagtgtccttgagaatgaaaagccgctgaataacgataggttggctcatctgtttagcttctttaatgtctgtttcttctttgttgagatggtaagcatcaagcattatctttatccacttatgcagctcctttggcgtcctgtgtcatcagcttggttagaatcaatggttgtggttaaagatgaaacactaaagtgtgcatctttatgttacttacgtgtataatgctttagggtccttagcttcgtggtcatcaccaggagagaatgctgtagctagggcagagaatcgttcttcggggtctgttatgttgagtaagtactttaaaagtttgatctctttcggtgtgatgcttctaagactgctctttgtagctttgtataaatgatacattatgtctttagcctgttcaaaaaatacgatatcgatttgagaagattgtgaagaatattaaagaagattgtaatccaatggctattacctcgttcgtaacagtttgagactcttttgcagcagcgtatgcactgttgatcaataagatcaatgaggaatcaagctcctttgccttggctaaacttctgatcttttcgcaagcagaatccacggatggagagtttaaaatatcttcaaactttgcttgagcagtatctagagtctcaacactctccaacgtgttgtcataagcactcacagcagataaacatctagttgcaagcctcgcaacagctgctcaaaaataacaaaacaatcatgaaactgtgggaatcaataagtaagcaacatgattaatgttttaagtaccatctcggtcttccaagccatcaagagtttctgataacaaagtaacatagcggaaaaactctcccgtaaagtctctgcgtctcttggcagcgattgcgtttatgtctgttgggttttcttgaatctccttcaaaaggtcattgtgtttctccatttccttatctatctgcaacaatactcactcctataagtacacaacaacaacaataaactaacctgagttcactaataaacacaaaatacaacactataaataccttcttgactttactttccaaagataccagtttctgcttcaatataggatcagtttcggtatcagctcggattctgcaacgcttatagaaattaacactgtacttgttccattcatctcttaaaaccaaatacgtcttccattgtttaactttaggtttctcattcaagaagagatcaataatcttgtcacaaaactgagccatagtgtaaccttcagcaacctcaacttccattggatcctcaacagagctttttacttccgcacctaaacacaaaatttctatcttcaataaaaaaagcttctctaactagacgaatcctagtctatgaaaagggtttagcttatctaatggtgacaattaatacaaattggaatctaaagaaatagaatttattggtaattagacagaaagattagagatttagggtttatgagcttacttgtagtgccattgtaagtgacagtgtcggtagcaaaggtgatagttgagcttttgcgtatctttcttcctccattgatgaaagcagagaaagggagatgatgggtttgagaattcttaggcgggaaagacagtaatttatcagcagaggagaaaaagattgatgtttccagtaaattcgccattttttctccctcacaaagttcgtcttggtgacgaacaacgagaaacaccagaggataagaagaacagggttttaattgtaaataattagtaaacgttgacaaattcaaaaacttaatataactttttgggtaaaaatgttaaaactaacaagttttgcatcagtttgaaatctttttaaaaagaggcaaggagtaaggaacatgaatgagcaagaccagaattgagtttctttgacattacatattcacatgaccttaagaccttacattaacaagaaaagacaaagaaacttaagattgattattacaaaaataattatagcatatgtcatgatatatacatatgttactttgtgatagacaaaattaaaaagcatactacaatatatttatattcccattacatgattataaaatagagtttgtttcactaagcgtcctcttgaggctgaccatctccaccaccttcaatgttactggtattgaattgtacacgaggctttcccatactgaaattaagaactcttgcatccatattgtattgtatttctccatcgaacaacatcttccttatgtaatgttctacgtccgatcctatcaatctcaatgtgtactccgttaatggtgctccctgttcaaaaacaatattataaggtcttcttgaaatgagtctaacttttagatgaatgtttcgttcgtttattgttatcgttacctcgtagtgatcgacgagttcttggaaataagaatagaccttgttacagctttcatcatcccacacaaattcttcagtaggatcaagaatcaaagtgagtttatccatttgtgactggtcaaactcacaagtctctggatcaatataagcagcgtagatcctaacgtgacgtgtgacactgcttagccactgaccaccaaaatcgcccatacccttgctcttcacgttcagctgtttctccactggtctcaatggtgttggctgcttcttcatcttctctgttgattgctcttctttgagtgtctctgtttcttgtacttcaagagtactgtcttgttccggatttgtcaccacgaacgccttttgtgttgttcttggtcggatttgagcaaccatagaaggatgtaatagagaaagcttggtgcaggcagtgtaagagaatgctgcaaccatttttctgtctaagaaatgaaaaaaaaaaaacagaacaagttttgagatgttgtccggttacagaaccatattcttgtaaagagatttgatgaggttgagaaatgaccacagcttgtggatgagcctctcccaacttctagtttcttatttatccctttctcgttttgttggtattttgtggttactcttaagtcacttgtgagctaaagacaatcttctttagggaattcactgttttgttgtatgtgttttttttgtctaagtatatttctttttgatgtatagagagaaaatttaacagatcattatttttcgcatagcgtgaaaatagagttttacatgtatcatctatacattccatgggaattcaaagcataacagaaaacacttgtggggtgaaacagtttagttcttgtacttcatggtttctttctcaaacccaattgttgggaactgcttagcgaattcctcgacttcatggcgcagtttcgcaatctcggattggatggttgaagaggattccattgctgacacgaaatccttcaacttggttcctggttttagaaacataacaaatgagttcaatcattgtatataagaacggaaagcatagcatcgtgatcagagaagtaaaaaccttgagcttcagatttgactttgagagctattgtcacagctttgtcgaagtattcagctactttggcaaagtcttcctcaacaaagcctctggaagtgagagcaggagtacctgaaaataacaatggcagaggatatcaagaagaactccattcgaataccaaaaagaaaaatggttaaatgtgatttttacccattctgattccaccaggaaccatggcagaaacatctccaggaacagtgtttttgttggatgcaatgtgaacagcttccaacactttctcaactctagatccatcaattccctgcaaacaaaatcgaataaaaaatgagttttaactaagaaatataaaagaagattatatacaaaaaaagatcaagtgaccttgggctttagattcactagaaccagatggttgtcagttccaccagaaacaagttcatatcctctctccattagagtctgcacgaaacaacaatgtagagatataatcaaagtagatactacgccatatgtgtttttctttccttcacgggattagtacctgagcaaactttgcactgttactcaggacttgttcttggtatgctttgtactctgaagtagttgcctgcattttcaaaccatttgaaggttacagaaaccgcaaatccaataagcaacgttagttccattccgtgcctcaccgtacctgtttcaaagcaacagctagtcctgtgatagtgtggttgtgtggaccaccttgaagaccagggaagacagcttggttgatcttgtcttcaaaatcatacaaaacctttcaagacaacaaatgaatgacgtgaaagattatacataaatctaaaacattttggttcaaattttgcttctttttcttttttacctctttcccttgcttgttaatttccttaacaccctttctgaagaaaatcatggctccacggggtccacgaagtgacttgtgagttgtggtggttacaacatcagcatagtcgaacggtgaagggattacattagcagcaaccaaaccactgatgtgtgccatatctgctagcattacagctttttgcttgttacagacctgggaaaagagttcgaatcaaaactcactactgattacaataatctgttctgtagttggatatgagactgaaattacctttctgatgcgggcatagtcatacaatctagcataagcacttgcaccagcaacaatcaattttggcctgaaaagagtagcacttttctccatctgcaaatcaaaattaaagacttatgtattgttatgaagcgggttagttataagttactatgattgcttaatagaagagttaagaacctgatcgtagtcgatgtagccagtgctctcgtccaatctatagggcattgtttcaaagaagatagacacagctgatatcttcttggtgtcagtctgatgagaaataagaagaaagaaactgttattcatcagagtcagagagttccgaaatgacatacaaagttaacttgaaggcacctgataaccatgagaaagatgaccaccatgaggaagatcaagtgccatgattctttcatgaggctttaacaatgcagtgtacacatggaagttggcaggagatccagacaaaggttgaacattcactgtaagatccagtcaaataagccatcaaaggactaatcagatttcttgtttctcatatacatgaaagtagtaatttacctccccacttttcaggatctaaccggaaagcttcaagagcgcgcttctggcataaggtttctgccatgtctatatacctacaaagcaaaaggtacttgagatttcaattcttattacagagattggtcaagcaatcatgtcctgaaactaaatgtgtcagattgaaaattcctgaacatactcatttcctccatagtatctggcaccaggatagccttcactgtatttgttagtcatgacagacccaacagcttgcatcaccgacacagatgtgaagttctcagatggaataagttcaagtccctataataacacaagcgttacaaacatcagcctaacttataataatcaatcaaggaacaagatttaagagatagtaatctcagagacaaactaaccttccattgtctagctttctcatgctcaataatgtcagcaatctcaggatcaacctcctctaaaggtgcgttaagctgttttggccactgaaacgaacgtttacaaagacataagtttcattagattcagtcacaccaaaaatagaactccatacatcaatttgaaacagacatagaacttcaacaatcaaaaccattgcttcaaccacaaggaaaactataaacaaacaagagatacaaaaaggcgcttaaactcacagtgacacgagatctttccttctcatcaacagcttcactgggcaaagaagactgcaacggaacaaacagaaatcagaaaaaaaaaaaaaaaaaatcgaaaatttccaatccgattataaaattcggagataaaaggaagaaactttagggttgttaccatgtaacatgaagtggatcgaataagaggacgaatgggtttgtcaattgaagaagaaagccttcgaagagccatggccatcgccatttttcgctaaacctctctctatctctggtttgtgaaaccctagaaacagatttgaaacatgaacgagagagaagagagaacaaaaataacaaaattgggtttatcttgtttgagagaattgtggcctctgcttttggctgagcttttggtggttgcagcaaattttcgaattttttccctctttttttatttatattttcttctgatttttattttatatttgttgtttctttgtcgttatctctcaggtccctgtctacaccaacctttgtgaattgtgatgatttggtgacgacgatgatttgtttccctttaagacagaacctttattggtttctggtcagtgcagtcaacgataaccgattcagttatcacacatcaatttaatttatatagtttccaaaccggttagtttgggggaataagattaacagaattatggtgaatttacaaaataaaaccaacaaaacaaaaaacttaacagaaaatgtttatttaacattttagaattaccaagtgcatggttatatatattaaacaaattattgatctaagaatattgatatttgagagagttttgaggataataattcatatgatttttctctattaattgacgaatctatggttataaacaagtacaatattaatactcaagatgagtataacaacaccggattttaattatatatgctttaattatatttaggattgaaaatatgactatgttagaagaaccatgctgcttatcgtacgtggcttggtgtatagaggtttccagttcaagaaccttattcaaaccaaggcctttggagtgttcttcaacatcatggtatcttccaacttcaatctgtgaaagtttttaacgagttacataaaatatataaaatgcctaaatggtgcatgcatgtttgtgaaacatcaagatcaattaaaaaagtttacctctctgttattcgtttgctcttggtggagtgtcataatcggaatgttcaggctggcttagttgcagccgaatctgagtgtgtgattcatcatccgcaacagctacttcacggtgtgtaaacccgtttgtgtttgccatataagcctgaaagtcgaagccatatcacttcgaagctcttactccaaagaaaatggagtttttgtaaaacatgatttgttaccttcttgtagagctccacattttcttgatgaatccgttgtactttcctagataaatcgaggttttcctgatgaataagattcctctgcaccacgatcaacaaaaatcccaaaattagaattgtaacttttggtaggggatatttgtgtgtgtcagtgtgtgtatatatatatctcatcatagtgaccttttggcttagttcttggatttcttgagtcaacagttgttcctgtgaatccggaaaagcaatcgttctattgatttccgttgtgttctatagtcaatcttttgagtaatacactccaaagcatataatagaaggtagagtatatgtatttatgtacctttctcatacgaattccacgcaaacttatctcaatttgattctcaagactgtttagctcgttaacacttaaaccatttagctgttctcccatcatttgcctgcttcatagcaaacataccgcaatccataactacaagtttcttcatttcctttacatgccttctatattttgatcaaagactaattcttaatacaaaatgttataaaagttcaaggcgataccgatgattttcttgcaaagcatgcagttcttgtcttagaacagcagcttctctctgccaaaactgtaacacacaacacaaataactcatcaaactttgaacagctcagtaaaccaaaatctcatttcaaaaatcaaacatcatgctaaagcatcaatcaatatataatcacatatctttagagttgtcgctatatctatatgtataccttgacttctgatgcggggttcaatagttgttgttgctcgatcttgctcttgttgtatctatcaataaccgacttcatgctattcaaaatatttaatattagtataccttgttcatggtatataattcactcatatcatatcatctcttagagtaaattacgtaaaagatattaattttcgatcgtgaagtttttccaagtactccattaaaaagctttcatacgtaaagaaaaaactcatagcctagaaatttgtgcaatatagactttcctgcattggcaacattatttacacacgcttatatatgtacacatacatacatttcacataatgtatataatcttgaactcagcagtaatacgaatttgttacacaaactagataaactatatataaagtaagtagatgttagtttcttttttcaataagtaacaaaaacaaatgcttaaatgttatttctagggtgtagataagcaagaactttaaaggaatccagttctaagctataaacaaaatgacataaatgtaatgcattagcatggcacactttattttaaatccaagcaaacaataacatggtgttagttagttttaagaatggtatataaacttgactaaatatgctaagtaatttcatttaccaagaggttcgtaaaccctatgatacatgagaaatgttatcaaaagacaaacgtgaagaattaataatgcttaaggttgatgctaatataaaattcctcaaggaaaatagggaaaaacaaaaattcgcattaccatactcttttatttggttgttttaattgataaatatgaaattatataaattttcaaaatatataatcaaaatattatatgatttagaattacatgtttatatatgttttctaataattagttttttatctctatattttttttatattaatcaaacttttaacaaagaataacttactcagaaaatagacaattataacgattttgcagatataaagttaaatatacagagtaatctgatcgtttagtaataatatatatgattatatataaatatcaaaaacatgtttatgtttacgagtataaatagatcattttgttagtgggttaaactaaatcagcttccagtttattggatttgagaaattaagtcctctacataccaatcttctaactcgtggtctccaattataattcttttttagctttccaatagtgatgtttgggcattcacacttgttttctcatctatttctgaaacatatctaaatttggaaaatgcaaacaatgagccttagttagttataagtcaatgtccatacacataaacatatgttaggaaagtacttcaaaacatactgatgatgggtacatataatcacccaaatatgaagcaaagaaactacttcaaattattttttcagcttcaaaaatattactcttctttaaaacttctacctcatttttaatctttctttgttgtaagaaaactgtttgtcggctatacaagacacatcttattgtacatacgggaaaattaatgtaacatgttctacggaccgccagatgcgaaaaaattccactatatttgaatagatcccacagctacatatatctcagtgaatatcaccaagccttctaataaacaaaaccgtagcataaaattatatgcatacagtggtacacaacatctccgtagatgtacatccacaaaatcaagaagatataaagatttcagaatgaataattttaaaagaagaacctggagcttgcaaagtcatagagctttccggtgctagagaagatgatgagaccgacctcggcatcacagagaatagctagctctttggctttcttgataaggccctttcttcgtttggagaaagtgacttgtctactcgttgaatcatcgatcctttggatcacaatcttccctcttcccatcaattttatcctctaattgaatctcctctggttcttctcttttttagggtttttttttttgtagatcttaccaagcccaaaagggaagggaatatgaagatgaacgaataaggagaaagagaaaggtagaaatagagagagaggaaggttgagccaagagtcaacaatctattcgaggaataaactaagtatatatatgcatatgcacacacacacatacacactcacctctcagtttgagacatttttgggtagatttaatacatagaaaagtactaaatttctagtccaaaattagtatttgtgtgtatgattttatcaaaccaatgaaatagagagaagttcttataaagttcctaggttaagagaatatatagatatagcttaaatgtgtgtcatatatacaactttaatcactgattcttttttatagtttgtttattacgggagatagtggaaacttaatggaattgtttagataaaaaggagtgaaataatattaaacttagtgtgagttaggtaaatttccattatcaataatatttcctttttaacatgtccgtacattatttataatttattcttaagtcttatttcaaatgtcatgtgaaaatagtgaatgggcgcatcacaggactgtgtttctctgacaaaaccctcttgctttatatgctgctttacttaatttaattagtatcttttagaggtgattaaaagaaaattaaaaatattctggccctttattatggtcataggaaaacttatactatattaattagatctgtccaaaagatatttacccaaaaaagtaagagaatggattgaacaaaaacatacagtattaatctagtacaacatatattagtccatatggctttcggtagaaatacaaatgaataaattatttttgtgtcaattaataaatgattttaaacgatatcaagtacacgtgtcagacagggacttggagttgcggagattcatcatattaattgttttgtcgtaagtttccaaatatggcaagaaatttaatatcaaataactatataacgtctgttactttcgatggcttaatgcttgatttctactcaaagcaactcgcgttcaatatcataatgaaatgagctatacaaaattttcacttatatatagaatattttcactcagaaggccatatatatataaaccgtaacttatatttcaagcttatgcatattgcaaatatacaatctaaaatgtaatatgcatttgtgacaggcacacgtgggagaagcaggaacagctcctgagaacaccaattgatggaagtcttcgcacgctccaccgcagaatccgtacacctgatccttcattactaactatttttgtgtgtttattttagtttctttgaatgtctaaactttaactttgaccaaccctcaaacttgccataaatcaccacccctagcgcgaatgtatccatcaattgaatttgatttaaaagtagcaaatgtcctttaaaccgaactaaaccaagctcaaaccctaataaccaagttcgattttataccgttgatgtataagatttaggtgggccccagatagataacatgataattaaagatctattaagaccacgtgggctggactgcttcgaaccaatcacatctcgaatctcaaactcaaattcagatttggctctttttctattaacaaagaatcttaaagttgcttccaacttccaagtgaccaaatccccaattatcgtcctcttaagataaaagattcagtctcattcacgccaggtgtcaatcatcagcgaatcatttcgattttaccaattataatcattattatctttagttcgacgggtttataccactctttcttttacgtttcaagcctattgtctacgttttccatatttttcaagtctaaaacataaacaatctagaattatcacaatctttgtttattttggttcttaaaacccctttaacaatatttgttttgtgtaattgtgtgtgtttatctttgctgtgtatatatataagacctatttcttaagaaatgttttgtaatgactaaaccaaatatctaacacatgtatagaatctgtaatccataagagctagttaccaaagagtaataggtttcacagatgacctatttctttaccaaattaaattgcttactatagagtttaaataatacacccatactactgactatctgttgttcaagtagcagatttatattacagacacctattgttataaatatagaatatagtttttcaggtgattcttggaactttacaccaacaaagcatgttaagtatataattaatgctatattttagatttaacttttcatcatgcgtttatgtccaattagtttagtcaagaacagagattatattcccatttgaataccgtaatgtttcattattcttcataattagtctccattattcttcataagtagtcgtctaccatttgacaaaaaaatatgttaagtgaaaatgtataatagatattggttctataaagtatagtttttttttttctggttggtgctatagaattcacgtgagagggtaatcagagtggtagtgtgaatgataataaaccttgtttagattattgatcagaccaagaaaaggagataaggtggtgtcccttttgatgttttaaaacttaaatcccacatattgggtccataaagtttataatttaaacatgttctcagatttccgaagataataataattttagtatgtaactgcaaaggtcgagtttaaaagatggccttggaacttgaagactggtggaaattgtactaaatgttccaaagttgtggccattatttcatttttagtgtatacctctgatagtaattaatttaagattcgatactataccaaagataactaaaaataataaagagaaattatggtgtattggttttataaattgctaaaaatgatagttcttttattggagttataagaaactagctttcttatttttcgacaaacatacttacgagaaggagacgcatacgcgagagaagaagaaaaaaaccacagcaaaagtcattgggtatatgtcagtggtcctttgccgtatatgttttctcctccaatatcgttgcagtcttgataactttgtgcgtttaaaacgctaattaaagttaacaatacaagcttaggatttaattttggtttttggatataggattttgatattatattttaattaaatttcttacggtttaatagaaaaaaagcggtcactgaaaatgaagaatatgagcacgaaaaatttatagaagttttgaaattcctttattaaaattcctagaatttttttactaaaaaaaaaaaaaaaaaaatcagaccaagcgtcacacacactgaaccaacgtatcaataggtaattgttgttagctttaatatataataaaccatagtcaataatgtgcatttaataaacaaagcagtcgagatcaacggtaacactagttgaaaatgtcatcatagctcactatattttgaattttcatttttatataatgattcatttttcgttacatgtagttcttaaagtaatccgggggatatcagagcatgatttaaagcggtagtgtgttgcataattggggtatagctaaaaaaggaattgaccattaattttactaaagagtggccaaaatttatttgccatttacaatcaaataatttaattataagatccattattcgttacaatagatgccctctatattatgcgtatgtatgtacgaatctaattttattgatatttgcaaagatgtttatggacttgtgccatgattcgatgatcagttcgtaagaccttccttattattctgatggcccaaaccagaagcccactaaacaaagagtttttttttttttttttttgaccgcgaaccattatataacgaggcttaaaccattagattcagattctactagtactgacgtctccattaattgatcaaacatttggtaacttcttcctacattagaggcgtttattggttcatggattttaatggatttaaatattttctaaaaagttttaaaattatgcggattttatttatttaaaatcaaattaaatggatttgaaaatcatacaacatggatttcaaaatctaacatctagataacttttatgataaaacaaaaaaatagcatataaaaataagaaataatctctagtattgctggttttttggatgctttgttctaattatgttaaagacattgttgggaatttttttgctgtatcccacgcttacagactactacaactaccatccttgaatctctctcttctcttagctatttattattaaaaaaataaagttgctctacgagacacatgcattctaaaaaatagaaaatgttgatattgtcatttctttgcaaatccacccaaaaataacgtggtggaactagggattttcacctctttattgttaagaaaaatatattttcaaatccattcaaatttattgtgaaatcaaatccatacccaaatctccaatattgaataaatgatgattttaactaatatttaaaaatcatagaaccaataacacatgatttttgtaaagattctaaaatcaatgattgattaacacatgatttacttgaattttcaaattcattataatatatgggccaataaacccccttcaattatctaatggcaactttattctaataggaatatttgcacctaatgacacttaaagaacattagttatcaatgtaaacactttttgatttttaaagtgtatatttttaaagttacatttatttatgtatattatttaatgataattaaaattgaggtcaactcatcctaacttaatcaaattaaatgtaatctttatatttttaaattgtttaatattttcctacacattaatatattatttaaaatatatcaatactacctttttttgtctaaaatatcaatattacctctctttagtatattactaagataattgttttctgaattgaattcaaatttattgcatttgactgaataaaaagttctgtaccttttctttgatgaaacatcttaaaattcttaaagtcaaatttcaaaggctttgaactcaaatacattattacttattagcaatgatttggtaggttcatcatgtccattaaaacttaattaataatcttttctcttaaattacataactatttaatacgaaatttcctatttggaatatgcatttctcttaataatgtgacatatgtggttcttatcaataaaaaccaaggagtctttaattcaaaacacacataaactctattagtcaaaagttattatggagttatcccttataaatatgatattatatataaacacggaatttcttacatgtgtaggaaaagtagataagagatttaaagtaacttgattttaaaagaccctatattttcagaatcaggtcgtcttaatgtcaaatagtgtaatttgacccaaataaaaataaatcatgaagcacattgaagtttcgaaaaagatgatgtaaaatttggaaaattaagataatctgaacctagtttatacacatcaaaaaaatctgaacctagtttattaacttaccccccatttcacaaaattaaaaggaataatatttgaggaaaattaattttatttatcatatatatatatatatgataccacaaatacaaatataaatgaatacatacctcctccgcctttgtactgatcgagcataaaaggttatgatctcttcttcttcatttttgttaataagatggtaagatacaatattttacgagagatataactttcttcagtggagagagctcctcttatccgaggaatcaaagctgcaaaggaatccaacaaaggagaagataaaccgttaaagtgtctaagtcaacgtaagtgtttatatatatatatatgattttttttgtagtgttatatattgaacgtgtaaggaggttatatagacattaacgtatagatctagatctacgacactgtcttcgctgattacagtttatacaagaggtttgacgtaatcggtctatagaccatgtctaaactaatttcagtttctgttttattttttgtcggaggtttagcgaattggccaaggagatggaatacggagctccgggaatgaaggctggtcgccgggttctaactccacttttcgttctagttttccttcttcaaggtgttcattctcaaacatcacggtatgtgctcttaacttctatgtattttcactgaatcgagctttacaaaatatgtgtaaaagattgttgaaacttaaaagaaataaaatctttttttttttcctcgcaatatttgtgtttattgaattggtcctatgccacgatcctgtacgtattattttaaaattttaaattttaaaatgtaaatgttaaacatattagatttatttccagtttgtatctatcacacagatgaatatctacacataggtcaattcaagtgaacatttttttttttttctctctctcttaatttgtaattcttcttattacagaaacaaattcaacatcgcaaaagcgggacataaacttgcatctcccccggttacgcttaagaaagttggtgataaccaagtacggttcaaatgtctatacgtataacgttatattcttttatatattaaaatattccggtccaagaatattgttaacttatatatgagatatgcatgcttgtgttgttgttgttaatttaaggtggtcgttgataacggtatcatcgatgttaccttctcgagtccacaaggattaataactagaatcaagtacaatggcttaaacaatgtgttgaacgaccaaattgaaaatcgggggtacagtacttataccttaacttatatagcatgtgatgagaaaagtatcataaacatgagtttcgtcatataaaattatcattatacataggtactgggacgtagtatggtacaaaccaggacaagtatcgtcaactgattagtgagttttcaaatctctctttgtatcttttcgttcatatatatatatatatatatatatatatttcataatcatacctactaaatatttatttttatttttttatattaattttatgttctaacagtttagtaggaacaaaattcgatattgtaaatcaaacaagtgaacaaattgaaatttcattttcgagaacgttctctcaacggggctcaggaatcccattaaacgtagacaaacggtacgtcaatttgccgaaaaaaaagagtagtcactacttattttcttttcttttttattggagaagttaaatcatatagattatcatataatcgagaatgtttctttaaagatatattattcgaagaggtgtatccggaatatacatgtacgctgtattggagaggttaataggttggcctgacgtggacatggaccaaatcagaatcgtcttcaagcttaacacaacaaagtaattattgtgtgtttatcatatttttaactattgttattataattgagaaaataaaatttttattttgtttgcagattcgatttcatggctgtttccgataatcggcaaaaaataatgccttttgatacagatcgagacattaccaaaggtcgtgccagtccattggcttacaaagaagctgttcatttgataaatccacaaaatcatatgcttaaagggcaggtattacatataattttattcatatacgataaaatattgatccaccactgaaaaacattcgtatacgaatcatatgagttttgttttacaccggttatacttcatatgaaaccggactaccaaaaaaagacactcaaaatttcatcataattgttggaaaaataaaataaaaaaattcatcataattatcaaagtcaaatcaaaatcactcgactgtggattcctctttaagcccatttaggggtccatttaagaaaagttctatttctggaaaaaaaaagtaataataccgttgaagttaaaaagggtaaaaaataatttactgacgcaggtagacgataagtacatgtactcggtggaaaacaaagacaacaaagtacacggttggatatcgtcggaccaacgtatcggtttctggatgatcacgcccagcgacgagttccatgcatgtgggccgatcaaacaagatctcacttctcatgtgggccccaccactctttcggtgagtacatacattctttttcaaaaaaaaaaaaaaaaaaaccaatttctagttttaattgtaaaatgttactaaaaatttaaaataacagaaatgtgatatatggtttggatgattgtgggtgtggcatgattgattcgatgtactattgattttattgagtctacattgtgtatttctgtttatctcttattcaattctaagaatattgtgtgttttagatgtttacaagtgtacattacgcgggaaaagatatgaacacaaattataaaagcaaggaaccgtggaagaaggtgtttggtcctgtctttgtttatctcaattctgcttcttctcgtaatcttctctggaccgatgctaaacgacaggtcttttacctatcaatgaccccattctttcattcgctttaatatcatcatcattattgtttacgtaaaactaaaatgttttagaaactatatatatatatgtagatggtttccgaggtccaaagctggccttatgatttcgtgaaatctgtagattaccctcttcatcaccaaagaggaacagtcaagggtcaattatttgtcatagacaggtaaataaatctatcattttcttagaaaggtttacttacaattacatgcaattgtatatcgtcaaaataatgtttttcaatccatatgtgagttattacaaaatgttgcagatacatcaaaaacgtgacgtacttattcgggcaatttgcttttgtgggattagcattacctggtgaagctggttcttggcaaaccgaaaacaaggtagtacactactactatatttgaaatttgtaaatatataccattacattgccatgacaggtacatgcaaaagagagtgatttttgtcatgagatttgtaaaacaaatttactgttactttcatgctacacaatatatatcgtccgtttaggtgatcgaaagtactcatttgctccgatttaaagattgatctatgaattgactatgcggatgaagtaacgatcttttttgccaaatggactaaactaacggcttttaataatcttttacaataaaatctggacaaagggatatcaattttggacacgagcagacaaaatgggaatgttcacaatagcgaatgtgagaccagggacgtatagtctctacgcatgggtttctggatttatcggtgactataaatatgtgcgtgacattaccatcacaccaggtacgtttcttttatttatatcacatcttttagtataaacattacacaacatgaaatgtgtgttccgtgtcccgttgatccaactacagacgcattaatggccattatttggtccatatgtttttatgtaagggttataattgttatgtgccacagctgaagatgtaataaggcccattactaggcctaagtatcgtggtgcatataattatgtatgtgtttggtttggccgataggtagggagatagacgttggacacatagtgtacgtgccaccgagaaacggcccaacactgtgggagatcggacaaccggaccgaaccgcggcagaattctatatcccagatccggacccaacccttttcaccaaactttatctaaattactcaaatcctcaagataggtaacatattaagcatctaattaaatattatttacaatatacttttattttaatatactaaatggtgttttatttaatttatgtaataatacagatttagacagtatggtctatgggatcgttacagtgttttgtatcctcgaaacgatcttgtttttactgctggagtgagtgactataaaaaagactggttctatgcccatgtcaacaggtaataatttttatttttatttttttgatgattcaaagtgttgttgtataaatcactgatctctctcgatacaaaaactatatattttataatatataggaaagctggaaatgggacatataaagcaacgacatggcaaattaagtttaatttgaaagcagtgattcaaactagaatatacacacttcgaatagctttggctgcagcctcaacaattgatctactggtttgggtcaacgaagttgattccaaacctctattcataactgggctaatcggtcgggataacgcgatcgcgaggcatgggattcatgggttgtacaaattgtacaatatcgatgttcatggaaagttacttagggttggtaataatactatttttcttactcatggtcggaactctgattctttttcaggtgtaatgtatgattatcttcgtttggaaggtccttccggagtttgataaactaaatacatatattaatgtgtaagtaataggagggattatatattttaattagtagtcaaaagtctaaaatatatatagaaaaaaattgtttgacaattaaatttgttacttatttggcctattttagtttttcttttgttattaatgtaaaactaatcattcgataagttcatcaagttcttcatactttagagtatttttaattaaaaacaaaaaagtggccaaaactgatttataaagcatatagttatatcaaatagtacaataatcacgatgcatgatatatttgttagtatatgaacattataagtaatatgtttatgttaaatatgttaagaaaaaatacatatatgtaagtcaacttctgattggtatgagagacctaaagtcaaaacgatatttctcaaacgaaacgtcagcgtttagccccatttatgttctcactcttttctatataaaaagaaaggtactctagctcgcttaattgttcgaaacaaagggagtgagagatggagagattatcaggagagaaagagcagagcgtagaggcgtttggatgggccgcgagagactcctcaggccatctctctccctttgtcttttctagaaggtaacggtgactgagtgatgatgaggatggtgttacatgatggatcgatgattattatagccattatgatgatcacgatatgtgcaatgtgcaggaaaacaggagaagaggaagtgagagtgaaggtgttatattgtggaatatgtcatagtgatctccattgtctcaagaacgaatggcattcctctatttaccctttggttcctgggtacgcaaattctttttctttcaataacattaactttcataaattttcagttatgttcaaaataattatatgatcattgtgtcgcttacattatagtactcccagtaatttttgtttctatttgatgtttaagattatatctacaagtttgaccactctagaattcacatggcaattataaacaatgtagattttgatcccgaaaaactcgagtcaagaaaatcgaacttttgcttatggttatttaaatacccaaggattaggtatatattggtgaaatgaagttaacatatgtttcatgaaatattaaaaacaaggagttgtttggtaaaatgcttaattattagagatcaaaatataactgagtggaagtaaatgtggcaaattcttgtttgtccactgtttatagtggagcacttacttagttcttttctttcggctaaattaaatatacagttgaataaaaacacatttaggcagatttattactctcaaataagttctgcaaaaaaatgagagcactcaccgttcattattaccatcattacttaaagttgactattgttagtttccactctctttttttttttttttttttttttttttttttttctgttttgacaaatgatttctcatatagtgacttgtcttttttggttaaaataatataactttattatattataggtaaatccacgaacacacagatcaatataagtgcaacacaaactaaatacatggggcactctttttatattgtttcaagttcaaatgtataaaagttttaaaatattttttaatataaataagataagataaacattaattattacttttattttgttattaatgctagttacattgccagattaatgttagaaatactatattaacgtatggttacgttgtttagtacagtcacgagattattggagaagtgagtgaaatagggaacaaagtaagtaaattcaatcttggagacaaagtcggtgtgggatgcatcgtagattcctgcagaacttgcgagagttgccgagaagatcaagaaaactactgcacaaaagcaatcgcaacctataacggagttcaccacgatggaacgattaactacggtggatactccgaccatatcgtcgtcgatgaacgttacgctgtcaaaattccacacacattgcctctagtttcggccgcacctttgctttgtgcaggtaattcaaatcaaatatggctatatatttaaaaccaaaaaaaaagtgtggtagttgttaagattatcgatatttacaaattacaaacatgaaaaaaaaaaaaaaaaaagaagaaattatctacgtttctatcaatttttacttttcatctgatgatcatgaatatgatttcaattaatataccgtttgtaacgtaacatataggcatctcgatgtacagtcctatgaagtacttcggattgaccggaccggataaacatgtcggaatcgtggggctaggtggtcttggacacattggtgtgagatttgctaaagcatttgggacaaaagtcacggtggttagttcgaccactgggaaatctaaggatgctcttgacactcttggagctgatggattcttggttagtactgatgaagaccaaatgaaggtacgtaatcttaaaccattcattaattatgcgaataaaacgtaaaaaacgttatcaggtttcaactttatttaggctgcaatgggaactatggatggcataattgatacagtttctgcatcgcattcgatttcacctttgattggactactcaaatccaacggtaaacttgttctactcggtgcaacggagaagccatttgatatatctgcattttccttaatattgggtatgcatatataaccctacgtaatagaacgttatattagtctttcacatctagactatgtatcgagtatgatgaaaccatgatgcgacaggacgaaaatcgatagcgggaagtggtattggaggaatgcaagagacacaagagatgattgactttgcggcagagcatggcataaaagcagaaattgagatcatatccatggattatgtgaacaccgccatggatagacttgccaaaggggatgttagatatcgatttgtcattgacatttctaatacattggctgctactcgatcttaattaaagtcgatgttctatatgtattcaaaataatctggatttcaatcccacaaaacttaaggatatatatatatatatatatatagtctattttatataaatggagtatagtcaaataaatatgcattatcaacgatatatagtcttctattacatagatacgtgggagttcacccaacgtagatacgttcggttgaaacaagtcaatttcatcaatgcctcttccaaaaaaaaaacaaattgcattattgatgaacacatgcatcattatcaaataggttggttaaaatgaccaagatgactaaagccaatcacactactaccagatcgagtaaccattagggaccattaattcacgtggacgtagtgaatatggtccttgtgaattaatgagtacgtaattgtcctcattcatatatggatcggttccacaaacatttcctgtataaaattctacatctttcctctcattattatctctacacttctcatctctcaatcccattcgcttattatttatccatatgggaaaggttcttgagaaggaggcgtttggattggctgcgaaagacgaatcgggaattctttcgcctttcagtttctctagaaggtttcaatttgttttcttaacgaatatttttgtttcctatatgatattccgataagtaagctgtttttgttctaatgaaattaagttttggtgtgtatatagggcgacgggtgaaaaggatgtgaggttcaaagtcttgttctgtggaatttgccacactgatctgagtatggccaaaaacgaatgggggttaactacttatcctcttgtccctgggtaacacaaattttctttactcaacaaataacattatttcatattaaaataaactataaatgctagcaaacgtgattgttactatttcaaataatatcaacctatatctaagattttcttgcatattttaccggatgagacatgttaattcataccattgttattgtaaaatcaaacaatggattgcacaaaaaaaaaaaaaaaaggctctaatgatgacatttaatcggaattaaattgtttcaggcatgagattgtgggcgtggtgactgaagttggagccaaagtgaaaaaattcaacgctggagacaaagtcggagttggctatatggccggctcgtgcaggtcatgtgacagctgcaatgatggcgacgagaactactgtccaaagatgatcttaacgtccggagccaaaaactttgacgataccatgacccatggtggatactccgaccacatggtgtgtgctgaggatttcatcatccgtattcctgacaatctcccattagacggtgccgcaccactactctgcgccggggtcacggtctactcccccatgaagtatcacgggctcgacaagcccggtatgcacatcggtgtggtgggactaggcggtttgggccatgtagcagtgaaatttgctaaggctatgggtactaaagttacggttattagtacttcggagcgtaagagagacgaggccgttactcggcttggtgcggatgccttcttggtgagccgtgacccgaaacaaatgaaggatgcaatggggactatggatggtatcattgataccgtatctgcgacccatccacttcttccgctgcttggtttgcttaaaaataagggaaaacttgttatggttggtgcaccagcagaaccgctcgagcttcctgtttttcctctcatctttggtatgaacctatttgtcagtcatctttaaacattatcaacaatatagccaccaaatttgcggttatagtaacaaatccgtatacttttccattgataattaaatctagtgattattttgtcacaaatctaatcatatttgaagagtaaagccactaaacgttgagaatatggtcttcttctttttgtgtgtgtgtggttgtatacataaagggcggaagatggtggtgggtagtatggtaggaggtataaaggagacgcaagagatggtggatttggctggaaaacacaacatcacggcggatattgagctcatctctgcggattatgtcaacaccgccatggaacggcttgcaaaggctgacgttaagtaccgatttgtgattgatgttgccaacacgatgaagccaactccttaactagaaagcttaagaattgaatatccccaaagcttttttcatgtttttgcttgtttgtttgatgttgtttgctggcgactttgtgtgtagtattaccacactgcatgtactttatcagttgaataaacttgaatattgtatttaataagctatctacattagattttggggaagtttgattaaaatttattccgattgaagattttagttggcgatattgtaagattacaaacatattaaggttgaaatgtgatgggttcgaatgatagaaacagttttgtttgaccgacacgagaaagtaatgagaacacactgatttaaattgatgactagaaactaccaagatatttattggtcagatttcgtaggactaatcaaatcaaaaactacttcttttgagacaaagtgcatgtatcttagaaaattttcaatgattccgatctttaattagcaatgtaaacacatttttactatggaatatgttacgtggacggaactgaattgagtttccgaatggaaaaatatggaccacgtgaacagatacatatatggttgagttgagcaaagttcaaaatggtccgtacacactgactaattgtcagtattctaacaacgttaatttcgtggtgcacgaaaacaaaatgacgatgtggttgcacaaggtccacgttcttgtatattgttttttaatgtgctaattgtgcgctaaaataaatttaattgtataaaattagtatagtttatatttttttaatatgtatatgttcattcaaaacatttggataatatatgtttactatgtgatagactgatggtggaacattttatccatcttatatgcatatgaataaaaattattcaaaatgtttgttgttgttcagattattaattattaaagaattagaaaattttggaattacaggtatatatgtatgtgttgtatattgtatatttaaattattatgtatatttatatttaaatttttctattttcataaatcgttagtatataattgtgtcacatctaatattattagaagacaagttggacttttcataataaaataaaacatatcttttatcaaattaaccttttcctttaggtgcccaaatccgtagcaccatcaaatacctaagatatactttttatttccaaaaatcctttcgtttgatctaatattaataatataaacgatcaaacaaaacgatttttagaaatcaaacgttcaagtttgatcgttggtcgtcgctaatttaagtttgatcgactgctcatgttccgtgacaatgttaaaactgaatacatgaaacatgttttttttttgtgcatttgattttaataattttttaaaaactgataacacccgaaaaaaacagcaagaaactaaacaaggaagaaaagaacggtcggtgaggaactctcgtgaaagtcttcaaaagacttttaacggaaaaacaaaaaacaaaaaacaaaaactcttgtgaacgtaagtgcatggaccgaattgcacccgatcacgtcggttccacaatcctctcctatattaaggccttcactgctccttatcatctcaaacttctcatttattaataagtgtcattcaaaagaataaaatcaaatacttacttttgaatccgtttttttcattgtttgatcgattatgggaaaggttcttcagaaagaggcgttcggattagccgcgaaagacaattccggagttctctcgcctttcagtttcactagaaggtttcacaattgtttttataatctctatcgatttcgtttgaatgaattgaacctaagttttggtgggattaatgtgtagggaaacaggagaaaaggatgtgaggttcaaagtgttattttgtggaatttgtcactctgatttgcatatggtcaagaacgagtggggaatgtctacttatcctcttgtcccagggtaagacatgcatgtgtcctactgtcttttttataaatttctaccccaaaaaaaaaagttctacgataagtttcgtttgattaatcccaagggaatgatttttctcctctaatgctgatattaaatccgaatgtttattcaggcatgagatcgtgggcgtggtgactgaagtcggagccaaagtgactaaattcaaaaccggagaaaaagtcggagttgggtgtttggtcagctcgtgcgggtcatgtgacagctgcaccgaaggtatggaaaactattgtccaaaatcaatccaaacgtacggattcccgtactacgacaacaccataacatacggtggttactccgaccacatggtttgcgaggaaggtttcgtcatccgtattccagacaatctccccttggacgccgccgcaccgctcctctgtgccggtatcacggtctattcccctatgaagtatcacgggctcgacaaacccggtatgcacatcggtgtggtaggattaggcggtttaggtcatgtaggagtgaaatttgccaaggctatgggtactaaggttacggttattagtacttcggagaaaaagagagatgaggcgattaatcggcttggtgcggatgctttcttggtgagccgtgacccaaaacagattaaggatgcaatgggtactatggatggtataattgataccgtctctgcgactcattcacttcttccgttgctcggtttgctgaagcataagggaaaacttgttatggttggtgcacccgagaagccactcgagctacctgtcatgcctctcatctttggtaagctatatttgtagtaacaaatccgtatatatatgacttgtgctaaatttgcaatgtttagtcaataacgtgtgaaaataacattgaaattgtgtgtgattgtgttattgtgtctatatagagaggaagatggtaatgggaagtatgataggagggataaaagagacccaggaaatgatagatatggccgggaaacacaacatcactgcggatattgagcttatctctgccgattatgtcaacaccgccatggaacggctagagaaagccgacgttaggtaccgctttgtgattgatgttgccaacacattgaagcctaatcctaatttataagttttaagcattaaacttcctcaaatgttattttcttgtttggtttgtcgtactaattaagttttgtgttgttgtataactatataatttggtatgcttaatccaataaatgaatagtatgatatatatgataagattttgggggtaagccaagagttatatattagtatctaaggtttggataaagaacagtactgttaaataccaaaaatgtaaagatgatgaaagaataaaaatcattttacagtgtgaaaaaaatcagtttatcattaggtgagttatcaacctgaaattagattaccatgttctcgatcgtgtgataaatatctatcttcatattggatgatggagcgatagaagtgaaaagtcaaagaggataataaatgaaccgtatacgacgacttgtgttgtgttgcttccaacaagagaggggacagtgaagttcgagtttgttcccaatgcgaaagcactccattccttgatatggcttctctttctttacctcgtaccttttaccacacttctctctctctctctctctctctctctctcttccctaggtcgatcttatcttgtcttgtctgaatatttcataatataatgatacaagagattttgcttgtaacatacgaatgcgtatattatttgaaaattcaaacttaggaacatgttactgaagggaagctttgctcgactatatatgtaaatgttttcttatatatatttcaaaatcatatatatatatatatatatattaatgtaaattttttagtactttgtaatttagatagttaaatgaacttggaaaactctattagactatacacttggtaattagacacatttggtttgaaaatatttattaaaatatgcatatactaaacaacaaagcatgcatatgtacatatgtatatacacttttatatacgtcattgtgttcatatatatacattcgaagattcacggaaatcacaagaactaatctcttctctcttgtcccatattgcaccatctccttcagaaaaaaataaaaagagtttataactcatgatgacgtcatcccatcagagcaacaccaccggctttaaaccgcggcggatcaagacgacggcgaagccaccacgtcagatcaataacaaagaaccatctccggcgacgcagccggtgctcaagtgtccgagatgtgattcagtcaacaccaaattctgctactacaacaactacagcttgtctcagccacgtcactactgcaagaactgtcgtcgttactggacacgtggcggcgccctccgtaacgttcccatcggtggctccactcgaaacaagaacaagccttgcagcctccaagtcatctcttctcctcctttgttctcgaacgggacgtcatcggcgtctcgtgagcttgtaagaaaccatccatcgacggcaatgatgatgatgagttctggtggattctccggctatatgtttccgttggatcctaacttcaaccttgcctcgtcttctatcgagtctttgagttcttttaaccaagatttgcaccagaagcttcagcaacaaagactcgtcacttccatgtttctccaagattctcttccggttaacgagaaaacggttatgtttcagaacgtagagttgattcctccttcgacggtgacgacggattgggttttcgataggttcgccactggaggaggtgcaacaagtggcaatcatgaagataatgatgatggggagggtaatttgggaaattggttccataatgctaataataatgctctgctctaattatcaattatcatttactctctatttctctaaatattgtagctagcatgcagaagctatggctgataaaactagtaataatttcccctttgtaatttttagcataataaatttgcttaatttccaagagaaaaaattaacttattaaatttactcattcctaattataaatcgctgaatcaagaatttctgtgataataatcatgtaccaatgtaactgcatagacattataatattatacacgtataataaggtgaagaagcaagaggaacgtgaagtagaagaggacaagttcagctttaggcagagacatgtgagaaactcatgaactctcttatgtatgtgagacattcccatacatgatgaattgatgatcatgtcatagatacatcatacatccatcatcattggtctaaagtcataaacttctctatataacttgatcctggaaccttcgagataccttttaccttcatcaacctcctgattctcgcaacatcatcccatcttctattagcagcaaaaatattagacagcaacacataaacaccactatcttcaaactcaatatctaaaaaactatctaatatctctttaggaagctccattaatgtccctctattcttacaagcactaagaatagctccacatatacgtacatccggtttaaccggcattgctttgacgagttccaatgcttcatctaacaatccagctctacaaagcaaatcaatcatgcatccataatgttctagcttaggaaatagattgtattctctgcttttcattttatggaaatatcttctcccttcatcgactaaacctgtgtggcaacaagcatttagagccgcgagaaaagttaccaggttcggcttaaaacctagcttaaccatttcttcaaagtatctaagggattcaagtccatgcccatggatagctaaaccacctaacagagcattccaagtaaacacattcttacttctaattccgttgaaaatctccaaagctgtttcgatgtagccacattttgcatacatatcaacaatggcagttccaatatgcgtatcccatttgattccagcggttaaaatatactcatgaacccatcttccgtgatccacagctcctaagctagcacacgcagagagaacacttgtaagtatatgcccatctggctttataccagaagacgtttgcatcagagaaaacaagtcaatcgcctccttagatctttcacagtgaaccaacccactaatcatactattccaagaaactttatctttcttttccaactcaccaaaaactctcatcgcatcagacaattgctcacatttcacatacatatctataagagcattaccagtctctaagctgatcaaagatgccctttttaagatcaacccatggattcctttccctaaacttaaacaccctacccgcccacttgagaccaatacacaaacatacgtagccaaattaggctcaacatccatctttgaaaacgtatccaaagcttccttatacaacccagtcctcgtgaaaccagttataatcccagtccacgaaacaacatctctcacaggcatttcaccgaacactttacatgcattccttgattctccacacacaccataaaaatgaacaagcgagttttgcacatagatatcatcgtaaaaacccatcttcgtaacaattccatgaatctgtttcccttctctgatccctgaaaacttcccacaagccttaaaaactggaggaaacgtgaacatgtccggtgaaaacccattactcacaaatgttttgtaagcaaaaatcgtcactcttggtttatcacaaactgcatagcttgataaaagcgtgttgtatgagaaagagctcaacacagaacggatactgtggagaattacagagctgtaagatgcaaaatctgcggatttgcccagaaaggtcacgactttgttgatgattaagtcatcacgaagaagatcacgagtaatcaattgagtctgtatctgtttgaaaacgcgaagagagctgcatcggctgatcaattccagaagaactgatttctccggcaaatacatctagtcgcaaatagtgatcaaacaatcacatgggggttctatgttaatctgcatttgtagaacgagttcgattcacagaaagaaccaaatttgcagattcatagacggagaagaagcggaagactgaaacagagagctaacctgaggatgacgaagagggtttaccgttaaaaccacttattgggcctattattgggcctatctttttaacagattgggcttttctataaaattcttagacctctctagactctaggcttcaccggagaaagaagagaaatcaatcggattagttgcagaagtgcaatgcattgcggatgtgtattcgcttcacaaactgtgtcatcacttctcccatttgaaattaaaacctatgcgtcaaagcttcgagcttcgtcagcccaattaccgagaacccagattcagataaacccttcagatgatctctctatctacggttcagataaatctccggcgaatagagtttcgttgccgtctcatgtaaattctatcaccagtactacaaacccttttgtcaaacactgcttgaagctccgccaaagttcctcgtatcgccacgctcatggctctgttcttgtcgtcggaactatccccatcaggtatgtatcagtgatcttgtactctttattttttttcattgctactgagagaattgtggaaagtagtttccttttttactgtgttcgattgatttcatgtgaaattgagtttcaaggagataactttaaaggcgttgttcacagggaagtatgtatgtttcaaacgaataagcaaggaatgaccactgaaattgagtgcctacttcttcatgaggaagctaagattccacaaggattagagagtctaagtatccgaattgttagagtaagttctttagtgatgaagaaactctctggagtgcaatctactgaatctgttgaagccattgccttgatgagaatccctagcagctttactgatcttaaagatgataaagacatcataacagactgcaacaaatggttcccttctgctcacagagttcttgttctggacagcatacaggtttaaccgtaacttcttatccttatgagcttttgctggattgttttagagaacaaaatcttgacgcttagtttagtgatcatgtcttgatcagggaagggaatttggattggtaatagttgtctttcgatgttgttgcaggatccagggaaccttggcacattagtcagatcagctatggcttttaattgggtatatatgatcagcttttcttctcaattcgttggaaatggcatctgatagaaatctctagtgagatgattatcactatctggctaatgtttttgtcaggatggtgcatttctacttccgggttgttgcgatccgtacaacgacaaagctcttcgagcaagccgaggtgcttcgtttcagctacctatagtttccgggaattggaaccatcttaagcttctagaaaatgagttccagatgaagctattagctggtcatccagcaacgactactcagaaactgaaacctgtctccaaactttcggtagagtttgctcaatctttagcagagaagcctttatgcttgattttaggtagtgaagggaatggtttgtctgagcaggcacggaaagtatgcgtgctagtgagcattcccatggcaggtgactttgaatctcttaacgtctctgttgctggtggtattttcttgtacatgcttcaaaatcttgtttaggttgtaaaaccaaaatataaacttgaaaacagttatggatcttataatgctacaaatcatattcaaaatccaaatcaattttataaataaatccatcaaaagtcagtaaatctcaaaacccctttttgatctacacaatttcctaacaacagtgttaaaaaaaaataaaaaaaatcctaactatactgtatgattctaagctctagaaggctcttctagacgaatgtaatcatacataagaccttcaaatggtccttgtgctttaggctgtcgaagataaatcgtgttggtcccggttcttagcaaccttccaggcacatcgatggtataaagccggtacattccatggattccatgtcttgctatagcattgtcttttccgatagtacccgttgagaaaaacggccacgagttttggttattgatccgaacttgtagattagcccatgcagccgaggctaaagctacctgcaatgtgtagctgcctcgcgagtttacgtatggaagatgaaacacgatctgccatattgttggtacgtacgttaaatcaccggttttcctgcagaagaagcgaatcgaagttaatgttaattcaagaattcactgaaagtttcaaactttttgttttcatgtaacttctaaccttgtgacttgggcgtagaaccagtcttggctatagttactaactccaactgtgtagacgagatcatgagttggatataactctgtgtatcgttgccacagtccgtactgtctaaacctgtgaaacaaaccaaaccaaatcggaatcatcagaaccaaaaccggtttcggaacaatgtgaactggaactatgaggatttgaagacttacttgtcggtgtggtttaggtataacggattcattgtatccttgtatggctccggtataaagtattctcgagcggttcgatccggtacaccaatctcccataacgttggaccgttcctaggtggcttgtacacgactctaccgagactaatcactgaacctgcagctacgttaacaaggttttggtatcgaaagtccccgataaaaccaggaacccatccatacagattgtaagttcccggtctaacgttttctatcgtgaagtaaccggtttcgttcgtcttggtccaaaactgatatccctggacgcaaaaaaagaaaaaaatcaacgatcgatacatgttattgataattcagttacattgaagaagatggatcaaagtgtaaatgtgtaataataataaaccttagtatttgtctgccacgaaccagcttctcccggcggtgctaaaccgacatatgcagattttcccggcgtcaagaatctgaaaaatatttgccgatgttgtaataaaaggtcaaaattaacttttgattaaataactacgagtaaaataaatatatacctgtcgttgactagtagacgaccagtgacgcttcctctttctcgacgagaaagatagtcagaggatgctacaaaatcgtacggccaggctttgacttctttttcggactgaaaattgatataactaaaattaatgacttatctttgtaaattactttaaattaataaagtaaaagacaattaaaaaaataacctgttgtttagcatcttcccataacaaatcttgaggcttattgttgctggtagaatcagagtttaagtaaataaaaacaggtcccaagacctttttccacgcttcaccaggtctgtaatgtgcctccatgtccgcaccaacataatgtccgcttataaaagtctgcatatgcaaatcagttaagtaacgaaaacattaatactactatatatagtaccaaaaatgtaatctatgcttaatagctttggacgatgtctttaccgtgatggccgtgggtccgacgtgagacgtgagctcttgtttgatcggtccaccggagcgatattcaccgcttggtgagatgatccaaaagccgacacgggacttggttgagatccaaccgtgcactttgttgtctttgatctcacatgtgtactggtacttatcatccacctaatatatatcattcaaattaacgatcaaaattcgagacttcggatgcaagaacaattaaatattgcatccaaaaccgtatgcaaaagactaggtacctggtttttgaacatggagttatgaggatgagtcaattgtacagcctctttataaccaagagccttggcatgaccacgtttgatgtcacggtcatcttccgttggcatttctctttgtcgattatccgccaccgccatgtaatgaaatctacaaacatattttgtgatagtttagataaactcttttttttttttttataaaaacaaataattaacaaaacattggaatcgtataagatacctctcagggttgagtttgaaagcgattcgaattaaacccatgtcgagttctggccattcgggaagtctctcgaagattccgtacatgtagattcctgaagtatttctacgtatgatatacctcttgtctacgtttaatggaatatgaccatcctcccatgttctagagaacgatatctccacttgttcttgggtttgagtgatgattctaaaatttgttccttcgattctgaaccgaaaaataaatatgagtttataaattagaaaagattcattaaaattataaaccctaagataagttagatacttgctctataaatgtgaacgtgtgtatgttttattaaataatttaaactgacaaatcagacgaagtattaagtaactaacctagtttaattaccgatctaagccgccttggcgaatgtttgttccttgccatgttatgtcccagtacctacataaaatcaaagtaataaatcaggacaattttatgtacttacattacataagctttttgagaaataataattgattactacaatattagtttactgaaaattactcaccctctatctcggagatgtggatgaagaacattatcaattcctttgtatttgatcccagttataagtccttgaggattcgagaaactgactctgattatcccattgtccactatcacctgaaaattattagttttatatgtacgttagaatgtataatcatccgattattgattaaaaaatactattgaattatcattaaccctatatacctctctagtcccatgatgtctgcttcttatctgctgcactgttggagctcttgcacttattccatctaagttcctgtacaattttaataattacgcataaataaagccaatgcattgaatactgaaaacgcacacttataattaaattaattgtaaggcaaagagagggagttgaagtttgtttctaaaaaacaagatcgattgttacaagttaattaatacacacgttatgatcctaaaaacaaacttcttaattttatatgcatcaagaagttttttttcccttgttgataatcaaaaattttatgtcaaaatctagaattacttcaaactcatacgagagtcatcacaattgctagctaaaaacaccaatgaaatatgtatgagaatcgagaaacatgtgaattttgtgcacatacaacgtatatgtggatatgtgtttcatcgcaacttgtgaagaaaaaaagaaaaaaaaaactgaccttgtcggcttggaaaaggagagtggaagaagaagcaacagaaggaaacaaataaataacgaagcgatcttcttctgcgataccatcttttcttccagaaactcgagatttgaaataattaatgtttaagaataagatctttgcttctatgcatatattttatatgcgtgtgtgttgttaaacaaagtccaagactaaacgggaatagtaggtgcaccaaaacctaactaggagttactttgacttgtgaatgctgacattattagaacattagacttctaatatgacttagattcatagaagataatacgtaaaagatttagtttctggtatttttccatttttttttttgtgtatttccttttttttgtttaatagaagtaataaagaatacggaggataataatgacaatattcctgatgagaaagttgataattttctaaaagtttcacaaatcttgagcatgtatatattgtgaagtgttgtgttcattgtaacgtcggattgattgcatgaattaaatgaatatgacaaactatttgagaatgtaaataatgttttcttgtcctacgtatgacattatatcatctatacatgaatgacgtccatggcggttatatttgaataattgaaaaatacatgattttgcttcaaaaatagattgacctaagtccatgattttgctttaattaagagttaagacaaacaaaaactacaatctaaataaataatgataaaaaataataatataaaaatatttttagtaaattaatcaaaaaaaaaagagagcatgtgagctcacacataagacagcaaaaagagctaaatgcagagagcttcagatccgaccaaacaatgacgatcgttaaaccgtcgcagttctcattctccggcggcggatcttcgccgttatgttcactcaaaagctcactcctcaccgtcgctattctcactttcatttccctcttctacctctctctcaattccttacgcacttcgccgccgtctcctgtcatcgtggtaacaccgattcatgttcctcataccttcgtgaatgagtataagactgataacgaaacaccgacgatggaagaagaaacctactccgatgtttatcactcaccggaggctttccgattgaattacgccgagatggagaagagattcaaggtttatatttatcccgacggcgatccaaatacgttttatcaaacgccgaggaaagtcaccggtaaatacgctagtgaggggtacttcttccagaacattagagagagtcgatttcgaaccctagatccagatgaagcagatctcttcttcattccaatctcttgtcacaagatgcgaggcaaagtaagaatttacaagttttgattcactgagaatttgcaatttcatgaatttgatgattgaattgtgatgatctttgttgtgcagggaacatcatatgaaaatatgactgtgattgttcaaaactatgttgatggattgatagctaagtatccttattggaatagaactttaggagcagatcacttctttgttacatgtcatgatgttggtgttagagcatttgagggatctccgcttctgattaagaatactattagggttgtgtgctcacctagctacaatgttggtttcattcctcacaaagatgttgctttgcctcaagttcttcagccatttgctctccctgctggtggaaatgatgttgagaatcggtaaactaagtcctccctcttttattaggaactctggtagatcctggagttgtattgttggctcaatgttactaatactgttaaatggtggtgttacaggacgactcttggtttttgggctggtcatcgaaattctaagatacgggttatacttgctcatgtgtgggaaaacgacacagagcttgatatttcaaacaacagaattaacagagctacagggcatttggtgtatcagaagagattctaccggactaaattctgcatatgccctggtggttctcaagtaaacagcgctcgcataacggactcgatccattacggatgtattcctggtacatgttcttatactctttctgcactcgtcaaaacgatataccttcaaagaaactgaactaatgcatcttgttattttgtcggcatttgtttttggccagtcatattatcagactactacgacctccctttcaacgacatcctgaattggcgaaaatttgcggttgtactcagagagcaagatgtctataaccttaagcagatcctcaagaacatacctcactcagagtttgtttcgttgcataacaacttggtcaaggtaaagagaatttcaccatcttatccagtattgtatacaagaagctgattggttttgttgttgtgcaggtgcagaagcattttcaatggaactcacctccagtcaaattcgacgcatttcacatgatcatgtatgaactatggttacgccaccatgtcgtcaagtactgatccaagactttttttttttgttttttttccttcttcaaccgcgtagatacggtcccaagccaaaaaaagctagcatgtacacctcttgtaagttttaaatatcatagcttatgacagtaacacggaacatcaacatttcattctttgaggaaaattcattatttttgtgtattgtgtactctgttccatcctgtgaattagccagcttctttataaggtccccaacaaacgcaaacgcaacactggatgggtctatcactatgatattgttccagaaagatttgatattcttatcccacaaacctgcaactctttttccatgagaaccttttcttccatatattaagaacaagtggggaagctattgaaaaactgaaattggagcttaaatatctacttaacaacatctgcaaccaaaaatctgagcaaattttcttggcaatgagtaatcagctcgcatctcagggtccatctgcatgtcctcggctcttgtccacacatatactcctctctcttccttactaccaggtacagtgttgtccagtatgaaagctagtagaaaggttacaaccatattcaaagatagcactgcgttcatcgcaaaatcaagctgcagtacgcattagaagagtcagtcagtcatcattgtccaggaaaatgctaatcaaggcaagggaaggaaagtggcttacttgctcgatacccgtttggaatggtccgcttgaagcggctccaaagggaatataatagctcggtagtattagactggatagcggctggtattgctggaagtaagcagggatggataatccaagaaacaatgagactccaactatggttatgttcctaaagcttgctgtttgcgtataccgtagattcgatagacctagagacactgtcagtgcccatataaagcataatactgaagcagccaaagcctgtggtattgaagctagaattgcacctaattttcctgtcaaatttaaagaagtttcttgtaaaatgtatgataaagttttacactttggatcattcattggatgatgcttacctaaaaatgacaatactattaagaacatagctccgatcaccaaagctcttctgctagccaccttagtgatgttgatcgtatgaatattttcagttaaagtggttgatccggtacccgaaccccagattcctgctaataaactgcaaaagccttctaatgcaatacctctactgacaattccccgtgtcgggcgcttagcattcactatcatagatgcagaatgatatgttccaacctacaagtgcaccaagtccaacattttagccgtaagaccacacctttaggagaaaaacaggaatagcaaagaggaacaagtacataccgagtccactgatgcaaccaaagacacaaagatcataatgatagaagttctcatgtgaaaatttggaaacccccattgaaatggataagggattctgacccaagaagcagttctccaagcatttgaagcatctgttctgcaatgcttcatagtatacacatgcttcttacattcatctatcaatatgttagagctcggtatgtcagcgttgcagcctctgtagtcatatgctccaccaacagttaaaaagaatgcatatgtccatatgagcagagcactcagtggcacctggcaacatgatagcaaaagcaaacgcttgtttcctcaaaacttatagaaactttacacttcactgttacaaaggataaactacataccgcgtaaatacggaataagcgatgcccaaagagtgaaactccgcggagatactgaaaatagttagatagaaaacaatcccttatcagagagatagaaccatgcttctattattcaagctgaggtaaattcttaccaatgtgaaaatgagaagcaaaagtattaagggaacgctgatctcaacacaagtgccggcttgtggaaatccatagctaaagaatgctaatcctactgcagctacggttggggctactaccacaggattaataaatctgaaaatagaatttaagaaaacatatcattaagatgtctaatctgatattagtgacatctaggaaaccaccgtttttttgattctcgaattacctaagaaggagagacatgagaccactgaatcctaatatgcactggaataatgaaccaacaattatagccccctgtagttctctcattgtgtcccgaaatttctgtgcgaagctaaaacatcagtttattgcaaagtctccaagaactcaaaatcctccttttgatttctatatatgcaaacttacatgctcagtgaggtttctgaactcctcagagttgatgacaaccaaaaccggggccaagtaaacaaaagagcttccttgaaccaacggaagccgagtaccgaagtaacagtgaagtatagttgtaactccagtaagaagcagcattgttgaaatcactgaggctgtatctttctaccatcataaaaagtcaattactaatcaaagaagttctcacagaataatccatggaagaagaagaagaagcttacatcggaaccatccatggctggtacaatgaccagaggaataaacacaagtgaaccaacaagtgacagatagtgttgcagaccgtaatagataagtggaactgcaatttcaaattcaacaaaaagaatcttcctttatcatgtgttattgaaaagaatcttccttttatttttcaccagaataaaaacacaaaatgtaaccgttaaagaagctgagattgaaaactaaccaaagccaggattatctctaagaccaaacttcatcaaaattggtttaggccattgtccatcttctgatgattctccaccacctcctggataataaaacccattttccaaatccttattgattttcccgccttcattctcagtctccggcgttgcctcattccggtttagtctcctctcttcttcttctctagacacaggctcagatcccgttacgtgttcgatttcgggtctatttcgtcccaaaatcgggtcgatctcggttttgtgagacgacccggtgactacttgatctctaccttttggcaaatcaaaatcagagctttcaccaaacttggttcgagtactcgtgctggtttcaccagagtaatcggatacaaaaccagttttcttcgcccaagatcttaagtctctcggattcaaatcctttttaggtaaaaagggttccactctcttgaagaaagcaccaaactttctctcgccataaccattaccaccaccacttccattacccttattattaccagtatccggatcgaaacccgacccggaatccattgtttccaacaaagactcaaaatttaagaaagactagagaagcttgtgaagtgaacttgagctgtaagttcattttccagcttctttttcttcctttttttgctaactttttggctctctgaagtgagaaacagagcgtaacgttatttcactttctcactcatgtcgacatcagcggtttgtctttacctcaactaaatgactaaactatccttatgatgtatgaaaatatcttattatatacatgattaaagccaataataaagtttgctttaagactaagtattcaatattagctgcttaatgatgtatttagaacttgacggtggatgcttaactaccatatttccgagatatggacccctgagtcctttagtctccttccgacccattgatatatatgtacaacaaaaacagagttttcttttatcaaaatttgtacccttttgttactcttgaaatcataaaatagatccaaagcataatatctcttactcactactaagaatgtggacattcagaattcaaaaaatatatttctgattctccaattgaaatatatataaagggatagatatacagaggatgtttaaagaggattacaatggcaaatagtgtttctactttctacatacaataaaaggatcaatggtagttaatattacatacaatctacaatcacttacaatctcagtcttgaggaggttatgatacaggacacgatagattacaagagtatatacatcactctcctttttttgtatttacaagactttacatgaatttccaaaccaattgaagaatcccactcacaccatcaatttgatcatcttgataaaaatctttagcactgctttcgtattcctttctttccggttttaatccttttccaggatcaatgtaatttgatatccaccttcacttcttggattttgatctgttttctgaatgtaaccaatcttaaagctacttcttctccatagctttcccaaccccacaacttctttttactatttttttcttccctttttcttggacttgatccgtttccaggatcaatgtaagcaactacccatcatcttaatctaaaccataaaactacttgtgttttttttttggttccctcttttctattccctttttctcctttttttggggttttcaggataaatgtagtaaccaaaatgattcttcagagcgtattaaaactacttactactaactaactacacaaggaagagacctggtcaaagtttttgcagagatgaaagccattgctccatgtaattcttcccatctgcaaatttgataagaatgaattcagaaaagttttcactttggtttaggacaaaaactgttgaaacatcaaatagcaaagactgtggacaatttgcacatgggatcaaatgtgaaaagaaacctctaaagagagcaactttggtagttcactaaaccaaaaccacaagcattatatccaatagaccatcaatcccaagagagaaggctatggtaattcactacaccaaaccaagaccacaaattaggggtgattcataccaggaggcaaaccattggggagattcttgacagcactcaagagctggttattattattactagagccttcaacaacagctctataacaaggaaccaacactaagaagccaccatcatttccttcatcatcactttggaaatcaggtccatgtggctcagtccatccaacagaccattcaggtccatcaccagcaacaacatctacagattcagagccagacgaaccaaagctctcaagttcaagctctttcctcttatttactcgagctatctttgtaggaaacttaagagcttcagtttctttctcttttctacttcctaataaccaccatggccaacttgggatcggtctcttcatcatttcaagaaccggattgatacttttttcagaaattccaccataaaatctggtcaaagatcacagcaaccaacacacaattgaaaacccttttgcttgcaataaatcaacctctaatgactcagaagaaatcaatgaacggtttaaagaataaaaaaaaaacaaaatctaaaaaggacaaaactttcacaggaaaaagatgaaattttcttaactcttagctcaagatctaagcttcaccattgaaacacaaataatgtttcaccagaatttgaaaatgaaatcaactagaatttgaagaaattttaaaacccccaaaaaaacggtgaaaattatcaaaaggatcagagaagaggaaccctaaaaacccaaattatcgatcatctccttccattattatccctccgaccaaattcgtcgtcccttgtactcaacagctagtcgtcttcttctgcaatttataaatcgatttctccaatcttttggattaagttttgatccaacggccacaaattcacgatcggtctctccaatcattaaactaaaataattatgattgattgatggagtttctcaaatattaaaacatttttgttatataaatttaagatacgaaaagaaggagaagagttcttatttaccgttgattctttgacaagtggcttcttacaaccgtacaaaaattgatgatgatgatgtgttctattttatccaatcgttttgcgtgtgtatgaggctcaagttatgtacacgtggcgtactcatctgcctttggttcttctgactttagctcgtggagattactagggaaatcttatgatttagagataagaaagactttataatttaattatagcctatacggagataatactttcatgaatgttctagaaatagtgttggttaatttttgttttgtttagtcgttattgataatatccttctttaacaaaaagattgattttgagttgaccacacaatttgatttggcttttgcttcatcgtaataacgtgggaattagtcttatcaaactgaatctagtttaacttgtccggggaatctattatctatattatcaacttataagattcggaataaagcatgttttgttgttgttgactttgatggattgtgtgaatagtttaatacaacaaaacacaaaattaagatgtttataattcgttgacaaaaactcatatattcatatcataggatttgtgaagagatttaaattatatgtttacttggtcgttacgaatgataaaagtattgtccaacttatcggcgtgtgtggataagtattaagtattacaatcgtcgtataccttattgttatagtttttacctgttttagataataacatgattcgattttgtataaaacgttacactaaatgaacccaaaaaaaaaaccaaaaaagaacttgcaaacaaaaataggttttgttttagtaggacatattctctcaatacataacgttgacgtatgtatataagaataaaatacatgtgcacgtaaacgtaacaatccttcacaagtttattaataataacgtggaagttgcagtaacatcatcttacacacgaatttttctcaatgacgtagttactagtacccataataaaatcaatataaaaaaataaaatcaattccgatacaattcttttaggcaccatatggtaaaaaaataaaaaaaaaggggactaaatagaaatgggccaggatttgcaaaaaggcccataaagttgaacggaagttaattaacggcgttaacttcgatctccgtttgcgacatttaaaatttaaaatcttttgccctttcttctccaacggctccttacgattgtctcagttcttctctcctccagatttctcgcattctctaatcctgaagaattttaacagatcgattgatttcttaatgaaatttatggtttgaagattcagtgttcacgaatcaggtacttgatttttgtagattgatccgctgattttgagtgtttatcaattagggttttgatttctcttgtgcaggtttgagatttaatataaaatcgttctttttaggttctaagaattttgaaaagattttgtcttatttcttgctttattactttctctagatctgttgaagtatcgtgattgtttgaaaaaaaatggagaaggtttatgaagagcttgatgaagtgaaagctgtgaatgagaagcttaggattgactatagaaacaaaacggagcttcttgagaatctaaaaaaggttcagaacgaacaattaatagagattcgagaggcgagactggttaacgagaagcatggttttgagattgaggagaaatctagagaaattgccgagttgaagcgagcgaacgaggaactacaacgttgtttgagagagaaggattctgttgtcaagcgtgtgaatgatgtgaatgataagcttagagctaacggggaagataagtaccgggaatttgaagaggagaaacgaaatatgatgtctggtttggatgaagctagtgagaagaacattgatcttgagcagaaaaataatgtctatagagctgagattgaggggctcaaagggcttttagctgtagcggagacgaaaaggattgaagctgagaaaactgttaaaggtatgaaggaaatgagaggaagagatgatgtagtggttaagatggaggaggagaagagtcaagtagaagagaagctgaaatggaagaaggagcagtttaagcatcttgaggaagcatatgagaagcttaagaatctgtttaaggatagcaagaaagagtgggaggaagaaaaatcaaagcttttagatgaaatctactctcttcagaccaagctggattcagtaactagaatctcagaggatcttcagaagaagttgcagatgtgtaacggtgcgttgacacaggaagagaccagaagaaaacatcttgaaatccaagtttctgaattcaaagccaaatacgaagatgcttttgcagagtgccaagacgcaagaacacagcttgatgatttggctggtaaaagagattgggaagttgcagagttgagacagaccttgagcatgaaagatgcatattttaaggagatgaagtatgagaatggaaaactagaacaagaaaaccgcgagttgctgggttcgttgaaagaactccaggaagctacaattcagggatcaggaaactctgcactatcaaagctgaaaaacaagtttcggaacttggaaaacatacacaagaactgttcagctaatttaagaagtaaagaagctgaatggagctctcaagtggagaagatggtagaagagattaatgattataagttgcagttgcaaagcaaggaggcagccttgaaagaggttgagttggaacttgaaaattgtcgctcttctacagctaaaatgagactacagtatgaagagatctcgattatgtttttagtgctaagtagaacggtctccgaggctcagtcaaggcttgcgaatgctaaggataagcaaatcaaggatgaaaaaagagaaggaaattgctattctctattgatggagcagctagatcaaaagaatgctgcactggccaaggcgcagatggagattaaagaagagcgcgaaagcgttgcgtgtttgctgaaaagaatagaaatgctggatcttttcgaaaaccagaatattcagatgcagaaagaggtagagaggttcaaagaaatggttgaggaatcatctagattccaaactcagatgcaagaaaaaatgaaagaagctgaaaatgattatgaagagaaacttcttcaagtctgtgatgcattggacaacacaaacatagacctcgttgcagaacgcgagaaggtggtgtctttaacaaggcagattgagtcacttggtactgtcaaagagaagaatttagtgatggaaaaagaaactcaggagtataaggagatgctggaggaatcagaaaagtgtcgggtgcttttagaggagcagatttcgcagcttgaaagtgattccaacgagaatattagagagctctgtagcaaggtggacattgcatatgccaagttggcagaagaggttgagaagactgcctcattggttagaaaaagtgagtctattgatctaaacgaagagcataggcaacgggagcttgatcattacaaggaaatgcttgaggagtctaccaaaactcaacttctcttgcaagagaaagttgtagatgtggaaaacgactcgaagaggaaacttgctgacgtttctgaggctctagagatagcaaattctgaattatctgataaaacctctgaagtgttccagattgaattccaattgtgggtctggaaatctattgctaaaaggctaaaagctgaactcgagcaaaaccagaacctgcggaaaagagtagaagcttctcttcttgaacaggttggagttggagaagccattaagcaagagaagaatgagttggtgcataagctaaaggttatcagccatgcaagatcgtctgattcagagaagaaagaatcccttatgagggataaggacgagatgttggaaagtctacagagagaggtagagttgttggaacaagactcacttagaagggagcttgaggatgtcgttcttgcgcatatgattggtgaaagggaattgcagaacgagagagagatttgtgctttacaacagaaagaccaggacttatgtgaagtgaagcatgaattggagggttcattaaagtctgtatctttgctgctgcagcagaagcaaaacgaggttaacatgcttcgcaaaacatgggagaaactcactgctaggcaaattcttactgcggtggaaacagaatcgaaaaagatgatgatcatagagcttgaaggggaaatctctagtctcagccagaaactggaaacgtcgaatgaatctgtttcttgtttcagacaagaagcaacaaagtcaagagccgaattggaaactaagcagacagagttgaaagaagtaaccacacaaatgcaggaaaagctaagaacttcagaagcagagaagacagagttagttaaggaagtcgcgagtttgtcaacagaaaaacgaaatcttttgagttttatcagcgaaatggaggatggaatgttgaagctgtatgatggagacacgaagctgatgaaaactttggagagagttacacaatgttgtgatggatttggtaaagagaacaataatggtgaaactattggttctccaagattggcaatgaagcatgaagaagatgttgtaactgaagacaggtcaccatttagaccacttaaccattagtttgattaattccacataagagagagtgagagagagtgagagagagagagagaggatattttttttttctctttgaaaactttgtttgtactttgtagtgttgatgtatcttgaagctttttctagaacagaggttttgctcatgtaataaacaaacttgttaggttttgcttgctaattttaattattttcacaaatccaaaacaacataaattaaaactcatgaaagatgaattaaacgccaaaacaatttattaacccaaaaccaatatgtgtcgaattgaattaacatggtcattttagtgaaatattactagttcatgtttggggtttagtagacttttcaatgaacctggattgttctttcttggatttttgttttattttaaaaataagttataaaatattttgaatatgattagaaaatcaacaattttaaaataataacttatttagaacaattttaaccaaatttatgtatatatttatagtaaatgtgggcaattttctattttagttagttgtaaatgttgactagcaatgtatagaaagatacgtaaagaaatacaatgattatagttaacggtgttccatcaaattaaacggtaaatcatcattataaaatataattaccgtttaactttgtattgaaaatacatagtaataatctttaaaagaatctaaatggtaactaatatctacaaaaatagttagtcatgcaacatataaaatctaaattcttatatatattttttaaaagatataagaattatattcaatgctgcctgaaataaacggtacaattaaaaaaaattatatagaaagaaaaacattcagtgaatctaatcccaaacaaatggataatacaataatcatagttgtaagactagattctttacattaatcatattaaaaacaaaacttaatatcaaaccataatatgacactgaagttgcatatcatcataaaaccatcatttctcatctaaaagaccaaaacacctcctccactccggtttcaccgttcgttgtcatgtcgaccagagaaggtgcttcgcagaaccgcacagcacccgacttaaaaccgatcgaaacgtgccgtaaactcctcaaatcacgtgagtttctcagcgttcggtatatcattcaagtgaatcagctgctaaaaagtaaacggcatgatgatgatgatcagtttgagcaagtggaagccatctgcgaccttctcatcgccgcagaaaaccggcttccaaacggtttaaaggattattacggcatgattcgggcgaaccgattcggaccagttttattggaggacttcgagaaattgacgaaacttcttgataagaagcataactatttcccatttagccaagaagctgctgataaagcctcgctagcttggtctctgctgtctaagccacccatcaaagcccattacgatcttgctatctccgcatttttcggagagtgtagcaaagtaaaacgaaagatctttatccccaagaaacaaattgaggtagtggttatttccgatgacgacgacgaggaggagtacggccataagattatttcaatggctcgaactgcgagagggtgtcgtagttaatggaaagagagtgaaaatgataccattgaagaagaagaagaaaacttaaggacaacgtttaagtcctgtcctgccttaagattgttatcctaaatttacttttcaataattaaactcttgaggttgtaatatttcacttttcttgatatcgtttgttttcgttttcagattttcatgtctgaaaatctctctcaatcgttattattattatgattatctcctctttggttattagttatgacaaaatattctcgtgcttattgctcattaatcacccatttattattaccgaccttttggtatcttctccatatctttcttcttcttacaatgttttttagtctttatatatatatatatacacaacaaatttaacattccctccaatgtcctactgtctccttctctgtgtgttaccatggttttacttcaccatgtaagtctctctcattatcaaaattcatcttctctgttttcttcctcctctgaatcaatcctttgtttatttcttgtgttgtgtgtgatgcagttagagcaagggatgcgtccgatttcacgatgttacaatccaaccgcgtattcgacaacaatgggaagaagtttcttcgcaggtgcagccacaagcagcaagctattctccagaggtttctcagtcacaaagccaaaatctaaaaccgaatctaaagaagttgctgcaaagaaacatagtgacgcagagagaaggagacggcttcggattaattcccagtttgcaactctccgcaccattcttccaaacttagtcaaagtaagtttagctctgcattcaattacacaaaatgtttcaccagagaagtaacactttttgtattatgttcaatgaaactaaacagcaagataaagcatctgtgcttggagagactgtcaggtacttcaatgaattgaaaaagatggttcaagacataccaaccacaccatctttagaagacaacttgagattggaccactgtaataacaacagagacttggcaagagtcgtgttcagttgtagcgacagagaagggctaatgtcggaggttgcagagtcaatgaaagcagtgaaagcaaaggcggtgagagctgagatcatgacagtaggtggaagaaccaagtgtgccttgtttgttcaaggtgtcaatgggaatgaaggattggtgaagctcaagaaatcgttgaaacttgtagtgaatggtaaatcatcatcagaggcgaaaaacaacaacaatggaggatcgttgttaattcagcagcaatgagtattttgtttatatacttgtacatctctgtttctcctagtccattagagaaggtagatgtaaaggtataaaagcccatgtgttattgaaattgggtggatacttacaagagtctatatgaataaaaatgatgcaattctttctttggagatggtgtggatgttataacaaaatatgaatcatgtgaaattttttgtcccatctttgttcttacccaattgtaccttttgagatgaaatcccatggttgcttctagtagatagctttcttctgggaaacaaagatttggtttaataagttgaaccaacgaataactcttcaaacattccccacctacttctcatcaaacctccttataaatagaggattccagcacaagtctcttcatcactcaaaccaacaagaagtagtcaaagcacaatacagcagtagtagtagcaccatggctcctctcaagaactcctttgtaacatctctggtcattgcactaacattcacaagcttcttcaccagcctatccgctcatcgtcaccttctccaatcaacaccagtgactcagcctccagctttaacattcccacctctgcccaaaaccactatgccaccggttccttctctaccaactccaggacaacaaacgttgccacagccacaaccaactctgccacagcccactgggttgccaccgatgccgagcacacagataccatcattgcccaaccaggtgcagcccacaatccctaacattccacagatcaacttccctagcaactttcccttcaactttcctttcaacattcctttccttactccaccaccttcaaagtaagagaagtgaaagctagctcattagctgtcacagatcattatccttctttcctgagacagctttggatcacacactctgctttgtgtcagtttgtatacacatatatgtattcttttgctgttgtttggtgtcatcgtcctctttgttgttgcttccataagtcaagttccttttgtaatatacattctaaagagtgatttcctttccactgcaactcaacagactgaaccagtaggcaatatatatatatatatatatatcatcatcatcaaacgtaaaataactttgaaacagctcatatagaaaggaaaaaaaagaagctttattctgtaactgattacatgagaatgcttttaccctaagttttgtaaaagacaaggtctcgtctacagtttgatttgatagcatcctctaatttatcaacaaggtcaaactcaaccttgaaagaaaccattgcagtaccatctttaccagtatcatagtcttccttgatgtcttcagcgtgacacgattgcagctatgacacatatatataaatgatccatgagcactcaggaaaatctcaaaaaaaaaatatcacagccagaaagaatctgtcacctgattgtaaagaacacctaaaagatcaaatgtgacctcaactcccatttgaacctgggagaagaaacaaacaggagtaatgaagttgaacaacaaaagagacaataaagaaaaagacatttactttggacttgaccagacaagaaggagcagttttcaagcaatcagatgtaacaccaccatatgctctaacaagacctccagttccaagtttgattcccccaaaatacctatcatcatcatcatcctatgaggagattgtattctcaaaacttgtaaagattcaatatttaagtttcaagactgaagaaagctaacctaatgacaacaaccataactctgtctaatccagaagagagaatagcagactgaatcggcttccctgctgtgccagatggctcaccatcatcgctacatcgatggtgatgatcaccgatcttataagcccagcaattgtgagaagcgcgaggatcacggacctgagagaggaacatttgagctgattgctcggaggagattggtccagcgattgcgatgaacttgctcttctttatctctttctccacggatacggtttcttttagtgtcgtgaatgaacccgaattcgaagccatcgacctcttgcctgatgcagccactaacaccggtattctgcggccgccgacggtggttactgctgctgctaccggtacgcccacccacatctgattgttgcctttttgccgtctagctagctatattataatcttctcaatttaattgctaaactagattagaaaacatttgatagtaacatttgaaattaaaattgatttttaggttcggtatacattggtattgaaattagaattgatttgcggtttggtttacattggtttagagaagaaaacaaacaaattttcacgcgaaatagaattttggagactagtgagtagattgaaaaaggcatgatttggaaaggggtacacccacagaattgctctcacgcgctcaacgctcactttgtgcgagtgggtgtgaaatagagccttctgattggcttagaaactctaaaaaaagtgaaatagtatacatgttgctagctcctgttgttattatttacttttttgtttcttctatgaatctgatcaaagttcagtttttttttcacatacaattgattctaatagagtttttgggttattttgatatcaattgtatgtcaaaacaccaaattttgtgaatttgtatgctggcaatgtttcatcattataaacgattctgttttcatagagtaaaaaacagaggatcaaaaaacaactttttggaaaatccccttttaggtttatatgtatcattgccatgtatattcaggttgttgcttcttctttcttcatacatatatgcataaacaagtggttcgctctattcctggttgatcgttttggtttcctaatatactggaggaacatgtgtgtgtgtggttgcatttatgaaattgttttttttatgttttcttgtaatttgtttggcttgaaattgaagtcactgtagcgtattgaaaattatcaagttttcttttttatggtgtttgtttatctccacgtctctgttgactaagttgttagagactacatgtctcactgaactagtttactattaccgtctttctgagtttatagaagtacgaagtctctttgcttataaaaggcttgtcatggtctttgtttgtgctcacctcatgtgtacttgacatttccctttctttcgtacagattaatagtaatccagttgctgctgaggcaaccattttgtcgcttcaccaatccccacagccgtataaggcgtgtagatatattcttggtaagtctttctgatgaatccagaaccggccaagtggacttgggaagtttcatctgtttgactgaaagtgttttctacttccagaaaattctcaggtggcaaatgctaggtttcaagctgctgcagctattcgaaaatcagctatcagggaatggagctttcttgccaccgatgataaaggcggcttgattaggtattttttcttcttttatgttatttgggtgatatatgcttaagcttccagttggtcaccctctgctctatcaggaagcaacccttggtgttaagtttgtaatttttgattggctttgcaaatcaactgagagcattcatgcttcacaatatagtagttttagaatactgctgctttcctggtcacatcattttccgagataatcatgactatataagaaaatataggtttttattatgaagttttggattatataaaaaaaaaaaaataagtaatatggcgaaatctttctgcagcttctgccttggctatgtcatgcagcatgctaattcatccgagggatatgtgctttcaaaagtatcttctgtggctgcacagctggtaagctgcggtgggcttcttctgcttatggtatttaaatttttaaaacatgcacattagatgttggacgttagctgtcacttctgatgctatgcatatgagaggattcatgaaaaggatgttgtcgttcacagacaattatgatcggtagcttctggaaaaatagagtagctcaaagaaatctagacaaattagttagctacttctgttttcttgcttgctttgttcatccaagggaacctctaatccgaataaattattcttacaggcttgagtttactcctgcccagaaggaagtctttttctatcaggtatcttcattattttgtaatttttcgtactttcatttttagtttgagtagcattaggtgcatatatgttgttatctgatactggccatatgttatagaattttgtgatttgtatagtctgaacgttggaaaatacacatatataacatcgaattcaagttactcatttctaaaatccaatcattttctccacactgccatagaaaactaccacaaggcataaaaaaacaaaacttaaaaatcagtggaaaaaacaaaacttgtggggaataatttctgctagcaaaaaaaaaagaagcaaaactactcactcactatcagacccaagaacctgctttttgatttcactaacttttgtcttgagttcttctctgttcctctgcaaataaataaatagttttgagaaaaaaaacgtgaatttaagtttaaaactcagtcgattaagcctatgtttagcttaccttaaatagcagataacgggtagtgaaccagagtgtgtatccgagaccaactacttccattagcttaggaaactgtaacatcaaatatgaaaggttactacaattatatcaaacagagtttgtttcgggggcttgagagtacttaccagagggattgcttcgagtgaactgacgattgcagacgttaagtagagagcaactatcgcaccactcccatagagcaggattgaatatgtcttgtctgagtccagctacattgacaaaatcgcaacatcaagcttaaagaactgaaatgaaatggtttcattatctagtctattgaatcgtgatacaacaatacaactctaagcataacaaccagtgtattaacattcccatcatctcaagatattaatgttaattagatagataccttaatatcgttcaaaaactctagggcttgagtttcctcatcttcagcttgaggagcttcactattcgagtttttctcttcggctgcaacaactactccatcacgatcctccacaccaaactcattgactcctgttgatgtttcttcagtaactgtttctcctggaaactttctactacaacgcaacgtgcctaaaaaccatggaaacaccatgaaattgtacttaagcaagcaatcaaactattgacgaaacgcaaggaatcaagaatcatcatctatactaattagaaaactaaaatccgaaaacaatccaattcgaaatagcaaaaaaaaaagtgaaattactcatcaatttagggttttgaaaaatccaattacgcaaaagtgagtgaatcacatagcacgaagcaaaaacagggtttctcaaattctcgtacgggattgaagaacgagagacgcaacgtttcgctggagaggaagtgagattctatcaacagattttcccgctagatatccatggccgttgaagctcgcagggagatgagtgatgattgtggtagacctggtgcagagctccattttcgtacggatgcatcaaagtcatttcatctcctgaaaaaaactgtcattttataaacaaggcttctagggttttggataatgggccgttgttaatacttggttcggcccaaacatataaaacttcaaaaaccggtctgttataaagtaccactttggattaccttagcgccaatttctttctttcttctttggatttggaatagtcaaagtattatactttacttaaaaacgatagctctctctaatcgcatgaggacagccaactccaaaatctcattttcatggttcatacggttttatactaatccttatatgtcacacaaaattaaaatcatatgttttctataatatatccgccaatttcattctgatgcttttggcaaaatttgtcatgggagctaatgtacatgtgttgaactgtttacagtcacttgagttggaaattacagggccaagttaacccgatcgagaagcattgcttgctcagtcaattcacattgctatctaactcctgcaacttttgagccatttcagagctatgtccagcccgcaaacttctggcaagcgaccgtatagctctagagatcaactctttcttctgcttcccacccgaagtgcttgtgccgcttgatccagaaacattatcttcctctttcaatgtcacacacaatcctctcaaccactcctctagaaatgaggctttctgtcgggtttcatgcgacaccacaagacaatacgagtcactaatcctttaaaatcaagcgatgaaaacagttgtattaacaataatagctgccagtttcttactcttataagaaattctgacaacgcttcgaaatgacagcttgaaactaggctcaggagatgcagcatggttgacgttaactgcaacgagcaactgcgtttaagataaatcattcatcaatacctaaaattacgccaacatcatgttacctgattctcaagcgacctcttatatttgaaatttgctggagtcgtctctctgtcagaatggagactttgtaaagtatgctctacacctttgacaacatcagggaatgatctcccataagctgcaattacataatgtgcgagaaagatatcagccaaactgtacaatcccaaaacacatacaatataagacaaacaaattctattctccaaattaatatagctacatggttagagagagagagggatagagaatcaaagtcaccaagtggggttgctgggacagctaaagcggaagcagcttgtattcttatcttaaagtttgatgcatcacgaagtagcaatagtaagatactaaaaacacttggagccctgcaaaagaaaaagatagaagttattagaggtcaccgagagaagcagcttgggtaatagaaagctaaaggatgcttaccaatccatatcttgcagttttactgtctcattggagaataaattgctcaacgcatgacaaacattccattgaacctgcacaaatttctgaagtcaaactatgtagtagataaagctaaggatgcgtaagtatacaaaccgagccacattcgaccaaaccagatcaaactggataacgtatctatataaaaatcaattagattttaatttaataagcttcttcccaaacaaaacttggccgactcgaaccaagactgactgaaacccacatgttcacatccaaacgcaaccatctattacttctacttatcaggtataccttaacattaccagtagtaacacaggaaagaaatgcttgcacggttctctccaaccaccttgtatctaccgcgcaggatagatggtgagaatttgatgactgttgatggggaaaaggtaacacatcttggtccactgactttatacttgtcatgcatctcaattttacatattttgaaatactccccagtgcccgaactgcattggatttaacctaacaatagaattccgaaaatgatgatggcaaatgtgcacataactacaatactaaaaactactgtgtgatccataagaaaaaagttctgctagccagttttcgacatccatatggatcagacgagtgcagtgaatttatctatcaaagaaacataatatttggattacaagttacggtgtaaacaactaattaatttaacagaggaatatttgggattaagaagcatatcactgagtaaaaagagatactaatttatcaaaatatgttgggaacgatttttattaccttgtccccatcctcagttaggcgcaaagcacattctattagtgcatccacaacttgtgaagttgtcttcaatcctacttaggaggataaaagaaaagtaaatccaaacgttgtatcaggtctaatcataacgtcagtactagtaccttcaaaggacctatcatcaacgcggtatcgcagagcatcgcatagattggccaaagcccatgatgctgttatacgcacctgaattgacaaaaataaatcccattgcagtagaacaataaaatataaaatgcatagatcatgagaacaaataaatgaaagtcagtaatgcaataccgaggtcaaggagtcccgggtattcgcttcaacagctaagataaatttttcatatatctccgcactgcatccacaaagttctttaagttcttgaccatgaatatcttgtcagggttgagttaggacaagcaacagacagtgacaaagggttaagttaccttaaagaagtttctggaaaacatgaaataacaccaatcgctcggcaagctgctgatctgactgaaggtgttttgtcatgcaatgcagcggttatctacaaaaactaaaagacattaggcacctactgtaaaactaaagtcgagatagtaataccaacaatcctaaaaaggcttcaatacttacaattgatgaagtaataaagtccttttcctgcttattgaaagcggaaaatatggaggatgtaataccagcaaagcaagtaactgtagtgctcctcaccttccaaacataggaagaaattcaggaccgcggatattatgcaaactacagcagctacatcgatgattgtactattagttgtacaaaaacattaacttgtaaaaaatttaacccaccactgcagaaccatggtgtaacaccagaactatatgtttacgaatagcctcagaccattggtcacatcctgcctgaaagattggctcttgggtattatcaaatccatatgatggtgcagatgagattcttattgaccttatgcagtcagatgtaaatggtgtatccattaatctatcatactgaagatcttcggttcccttaaatccagatattgcgcgaaggcatccatccaaaacctacatacaatcctgtgtaagttcttatttgtaaacgtggcccaaagacattgctcaaatggttcagctgtcaagctaggttctttccaagagcagacaaaatcaaaactaaatctgagcatactaccaatgagcaatgaatacccctgctccacagaagttagggaatttagaatatgttttcaatttaaatatagagaacatagttatttgatatcatgccttaatagcagctgtaaggactttatccccattatatccaacagactctctaaccgaagacttccatgtcgttggagaatcttcaacaacagcagactgcaaaagtttatacacgaggatagagaccctttcccaatatgctggcactaaggttggataattgagagccacagctcggaggacctgcgcgaaaaccatataattttggatcaaaacacaggacaggtaatgtagcagctctcattatcaaaatctgtacatagggataaatgaaagggaaacaaaaagtcagcatattcctgaaccatgacccagtcttacataagttactccctcagcaaaaaaaatgttaaaaagttttcttaatgtacttacagagttcagacagcaccatatgtacctgaatttattctgtgtctatccttctactttcataagaactccttagaagggaaatactataataagaacaacctaatacctgaagagcctcaatgcatgttgatgcgtcagaaaattgctcagcaaaacgaaataaagtagaaagaactcctgaattccattcacatccattgaatcctgaaatgacttcaaacaagcatgtcaaatattataataagattctggttaggacagtagtcataatgaacaggcgcaagataaggtcaacctgctgatgtctcatccaaaagcatattatgcactttcatttgaggaggaaaggtggaaaatgcagctgacaggcaacctattgcggcaacctgtataaaacagatcatgacataggtatggcattcacaggaccaatatttataaaagaagctagagttcagagaaaattttattcagcaagttaaaagcctgagttcccagctcagtataaccaaccatcaaatgtgggaaggcttcgatagagtggcgaaaatgataatcattggggaatggtattggtgtgggttaggtattgggtccagagctgagaatcctctattagaaatagtctcaatactgtctttggtttaatcaatgaagaaagatctttacttggttcttaccatacctcttcttttcctccgtgaatgaaaacttaagattgtttggattaggaattcagcgaaaagaaaggcactagaagtctagaacatattttatagattggataaggactgcaaaacataaacagagacaaaaaatctcccaaacacgactctaggcccttgtctaatgcctgtaccgtccagagaaatcccaaaaaaattctcctcctattgcatccctcagtcgacaaatttctatatgcgactaaaattagtttaaatcctatgactttagctaatggaaactaggatagtccaagaatgaaaacctagatatgaaatgtaaaatcatatatccatcataaacgaagacagctaacagacaaaacaacataaggaaaaggaagcactaaccagcagaccagttttatcatttttgaaaggaaagccctcattaatcctagcatgcagagacattataacttttggcagcaattctcccggcattctcgagtaactgaaaatgataacaaacgttaaagaacacatgaaaatctcatacaaaatccaaaagtagttgcaaattttaataagaagataacattagctaaacggagctgggtctacgcatgtattcatgaagctttcctaattcacttactcaaatgtaaatcttaatcaagagccattatgggtttataataacggatatcaaatacctttaaaaagatacaatacttttacaataaaacgaatatcattttaatcatgaggagctaataaaataaaacacagaagaaatgtacgtacggtgtgcttgatattagaagcaagaggatcttgaacagctgaatcaacaatctaccatgattatcactgtgaatcaaatgtagaatgcctacacccatacgaaaggcataaaaatcttggttaacaaggaataactaatagccagacaagaagaaaaaggttaagacaattaatgtcgttgaaaacctgtgtggagttgcattaatattagaccaagggaattggagaggggcataaatgatccatatttagtagattccttgtactctgccacttgaaggaaaatagatgaaggcccatccatcatggtggcaagagctgacgcagatgcaatccttacctagacattgcaaggtaaacaaaaaagtattgtcaggattcagcagtcatgaagttgagccacaaaaacatctctagacatacttgcttaaccataaaagttattgggaaggtgaaaaatgaagaacagcatcgaaatatgtgcctcaattacttgaaaagggacaagaataaccaccttcaaatgaggatcaaaaagcaagcaggtcattagagtagcttcaaacttcctgttaatgatctcggaaagttaaggagacaagaaaatactacggtatggtgacaaaagatgttgtaggttaattttccaccttggcttgagtacatcacttgttggaaagagagtcacccactgagtggtaaatgactttgaatcagcctggcaaagatccttaacaggaaaaaaagaaaatgaataagtaattgtcactgaaaagttaagtagaagatgagaaccaactaagaataatacattgttactcacctgtatgcaaacaattgcagctattctaaccttggagctttgggcaaaataagaatccggtacggagccgtcactgtcactaaaatcggaatctgatgatataacatcagaactaccagaatcatgagcagataggcgccgccagcttgaagacactggctgcctagtgttcaaatcatccctcttgcgcaagtggggtggcctataaggagtattcttggcattcttacttactccagaaatcaatggagaaagcttgacattcaaatgcttatcgttgtgaacaacatcagaaactgataactgaggtgggccagtaagtccaaaacagaaaaacattctcaatgacgctatgaaacttaagacctgcaacatttaaaaaatctgcttaaacaaaggaaaaaagtctgatatggaggttaaaccagaaaatcacttatccaaggctaagaggaggagcaaagggtatcaagaacccacttacgtgatcagaaacaggacatttgatatttgtaaggacctcgtgcacacagcctagaaggcatgaataaaagctgtagaaaattaagaaatgaatattacctaagagggcaacaagtctaatagaacccagaaaaaaaggagtaaattgtagtctccacaaaaccaaaggcatatacctccacatgaatcggtcttcgacaagctggcccttagatgctaatacgtccattactttccttagaacctatatgagaattcaccaagttgagaaacaaagcatatgagagaaatgagaggatcgatcagtgaaggggaagattacctctagcgtgcattgggagacgtcagtaggaaacaaagactcagatagagaaaatgctctaccaaacatgtcaaaggcaagagccatggaatcccataagcgattctgttgaggcagtttcttttccacaagtaaagtaggagaagggtcttgatttgagaaaccataggataaaactaaatcctggtgtaataaaggaactacgcgcacaagaaacttgactagatgaatgttctccggatgcataggggccaaacgtctgggaaaaggaagaggagattacgaataaggtttaaacaatgtcagcaagattgtgagaagatatataataaccttaaagtctcgaagcattggatcacaggttcgattctggagaaataggcagcggaataaggtgaagaaggcatgggttggcgaagaagaaactccaagacagaagcaaaagagtgaagaaggagcggccatgacgaagaatttagttggaaaagtagacgagcacaaacatcgtgaatctggattaataaaaaggaggagagatcccattaataacaaggaaatgatgggaggagagaaggagaagacgcaccagttgacaagtatgacgagagacagggatccagtcaggaccatcagctttggaaaccaaatcgagcaggaacaagcaatcggaagtgagctcgtgcagtgggaggtgagagacggcagagataagggaatgggattgagagaagagtagatcctcgagcaacagaggaaccggcggcggtggagtggttgagatttcgtccctgagagagagaaacgccgtccgccaccttcccacgcttgacgaagctgccgccgtgaacatgtttcagtctcccgggaaaaaactaagcaatcaaaaacgagaacgacgagagacagacagagagacgcttaatagtcttaaagggatttacatttttttaatttagagttagaaatcaattgtgttacaggaaaacatcttctccacccacttcactagttgatgatgttcattgctgcgtttagcacatcaattctttatttttttggggtgggcagacgcagatctcttcggcccaatcaataaatatatagcaaaaggaatagctcgtcttgtcatatcatatcatcattcagacatgcaacgaataaatacatatccgtgctcaatcctctaaaacagaggagtgcttacaacaacaacaactccagaaacttaactagcaacatttgatagacagaaaaagtagcaagaaattagaagctccgagtcttatgttttaggaggaaacgcctgctccgccccacccttgtttgttccttcctcttccattttcacacttgcttcctccactcccactgggtttactcctgtaacctgcaatcaaaactaaccactttagaaaaccaccattcccacccttttcagccctgtccactgcttcattttaccttagtgcttccactctcatccacctccacctcacaaccttttccacgctccataattcctttcagtccatcctgcacgaacaacatgccatgataaataaattaatctcggaagaaaaggagacggctttaggaattgagaggcagagatgattcagctcagcttggctagacggtcacactatctaatcaggtcaattgttggagctgggagcatactaaataaatagcctaggctaaatgatttaaccgtagctaaagattcgctaccctcatgtgaatgtatctccagcttaaactaactgacttaatgtcagaatgagactcattctggaatctttaggttttgggtctcgggatgagaaaaagtgtaatgttatcagagcacattgtgctgttctggaaaatgctgtaaacctagatgaactaatgacttcaaatgtttgtaccagaaaaagtgtctgagaaatcgaaacaattaagagataatgctgtagtaccttgtcctttgtatctggttcaacagcttctctttttactctgcttggtataggtttactgcacaatgcgatcccacattaagtaaacattacaccgctgactcgaaccaaaaataaaaaggggaggaaacatatatatttcataccggtcatcatcaacatccatgtctgaatccggatcccatcttttatccccatcttcttggtcttcatcaacctataatttacatagaaggcatattttacaaaactaagattggtaacaaccagagtcatcaatcaaggaatacttatacatatctaactggacgaacattatttaccagcccagctgtttaaattagaaaattcttattgtaactgcagttacacttagataagctcaccaaaacccatgaggaaatgcaagaaagaatgggcaacagaaataaaggagccaacacacttcaaatgatttgctcaagtggcatacctcgggagtctctgtatcaggtggtctttcctgaaatggtacacttggagcatgctgaagcttagagagattgtggagaaggtcattgcgaatctcttcaagcatctgacgagaattcttattttccatgttacttggagcaacgtgaagtgtatagtctggaccaaagtattcataatattcatgctccggcatcttgtcttcaacttcaactccaagtgcaactccagtctgtcatataaacagtttgttgtaataaattcaaagaaagagaggcgtcacagagggctaaccttggtacagagaccaaggaaatttcaatgcaaagctagagcagcataaaatgaacagaagaaagtacctcgtagcaccagcaacgggcaacattgcggatagtgtaaccaccaccacccaagagcagtaggggaacattgaacgatctcataaatttgacgcactcagcatgacctttgattgaaagattaaagcaccccaacctatcaccagacaatgaatcagcaccacattgcaataccacagcccctggtcggaaaatttccataactttccccatgatgggcttgaataacagatgatagctctcatcatcgattccatcatccagtggtacattgagagaatagtactttccgctaccataacctatatcctgaatgtgacctgtaccgggaaagtaatcaccaaatttatgaaacgagacagtcataaccctgtcagtagcataaaatgcctcctccactccatccccgtggtggatatcaatatcgacataaagaacacgctgcaaacgagagaggaagagttagagattcagaaacgacataaccatccctagcatatatcaaaacggtgcaggtggacaaacctcatgctgcttaaggagctctaggatagctaagacgatatcattgacgtaacagaagccagaggcctcgcacttcttagcgtgatggagaccaccagcccagttgatggcaatatcgcagaggccgtggttaagcttgacagagccaccaacagatcctccagcataggtctggcaaaaggaataaaggccgtcaaagacgggacagtcttcaccaacattgaagcgcttaagttggcgaatctgatcttgctgggtttcaggggtaatgctgcggagaaaagagacatagtcgtcggcgtggaagcggcagagatcacggtcgcgggcagggaagggcttgagaacctgcatatgctgaaggagaccgtagtgagcgaggagggcatgggtcatgcggatgcgatggggcttcatgggatgaccttggccatagtagtaattgccgacctcagggtcatagaaataacaaactttcctcttcacaccatcaggtccggacgccagcgaattgccgccagtatccattacctctgcacgcacgccgatccataaaaattatattattaaaaaatgataactaaaccctagccgcggagtagctgagccatggacgcgtttgaatgacaacaacaacatttttttaagttacgaaaaaatcaaatctagtgtgcagaagagacaggaaggcgagtgaaagatattaaaagacggcgaggctagacagacgccggaaaatggaatcacgcagacaaggaagagagtctgactgacctttttcgtaggatcaacggtgtgttgtaatcacagtcgcagtcaaatggtcggaggagaagctgcgatgatctctctctctctctctggctttcttcttccttcctcctcgccgaggggaagggagctgctctctgctttgctttcagattttctttcacctctgactgaaactgtagcctacttactcttctcttccaactttttctactttcagtttataatggaaaggcccacttttaatctgttatggtttaaaatgaggcccacttttaatgtgttttaaaaataaggcctattaagttgcctttagcccgtttacttaatggtcttacgcagagtaacaaatcaattaggaaacagagcactagagcagcagtaggcactaggcaaggctggtaaaactaaactcgtgctgcttttgtctctgtttagtacagtatatcataaaactgagtaatccacaaaatcttgattgaaaaggagatggagacaatatgtgcttggaaactaagacaaaatacatgttaaataaagaatgggtgtgttaacaaggaagctaggctacaagtatccaagtagatggagaaagatacagaaaaagaagaagatagagagatacaaggtggaagaggagtgtgcattattgacattttgtgtaggaggagttggagccaatacaaatgatctgcagagagggcaagtgaggtggccacggagaagccaaggttctatgcaattgatatggaagagatgagcgcatctgggaagatgggtcaccgcatcctcagcctcaaactccaccaggcatatggggcagcaaatttcctcctccttttccttgtccccaaacatcactcccactaggttgtaaccgtcatcatcatgcgcatccgcatctccaccattcttcttcaacctccccaagggaatgcacacacatgtgtagaatactatggctgctgtgcacaaaggcgaccgcggaaacaacattgaaatcatctttctccagctttctgcttctttacctcattccttccctctcttttatagactaatatcatcgagtagggacggcgccgaccccacctcccatctcttattatattcttttgttgtttttctttaatcaagtcagcgattctcccaactccaagaaaactcttggagaggttatggtcaacatacgagatgcacatgcttccatcttaagcactacctgatacttgcatttaacaatagtaaacaatacaagaatcacatgacgccaaaagtaaacaaacaaaagatggcattcatatccagtgtattatttatatatatattaaaagtaaggagtcattcttccatcaagacaggccttgacttccgagttcacgaatataatacagccgaccaaatcaagtaaagatctccgagtgaatcataaaaactattttaatgttgactccacgcattttgtattcaatatagcgccagcttctacagaacagacctccacgtccctgagatcagcagtgcctttggaggatgatgtagttttatgcctggtgtatgtaaccaatgatactattgttcatatttgttcatgaagtcggccacatttgcaatagacagtcacatacatcattggtaatgactgataagcgtcaagcataatttgacaccctataccgccaacacaacgctattcattgaacttgcaatcaatattagaatgcatgaaaacagggaactacatctacaactacacatttttaaaggacataggaaaaaaaaaaaaactcgatacctgactccaagcagaaaaaggaagactcatattgattttcactttcaaggttgttattacaagtcaagaaaacatcttactgagacggcatacttaacagcactgcgtaagtaaatcagaagggtttctcggttggtttcttcttgaagatggcttcccaagccaaagacggaaatggagcccttttatccatgaactccttgacagccttaacattaacggcaaatcctttttggtttaaggtatcaatagcggactgggcttgttcaaccccctttactctgcacaaggcatcaaccaattcaacgaaagtggggacgttaggagagtgaccagactcaagcatctcactacagaaagcaacagcatcgtcaagcatgttgcaattatacaatccctgaaccaacacaccgtagctgaaggcattaggggcaatcccattgttctgcattttcctgaaaatcctcttagcgtcttcaattttatgagccttgcaaaaggcctcaacgacagcagtgtagataacgacctcagggattgtacccttgtcacgcatcaatccgaaaagcttcatggcctcttgtacaagcccatctttgcagaggccgtcaagcatggcgacggcgttagggatgagacctccttccttcatcttcttgaagatctcatcggaatcctcaggcggcggtaagggctcctgcgggtattgttccggtttgggggtttcccgtgaatcctgattgactccaagcttgaactgttcgaggaagccatcgtcagacagagtagtatcactctttccaaggttgtgggcttgtctagcgggtggttctctgtgagagttggaagatctctcccctcgcaagggtctgttgggtaagggctctggagggttctgctgctcgtctacttgaccattgtcgcccgttgagagaaagcgtgttgcggacatcgacggcgtcgtaacacgaatctgcttcgccatctgccttgcaaaaacgacggctttggaggaaggcaccatcgttatctgccgctgattcgaaaagttagggttttgcagattttgacggagagagaagaaggggagggtttagtcacgcgagaaggattgagggatataacagtcatttactctacagggggtataagaaagaaagaaggtcctcactcctccgtgtggataagcttctcactttcagttcaattggatagccggaaaggctctcctccaaggtaaattcctctctacttccttgttaaagctcgaatcatctctaagttaagcaaaattggtgtgttgtagtggcgtttatatggaggtgacaaatacgagcagcatcatgtggttcttcagggacaaaggtttcgatgatccgagtatcgacaagatgttgagaaaatgcaaacagttggaaaaggctcaaagcgatgtggcatcagaaaactgggactacctgagtaacattgttggtatccaagagagaaaactcccttacatcgtctctcgatgccccaaaatcctgactttacgcctcgatgagagactcatcccgatggtcgagtgcctctccagtcttggaaggaatcctcgggaagttgcttccgccattaccaaatttcctccaatactctctcatagcgtggaggagaaactctgtccccttcttgctttctttcaagcgttaggtgtgcctgagactcaacttggcaaaatgatactttttaacccaaggcttatcagctacagcatcgacaccaagctgacagtgatcgtcagctttcttgctagccttggccttgatcaagatgggatgattggcaaagttctggtgaagaacccatttcttatggggtacagtgttgataaaaggttacggcctaccactgaattcttgaaatcatccgttggcctgagtgaggatggcattaagtcggtggtcatgaatttcccacaacttttgtgcagagacgttaacaagattctcaaaccaaattatgattatttgaaggagtgtgggtttggagattcccagatagcaaccatggtcactggttatccccaaatcttgattaagagtgttaagaattcactacagcctaggatcagattcctcgtccaggtgatgggaagaggcatggatgaagtggcttcttatcctgaattctttcaccatggattgaagaagaaggtcgaatcgaggtttaaacttgtcaaaaagaacaacattgactgcagccttagagaaatgctggactgtaacacaaagaaattccatgagaagtttggcttttcggaggtaactgcaagcttctagcttttatatctctctctagttttttccttcatcaggctctctctgtaagctgttttcagcttgtgcaccaatttctagcacgagcttttccttgagtgattgtgatatcaatagagtgttttcttccagatatcatcgattattcactatgcattcgtttatcatggattctacacttccttttgaaaattacctaattatgatagaaccaccaccatggcccgatcaagtgcatatccatagagtggttcctgtgttttcaggtattcaactgcaatcaaaatgggatgtatatgttgttggataagtcagtgtcattattggcttgtgattattgcagcaaccgacaagcaaaagaagtgtctgcttagcctaactgcagaacagaatatgcagcaatgcagtctagctgcttgtcggaagtatgggtgggtaaaaagcccctagtcattccacaaatatggaggcccctagtcaaaggtcacatttgatgacaaagagatggttgatcgttctctgcctatatagtatgtacctgtcatataaaaatgaaaccccctctgctctctcttttggatgagatcaaccgtattttaaaccggccaaacttgaaagtttttttttgcttcaaatgctctttcaagtagagtcccttttgttattcacgttttgtagctattctattctctctccttggactggtgtttttgttcttcggtttttccgatcaaagttgaatcaagaagaagttcgctgtttcttgtggttgcttgttgggcttctgtgcctttttgattttttctattttgggcctgtgtgccatgttttcggcatttctgctttgttgggcctacgtgccttttcgagccttgtagttttctttgtttaaagcactcaataattgtttgttgacggaccaaaaaactcaaataggcccgacttaatttattattttaagggcccaaaattaaggactaggcctgcctaccagtcccaactcgcaacattggttatggtaaactaacagcttgccgttttatgttataaaaacggcaggagagtgtaggcttagatagacaaacccgtcaccgagttcggttggatccaacagcaaaccttaaagcgtactccgtccggtcgcggaagccattgattcagttacagttacaagtttagggttttaaagccatatcttgcgaatggctataatcgcaggtaatcatctctaaaattctctctgcagtttgtctttcccgaattgataagtcagtcgcttctgcaactgtgttccttctgatacccaaaactttccatttgggatagtggcagaattagtggaagaagtaagcatgagcagggtcgagcatgtattgaactatctgaaacgtaggcagctcgagaatcctggtttcttatatgcaattgaggacgattgtgggaatgttttctgggcggatccaacttgcaggttgaattacacctactttggtgataccctagtctttgacaccacctataggaggggtaagaggtatcaagtgccatttgctgccttcaccgggttcaaccatcatgggcagcctgttctttttggttgtgctctcatactcaacgagtctgagtcctcctttgcgtggcttttccaaacttggcttcaagcaatgtctgctccccctcctccttctattacagttgaaccagatcgcctgatacaggttgctgtttctcgagttttcagtcaaacccgccttcgtttcagccagcccctcatcttcgaggaaactgaggagaaacttgctcacgtctttcaggctcatcctacctttgaatccgaatttataaattgcgttactgagacagaaacggctgccgagtttgaggcatcttgggactctatcgtcaggagatattatatggaggataacgactggctccagtccatttataatgctagacaacagtgggtccgtgttttcatccgagacaccttttatggagagctgtctacaaatgaaggaagcagcattttgaactcattcttccaagggtttgtggatgcatcaactacaatgcaaatgctcataaaacagtatgagaaagcaattgatagttggcgtgagaaagaactgaaagcagattacgaagcaactaactctactccagttatgaagacgccctctcccatggaaaagcaagctgctagcctctatacaagggcagcattcatcaagtttcaggaggagtttgttgagacccttgcaattcctgcaaatataattagtgattcaggaactcacactacttatcgtgtcgctaagttcggagaagttcacaaaggtcatactgtcagttttgactctcttgaggtgaaagctaattgcagctgtcaaatgtttgagtattcagggattatatgtagacacatattggcggtgttcagtgccaaaaatgttcttgctcttccatctcggtatctactgaggcgatggaccaaagaagcaaagattagaggcactgaggaacaacctgagttttcaaatggctgtcaagaatctttaaatctctgcttcaacagtctacgccaagaagcaaccaagtatgtcgaggaaggtgccaaatctattcagatctataaagttgcaatggatgctttggatgaagctgccaagaaggttgctgctgcaagtaacagaacacctggaactaggcttcccaatggggaagcttacccgtccgaggaagctcgagaaacagcaaatgcaacgaatcatccaggggtaagcgaatactggtatttgataattctttaacattgatgtcctctgttccttgggaataagtacttacttcaatgccagggtgaaaaagagaggacgatacttgaactgacagctgagttggagaggacaggccagcgatgtgaagtttatcgagcaaacctgctgtctattttgagagatatggaagaacagaagtttcagctatccctcaaggtacaaaatgctagactaagcttgaaagagtgagtgcaatctgctggatacataacatcacaattcaactcacgtactgtggttggtaacttggtatgcaaacatttatgggaatcaacttcatgctcttactcagtaaggaaatgattgggagtacaatctattacaaaggctacctactgtaagaacagggaaatcctgaaaattgggtccctctttcaaaaaccctataagagatatagtacatgagcaatatgttatagatgagaatagcagtcggaatttgttgcttgtttcacagattatccttcaagctaattttgatgttctgcactttgatggacacttgtaacttttggtcttccatttctttcaaaactgaaagtaggttagtcctgtaagcttcgcatttcctgtttgctaattccagctcgtttctgagctgattaatcttcttgtccatttcgtcctgcgaaagtagaggaaatacggtcatgcaattagtcagcagtaaaagcacatagcaaaattgaggaccttgcagattgtacggaacaaaggctcacaatggcaaaatgaagaccatactcttaacatgcatatgtgaatcacgagctcattagtcaaacgttaacagagcaatcagcattatggtaccgtcaaggagacaaagcaatgattgtattgtatggggcaaacccgcacaaacgatacttcaaacgtatataactattttttagagcaacaaatttgattgctattatatcaaaaagaaaacaagtatcgaaaagaaaatgatcctcacctcgggctcaggttgcgccagcacttcttgctgatgttttccaccagttacagaactcgctttaaaatgcctgttcgccatagttcttctaacttccttattcattgccagggacacagtcttggcagcttcttgcagagcaacaactgcgacatcacaagtatacagagattttccagcttcttgcacaaaattagaagctttgtgacgtaaggtgttgtatcggacggtatgagactccaggtaattagcatacgcatgcaaattataatcatcaaatataacactgcttttggcatttctggtccatctttttaggatgtagtaaggtggaagtgtaaggagattggtgacccggaagactgccaatatatgtctgcaaatgatgccagagaactcaaacatctggcaactgcaatttgctctcatctccaaaacgttgaacttaacgaaatgagccttgtgagcctctccatatttcgcaacctggtaggtaacaagatccccatcatcgtcagctttggatgccatgaaagtcagggttccaactagttcttcctgaaatctcataaacaacttccttgtgtaaagttcagacgcctgcttctccattggagatggagtcttcagaacaggaggtgagttcattgtgtcataatctgctttaacttctttctcgagacgactctccaaagctttttcatacagcttaaagaactggcttagattggttgaagcgtttatataaccatcaaaatatgaattgatactatcactacgatgagttaaggacatgtcggcaaaaaaggtatcacggagatatactgggacccactgccggcgatcggagtatattgcttgtagccactcatgatctcttagctcatacttgtcaagaagtgaaaaccagcatctctcaaaatcctcaaccgactctgtcagattgacacatttgtggaaatctgactcaaacgaaggatgcttgaggaagacatgcgacagcttctcctgacatttctttaaaatatgccatttgcaaaagcgatggcgggcaccaggaaaaacgtgcatgatggctgcacgtataacagcatcatgatcggtggtgattgagacaggagggtgggcggacattgcggctagccacgtattgaaaagccatacaaatgaagcctcagtttcattgatgataaaggcacagccgaaaagaatgggttggccatggtgatttacaccagtgaagggtgcgaaaggcaaacggtacctgttggacctgtaggttgtatcaaatgtaacggtgtctccaaagtgagtgaaatccattatagctttaggatcagcccagaagacattaccaacagactgatcttcgcttccctgaacagaataaaagaagtttgggttgtcagcattcatctgcctcaagtagtcaagaagaagctgaatctctccttctatgctcttctggcggttgttcctcatataattcctacagtccacttcggtgaaaccaaccttgctgatgccaccatactctttgatgagggcggacatgattctgcggggacccattcctgcagcttgaagtgtgtcaatcaaagtcttggcagggccagagatttgcctgtgggaacgcagacagtgaacttggtcgggaggaacaagctcatggttgtggtctttgacaaagccagagacaagccatttaccggaatcctgcatcttaacagagagggaggctttgcaaccgactcgagtgatggtcctgggacgcttgatctccctgtccttggtgcgcttttcattcatatttctgaaaccttctttggcacagacaaattgcctctggatgatagctccatcacggcgggagcggcgggaggaactgacacgggtactaaagccaatgcgacgggcatacgagttgtagaatgccttggcagcttcttcggactcgaattcaagaccatcatagggctcgagatccaggagatcacaagcctcctcctcctggttgggaaagtaatttccagaattgccaacaagaccattaccgcaaggcataattgggctgtcgagcatatcatcgtcgtcgagagcatggtgctcaatatcaatagcgtcgtcatcaacatctccgccactactaactcctacaccaatatcgaagtcgagcacttcattatccatcatatcctccttgtcttcagggatgaattctatctatctattgtccacaacaggatgaaatagctagctactgtagatagaaccacttacagtcgtgatttgatttcaagtctgagattgagattgggaggcagcgaagacgagggaatgcgcgttcgtgcgcgggagaaaccagaaaagaagagataagggaacttgtaattgattacgttataataaccgaagaatgaaaaggaagatgagagacgacggaggagggagactgggaatagagtcgtcggagggcacggaggaggaagacagacggtgcttctaattctctttttttaatttaagcaaggcccattccttcttcatttattttataaggcccattccttcttcatttataattttataaggcccactccctcttcatttactttataaggcccatcctcttttacgcttaccgtatggttcactatcagttgcgagtggaggagaggaaaaattgacttttaaagacgaaatgattgatacaaaggctgatttatacagtcatgacatctcaatccagatatacatgtagttatctgaaaatttactaccaggaacaaaaacaaaaacaaaaagaaacaaagatagtatacgtattaatttcttgtgattagtctacaaaactctcaagtcgcctatatgaatgcttttttaattacgggaattgaaaaccaccgcctccaacaccctctgcagcagctgcaggtccggtgtttgggtttatggccgtccacagtagagagatggtgatggcaatgagacctgcccacacaaaaactatggttggagttttgcctcttcgtcccatcaatccttttgcaaatggatacaaatgcgccaacacccagaagctgaaaaatgctcctccgattagcttgctccattgtggcaccgcttggtatattgtcctgatgaacgccaccacaatcgctattatgttcaccattgctatcactataggcggtatcatcagcgacgaccatttcactatgtacaaatccgcgtatatgtcttcattgtcatctccccctgacttggtcgtcaaggtaaaggagatctcgatccctgcaatcactttgaggactccttggaccactgcgtaaaggtgagagcttgttcctgagatgagccaccactgttcgtttctccaccattcttccagcccaatgccagaccacttgacctccaaaaccgccaatccaatcaaacaaatggtgatcataagaaggtagaccaagaaggagatactgagcgtccgcacgatgaactgtccagagaaaagagagaatgccggaagaaaacaatagaggatgagaaacagagacgtgaaagggtatatcccaacattgaggtatgcgagacgttggaggaacttgagacgtttggaggcgagaatggcgttgtttctagagaagaagatctcaacagacccagtggcccaccgcaacacctggtgaagacgatccgtgagattaatgggtgcagagcctcgaaaagaatctcgcttagttatgcagtaaaccgagcgccacccacgattatgcatgcggtatcctgtgaccacgtcctctgtcaccgacccataaatccatccaactctatctccccactccgttttatcctcataccaacaagagattacagaaacagactctgcgacagtggtagcatcaagtgggtcacgagggactctaagggctccgggaggacgaccgtacttgacagccgggtggtctgccaatggacgaccttggaactctgcaattggaattgactcagctaggagtgtggagttcccaaagcgcttggggagttgtgtgacatcaaggtccgggtcaaagtcactggtggttagagcctctgtttctgattccttcttctcaagaagcttgtcagggttgggtggatcaaaaccatagagagcaaagcgcctaaacatagtacctgttccaacataaactggtccctggaaaagaaaaacagagaatcatttattttttggtaaaggatctttatatatatatctgtctatagttggtttgcattgcatcaaaaataagtatatatacagtacctggacaccgtcgagagcacgcatattaccgtcaaaaaatacagtgttattgttagcatatctatcagaaggatcgatgccttcgaatctttgcggaaactgaatgtagcaaatgtcttcaccacctctgtccatcataaaacacatcccttctcgtacggccttacagttatagatgtaatgatcacaatcaagattaaggataaaaggtccatttgagaggatagcagaggcacgaacaagtgcattcatggctccagctttcttgttgtgatcatatccaggccgcttctcacgtgacacatacacaaacatgggtaaacgagtgtccgtgtctgaaaaatcaatgactttatcgtcgctatttccaattaatggatcgctgctaggtggtttcaacatcacctggagaatcccagcatgatcacctttggaatgctctcgagtagaggctgcccaagttcctggccagtgggtgccatctgccatccacgtggctttggggactttcacaggctctgttggatcacctccgctctccctcatctgttttagagctttcatttcctcccttgcattaaatgcatctgacctcctccgtattgagtcagggaggccgttgatgcgaaccttgaattcatcatactccctcttaatctttcttctgtccttgacaaaatcaattctgctcttattctttgttggatctatcttcaaactgaaatacgagtctggatttcgaggctcaatgttatgtttgcgacaaaaaggtacccagagatccgcaaagctagcagcttctgccatagcttcaaaggatagaagagctcctccatcatcagaaagatagcatgacaccttctccaccggataatcaacggccaatatggacagaatcgtgttggcggtgacaaggggcggctctttctctggatctgccgttgacacaaaaaggtcaatacctgggagatccgacctccctgttgggttggagggagaaggcatgtcaaatttgtcacgaagaacttccaggtcagtggaccggtttattggacacaacttagggatctggtctagaatccatgaaaatccaaaccaaagctcgcatattatagacatgagccataaccatattgcgtcttcgttaggatttcggatcctccaagttagaaaaaaacatagcacgacaaaacgaatgacgattagtaatctgtaaggactaatgatggcggctggaatagggattcgtcggctcagtggccgccatggcttgtcagctgtttccaccatgccgcctctcatcccttcatccatatcatcgccatacatttcgtcttgaggccaatacgcattaccgtacccatatgtgccttgcgtctcgaatagccatctgttgtgatcaaattcaccgttttggttcctcttcatcatagacatgttgttgttgttcccacgttgatctttccctggagctggtaaggggagagcaccactagaatagtcaggcgtatcgtcatctaggtccccgattttgtattgttccttgcatcctggacaaaggcctgtctctttctgggcgtccatgaagcaatccctacagatcttaaacctacaaagacaatcatcaccacgtttgttggttagttagaattaaacctcattttcttgtgcaacaagtaaaagatatcaattagtgtttattaatatataccggcattcacatggcatcacgtcctttcctctctcgtctttcatgacatttccgtcgcaagcaggcatggcacacgaagagcctttagcgccagccatctgagggtgtgtgacatctgaatcgatcactttgtccataagatgtgcacgtgttacactgttgaaaccaccagtaaataaagaatttgacacgtattgctcttcggctttggtggccatgggctgattgtccggcgtcggaggtatgtgcaccgtatagttagaataatccccggagagctcgcctgataattctatattatctcgagataaactcacatatcttccgctagatgttcgtcttgcaaatttgacggtttggccgctaccggaattgttacggacctttttagaagtttgaggaggcgtggacgccattgtgaagccaaacaaaggagcttggtttctgcaatgtgatcatgcagtataaagatgaaacgtgacttttttaccttcttgttgattttggcaaaacagagagaaagataaggaggagagaattatcaggacacaaaactgtttatgccatggattcctatttttgggcttctatgtatcatgcactaacctattttaggaagctcgagggttttgttgtttattctattttgggattttaacatattctttcttttaactcaaatgatttattctggaaccccattcttcgctcatacaagccgatggaaaatttcctacttttttagttaacgcacagtccatattttttttattattcaactactaactatagaaatgatccttatcgtttgattttttttttttttttttttggcaactattctcgttactaatttaaaatgtggattactgcataatttcatattgaataagattagatatccttaattcgtcttaacactacgcttgttttcaattttcaacttgtttgcttgttttttccaaatttagataattggacttagcttcaaaaccgatgatcttaatgtgaattaatcatctaccattacttaataaggaattgtgttaattagtattgtactatacttttactttggaatttgaagaacttaacccaattagactaatttcaaatacaatataaaggagctaacggttaaatggcagatttctaatactaatagttttggaaattgatatgtaagagctatattataaactaagaatgatgcatgatttactgatagctaaatggatggacttagtttttgtataaacacatacaaacattgtttagctacacaatattctactagcgtattactaattgacagtacaatagtgaaattgaagaagcatcaaaaatatacttgcaatacatagaaggttcagtgtaacaaaggggttatatttggggactagctagagagacggtgataaaattgttggacgtctgtttcagagtacacgggaatatcccaacgtccacaaacgcaaatatgttaagatctagctaggcttatgcatgtaaaactggcggtagaaaatcacgataacatatctcgtaggcttgaccagatcaagaagcaccatccaaaactcgtctgatgatcccatgctgtctagtgaggttgaacagacaatattgggaagtatacataagagaagctgactcgtgaggttgaatagataaagtgtaacgtactagtgtttttttgttgttgttgtaatagtactgttgatggattttgataacgttcgttaaattatgtttatggatttactagttggaaacgagttatttttatatggaatcaaagaacatcttgttaacgatgttaaaaaccacttaaatattttttgttaactttaaaacggtgaatttaaacgataacattatgttaaattgagatttaaatgattttttttcctatgggctattaaattataattaatcaaatacaaaacgctgaaaggtaagaattaagaatgaaagaaacgcagcgtttcgtttcgacaaagtccccgggttctgggttggccttttatcattttgaatcgccgtgagaagtcgaatatgcgttagatgtcgtcgtcgcagaaccttggtggcgccaccagatgcggccgggtgattgggccatctttggacaagatcataaaaaatgccgcctggcgcaagcacaccttccttgtttccgcctgtaagtctgtactcgacaagctcgaagctctctccgattctcccgatccttcgtcgcctctcttcggtctcactacctccgatgcagatgccgttcttcagccactccttctctctcttgataccggctatgctaaggttattgagcctgctctcgattgctctttcaagctcttctctctctccctcctccggggcgaggtctgctcctcgtcccctgattctcttctctacaagctcatccatgcgatctgcaaggtttgcggcatcggcgaggagtcaattgagctggcggtccttcgtgtcctcctcgccgccgtcagatctcctcgcatcctaatccgtggcgattgtttgctccatctagtcaggacctgctacaatgtgtatctcggcggattcaacgggaccaaccagatctgcgctaaatctgtgctggctcagatcatgctcatcgtcttcaccagatccgaggcgaattccatggatgcatcactcaaaacggttaatgtcaacgacttgcttgccatcacggataagaatgtcaacgaagggaactctgttcatatttgtcagggattcattaacgacgtcattacggccggggaagcagctcctcctccggatttcgcgctagtccaaccaccagaggaaggtgcttcttcaactgaggatgaaggcacaggcagcaagatcagggaagacggtttccttctcttcaaaaatctctgtaagttgtctatgaagttctcgtcacaagagaacaccgacgatcagattcttgtgagaggcaagactttgtctctcgagttgctcaaagtcatcattgataacggcggcccaatttggctctctgacgaaaggcaagttgttttatctttcatttcacaggttagtctagtcgtctctcagtagtaatgaactccaagagctcactctccctccccaaaaaatatgcaggtttctaaatgccatcaagcagttgctctgcttgtcgctgttaaagaatagcgcactttcggttatgtctatttttcaacttcagtgtgctatcttcacaaccttactacggaaatatagatcgggtatgaaatcagaagtaggtatattctttccgatgcttgtcctccgggtccttgaaaatgttctccagccaagtttcgtgcagaaaatgaccgtgctcagcttactcgagaacatttgccacgacccaaacctaatcattgacatatttgtgaactttgactgcgatgtggagtctcccaacatcttcgaaaggtattggagtttttttatttaatatctcccctagatagttttttggtttctttttccggaatagtattccagatgttgtcagattacagttatttagctgaaagtgttagagatcagatcgagccaccagggtagcgtacgcggttcatatttgtattccattagtggtgttgtactttaataaagtgtattaaagctcttataattctatcagatgtttgcaggattgtcaacggtcttctgaaaactgctctagggcctcctcctggttcatcgacaatattgtccccagtccaggatattacttttcggcacgaatctgtgaagtgcttggttagcattattaaggcaatgggaacatggatggaccaacaattgagcgtgggagattcacttctgcctaagagcttagaaaatgaggcacctgcaaacaatcattcaaactcaaatgaagaagatgggacgactatagatcatgactttcacccagatttgaatccagagtcatcagacgctgcaactcttgaacagaggagggcatacaaaattgaacgccaggtcttatgttatttttttttgatgaaatgtgaatttctattataaaatggaacattgttatttacatatgctctggggaaaggtgcttctatgaccaaaaaaatattaaaaagttatagctactacaacatactaagtaatttagaggatgcttaggatagattagacatatgagaaccattgagcgagcagacgtccacatcctttgcggtaacgacgagctaagagagtgtatattatgctccaggtcttatattgcatcataaaagaactaaaatattgtccaccacattcgatgatattagtagaattgtttttctcttcggtcatgttaattgcctttatcatctttcttggtttatgtgcagaaaggcgtcactctattcaatagaaagccgtcaaagggtattgagtttcttatcagctctaaaaaggttggcaactccccggatgaggtggtgtcgttcctgaggaataccacaggcttgaatgcaaccatgattggtgattatttgggtgaaagagaggattttccaatgaaagttatgcatgcctatgtggactcgtttgatttcaaggagatgaattttggtgaggcaattaggtttttcttaaggggcttcaggcttcctggggaagcacagaaaattgaccgcataatggaaaagtttgctgaacgcttttgcaaatgcaatccaaattcattcagcagtgctgacacagcatatgttcttgcatactctgtaataatgcttaacactgatgcccacaatatcatggttaaagagaaggtttgtcttcttggctgtcacaatttattcaatccatgactgatagcttttggagtgtatgggcatgtgttaacttttttggctatttctgtgctcagaaaattgcttttgaaatattctaaattggagatgctttttggtgtaaaggtctttacagtgtatttaacgtctgctttctggtttatgacaatcagatgaccaaggctgattttatcagaaataaccgaggcattgatgatggcaaagatctcccagaagagtatcttggtgcgctttatgaccaagttgtcataaatgaaataaagatgagttctgattcttcagccccagaaagcaggcagtccaatggcctgaataaactactgggtctggacggtatactcaatctggtttattggacacagacggaagaaaaagcggtgggggctaatggtcttcttataaaggatattcaagaaaagttcaggtcgaagtctggaaaatcagagtaagctcgtttaccttaaggtctagtgtgaagagatgcttatgagcgagtcaggttacctgcaacattagcgaactaagatgaaaccatcgtttccttatacgttaataaaccatacttccccttagtttaccttgttcattgtttgtctctgaaattgtgtattcctgagaattgagaaactatctttttaaaaggattaatattgacaaataccgtggacggatgttaggatctgtaatcataacattgatctaatgaactggattatttttttggtcttgtagatcagcttaccatgtagtcacagacgttgcaatattgcgttttatggttgaagtttcctggggaccaatgcttgccgcattcagcgtgacacttgatcagagtgatgacaggcttgctgcagttgaatgcttacgaggctttcggtatgcagttcatgtgacagcagttatgggtatgcaaacgcaaagagatgcatttgtcacttccatggccaagttcacaaatctccattgcgcaggagatatgaagcaaaagaatgtcgatgctgttaaagtaagtttcttactttcttcatattaaattcgctgttcagaatgaaaggagttgttcctctctgtgttttctttcctcgcatctgatttttaatgtatacagagagatgaagcattctgaggcatactgacctaagtatatcatatgtttcaattttctgtttccactgcttttaatgtctttctctagtagaaagcttctccttcacttgatggagagaagcatgtgtgattcacctcttcataacttcattattgcttcttatgttattcaggccataatttcaattgccattgaagatggtaatcacttgcaagatgcttgggagcacattttgacttgtctttctagaatagagcatttgcaattattgggcgagggtgctccaagtgatgcatcttattttgcttcaaccgagaccgaagagaagaaagccttgggttttcctaacttgaagaaaaaaggagccctccagaatccggtgatgatggctgtggttcgagggggctcatatgatagcagtacaattggaccaaatatgccggggcttgtgaagcaggaccaaatcaataacttcattgcaaacttgaatttgcttgaccagatcgggagttttcagttgaataatgtatatgctcatagccagcggctgaagactgaagccatagtagcatttgttaaagctctatgcaaagtctctatgtcagaactgcagtctcctacggatcctcgagtatttagccttacaaaattagttgagatcgcgtaagaatttcttcttttgatactctctttagaacacatagaatgagaaatggacatattgaatacatctcatcttggctacagaactggatatcgagtgagcatcatgatagtctaataagatgtcaacatatcatttacatatctcttttcttgctgtacagccactacaacatgaaccgcatcaggctagtctggtctcgcatatggagcatcctgtcagatttttttgtatctgttggcttgtcagagaatctttctgttgcaatattcgttatggactcactacgacaactgtctatgaagttcttggaacgtgaggagctggctaattacaactttcagaatgaatttcttcgaccatttgtcattgttatgcaaaaaagcagttctgctgaaataagagaactaatagttcggtgcatttctcaaatggtactcagccgtgtcagtaatgtgaaatcagggtggaaaagtgttttcaaggtacagaatgttttcctagcatctgcctgtatgtgaatatacagtatatgattaaggtttaagagaaaaaacgttcaacccaggatagaggatactatgcttagtagtttatctgctcgtgttttgttttttataagacacactctagtggtcgacatgttttactgagtggccagtttcctttcaggttttcacaactgcagcagctgatgaaaggaagaacattgtattgttggcctttgagacgatggaaaaaattgtccgagagtacttttcatatatcacagagacggaggcaacaacctttactgattgtgttcgatgcctcataacttttacaaacagcacatttaccagcgatgttagcctgaacgctatcgcgtttctacgattttgtgccctaaaacttgcagacggaggcctcgtgtggaatgagaagggtaggtccagcagtcccagtactccagtaacagatgaccattcaccaagtacccaaaattttatggatgcagatgagaatatttcatattgggttcctttgctcacaggtaatctatttttaataatacttctgtttaaatgcgtcaacaaattatgagcatcttacattttccgaattcacatatgccattgctaatgtgtccaacttggttgaatttgcattctaatcaaaattctgttatattcattaattacaggattgtctaagctaacttctgattccagatcagcaatccgtaaaagctccttggaagtgctctttaatattttgaaggatcatggccatattttttcacgaacattctggatcggcgtttttagttctgttatatatcctatatttaacagcgtctggggcgagaatgatctgctttctaaagatgaacatagttcatttccatctacattttcttcacatcctagtgaagtttcttgggatgctgagacttcagctatggcggcacagtatctggtagacctatttgtcagtttttttactgtgataaggtctcaactttcaagtgtagtatccttacttgctggtcttataagaagtccagctcagggtcctacagtagctggggttggcgcgttgctgcggttggcagacgaattgggtgacaggttctcggaaaatgagtggaaggagatttttttggctgtgaacgaagctgcttcattgacattgtctagtttcatgaaaacactgagaaccatggatgacattccagatgaggatacattgtctgatcaggactttagtaatgaagatgacatcgacgaggacagcctgcaaactatgtcttatgttgtggcaagaacaaaaagtcacataaccgtccagctgcaagttgttcaggtatgtacaaaatgttatacgatgcattgagatgccaagttgtctaatagcaacaaatgtgaagtatgaaaatgttaaaaataacatattgaaaaagccatacaaaattgaatctagcaatgttatagtctctaattttgccttgctccagaataatgatctaactccgtctctcactactgtattttctcctgttttcaggtagtgacggatctctaccgaatccatcagcagtcattgttggcatcgcacgttactgttatactggagatactctcatcaatctcatcacatgcccaccagttaaattctgatttgatattgcagaagaaagtgaggagagcgtgctctatcctggagctctctgaacctcccatgcttcatttcgaaaatgacacgtttcagaactacctggacattcttcaagccatagtgacaaataatccaggagtgtcgttggagctaaacgtagagtctcagctgatgacagtgtgtatgcaaatactgaagatgtacctgaaatgcactttgtttcagggtgatgagttggaagaaaccaggcagcccaaaaactggattctacccatgggagcagcctcgaaggaagaagcagcagcgagatctcccctagtggttgcagtgctgaaggctctgagggaactgaaaagagattcattcaagaggtatgcaccgaatttcttcccattgttggtggagcttgtgcggagcgagcacagctcttcacaagtcccacaagtcttaagcacagtgttccatacatgtatgggtgcaatgatggatgaataatagggtggttataagtgggttttgacattcgagcacctgaaggatattgattaacaagcagacacaaatcactcttttcttcttttgttttttcttctcgacggagatgcgagatttacaggttttgtgctgttgattgatagtgctgatataaagtaattgattactgtttgtagaaactaagaaaagaatggtgagattaggagggtcattgcattttgtctgcaatgcctattttcttccttccagtcgtgatcaatgtgcataatatactctcacacagctaaatgcggtccaagtaaggattgtgaaggatatattatataaaaagaaaaaagaaaagagaagacaaagatgagccactcgtggaaagtcatttatacctccttgaaatgaagtgatgatatctaatgactccaaagtcataataaagtcaccgaaagtgaatcatgatttgaagaagataaaggagtcaggagtggaactgctttccttggtatgtcattccgaagcgccaatacggaggagccacatcataagaggcaatggttttgccgcctttgagagtaacctcgaaagagagagactgtccgatgagatcgagagaggagtgccagttctgtccccagtttctggccattgggatccaagccgttgtgtggcccttcactttcacaccaaccacttccccgtcgaggcccacattgcttatcaacacctggaaaaagtgggagctcccgctcaagctgaatctcaacccgcctctccgcccacacttgaccctcctatactgtataggtatcatctcagctctggtttctgcgatccctgtgaaggcggcatgagatagttccaagtgttcctttgggaagttgcaccaacctccgtaatcggaggagagtcccgaattgggaggacagaaatcggtggcggtgaccaccacggaggggctgccttgaagacaccaacggatgtggttcacgcaccgcacttctagacaagctccgcagctgcttcccctgttgaacagcttcccgctcaggcctgcgctgtagccggcaaagctgctctgcctcagatctccatacccacaagcgcctcctatcagaaccaattagtctagttagtcctgatgaaagaagaaagaaaaataggggggagagagagaaaagagaaccagtagcgacggaggaggagccgtctctgtctctagaaagcgtggctgtggctatcttccagtcatcttcggcagtggcttgaaagaggcggcagagaatgaagaagaggcacaatgcgagttgctgaagcccagaatccatgaacaagaagtgttgttgggatcctcacagtcagtcacaggtggcagacaaaagtgatgcgtttgagagagttttgggggttccttttgatcatcaggctccgcttttcaagacttgtggggatgcgacaaaagattgctctgacatgttttgactttgacagtccgtttcagaccaattataataaaaaaacaaaaaagggaacaactatacgttttccaggcccatctcattcggaggcccactttcaatacgacacagaatcaagacaagagacgcaagacgaacttcttgagcccttttgttaattcaatgggccctcactaagaagcccataataaaataaaataagttctattttcaaacattgtactattactttttgtaccggccgtgtttattcaattctcgtatttgtaagaatttataaacaaaaagcaatgattaaaacatttacaatgacattatgacaatgaattcgaatgtacttttcaagtcactcgtaaaagaatataaattttttaagagataacataagacttttaaatcgataagtgaataacatagagtttgtcattttaatacaaatcactgccgataattagactgaaatggaagaaaatcagacggagacaatgatgtccttaaggggaagaagagtgaaatgaggtagcggtttgaggtggatgagaacatgtgtatacgatgatgactcttgtttgatgggacaaccgtgagtcgacttatccagcgtcccatctctatagacaaacacattttcgtcctcttccatgcgacgccactttctgttgttatctttggcacgttgcagcggcattcccctgcatcatcaacattcattatccatctagatgtaaatgagaaagtgggcatatatccacgtgtgtacctgacatggaagagatcagagacatcaagaaagaaggtcagtgcgtcaataaaagcctggtaggtggtgatatggaggccgtcgatgtggggatagggcagcctgggcctggtggtggtggtggtgggagaagagaggaaaacgtactctttgaatcctcctcctgctccggtggcctgagcgacgaagcccatggtggacatgattggttcaagctcctcgtgcgtcataacaggcttgaaggttctcgtgtgccacaaggccagtttcctcatactgcactcctccatcatctctctcgagatccacaagtgagtgagtgtagggattatggttacaattagtttggtttttctttcttttgcccttgttatttcatttattcaccaaactgccattcctttctgccacgtggccttcttcatcccatttgtgagcaattcaatttagtaatccatttgctgctctgtagtggaagtagttgttgttgttgttgcagaagaatccgaatccaattcaatgagtcttcttcgtcttctcctcgttgttgttgttcttcatctttctgcggtggccggcgacgacgccatcgtctccagattccaggagtacctccgaatcaacacggttcagcccaacccggaatactacaaagccgttgactttataatatctcaggcgaaaccactgtccctcgaatctcagacgatcgaatttgtaaaaggaaagccgcttctcctcctcaaatgggttggctccgacccaaccctacctgcctttctcctcaactcccacaccgatgtcgttcccttcgaggactccaagtggactcaccatccgctccaagctcacatggaccaccatggcgacatctatgccaggggttcccaggacatgaagtgcgtcgggatgcagtacctcgaggccatacgcaagctccaggcttctggcttcaagccactccgatccgtctatctctccttcgtccccgatgaagagattggcggccacgatggcgcagagaagtttgctgaatcccaattattcaagagcttgaacatcgcaatcgtgctcgacgaaggtaaacactcttctggatttgattcttgattataacagccaagcatcatcttatacaacaaagtgaatcaggcctgccatcgcctactgagagttacagagtattctatggagagaggagtccctggtggctggtgattaaggctaaaggtccacctggccacggtgccaagctctatgacaactctgccatggagaatctgctcaaaagcattgagagtattcgcagattcagagcttctcagttcgatcttctcaaagctggtgggatagctgaaggcgatgttgtctctgtgaacatggccttcctcaaggctggcacaccttctccaactgtaactacttttttcttcattcatattatgtatgattccaaagttgatgtctttatctgagaatctggctctttctttatcctcaagggtttcgtaatgaatctgcaaccatctgaggcagaagctggtttcgacattcgtgttccacccagcgttgatgctgaagcactcgaaagacgtttagtggaggaatgggctccagcagcacgaaacatgtcctttgaggtaatttcttggccacctgtatctctttctcaatgaatttgaagaaactgtccagtcttgaagccaagtagcaacacaaagtcccctttttttatgaacaaagtctactcgacaactttaactaattaagatgttagctggggcagttcaagcagaagcttacggggaagcaattccttacagcagcagatgattcaaatccttggtgggggctcttggaaaatgctgttaaggaagccggaggtaggaccagtaagcctgagattttccctgcatcaacggatgctcgctactttcgcaaggctggcgtgcctgcctttgggttctctcccatatcaaacaccccgagtctgcttcatgaccacaatgaggtacatacatgttgatactcactttgctcattgttggaggatcatcattcatgttgtttatctgtgttgcagtatttgggtaaagctgagtacttgaaaggcattgaggtgtatgtttcaatcatcaaagcttatgcatcatatgaaagcaaaagtggttcacgagatgagttatgagggtctcaacacagcccattcaagtcttcctttcgcaaatttgtacaatcaataagatctgaatccatcctgtgtttgttgtggtaaatcagagacatcttgttcttgttgtgagacagttggcattggcaaattgtattattcattcctgctttttcaatgcttcttcttttttctccttgtgtttcctcgtcgttgatgggccgtacaaattaggcccattagcatgatccagtacgaaatccatttaatgtaaacccaaccagtcctcctatctcttcgttcgtgactctctctgctctgctcccaaatgttatcgtcctccggaagctccctcttatggcggagccgtacacatgtgcctgcaccgccgcctcggtcttcgccaccgcttaaagctctctcctttcccttctcttccagtttatggtttattcacagaaccacaatttctcctctttcgtgttcagctgaaagttcctcggagattgccctggcgcagagccagcctgcccctgatttcaatcgtaagtcctccattgctgcctttaagattatataaatgatgctttccggtgaattaaggcatctatttttttttttgaaaccgcgtctctgtttgtgttgtgtaatgggttctactagcctggtcggagttcgctcaaaatgtgtctggcgaatgggacggtttcggagcagattttacatgcgaagggcaaccgctagaactacctgaatcagtggttccagaagcctttagagaatgggaagtgaaggtgttcgattggcagacgcagtgtcccactcttgcccagcccaactcactatcctttctttacaagtccatcaaactcctccccaccgttggatgtgaagctgatgcagccacccgttacagcatcgaccagaggatcatcgggggaggcaaatcctctgcattagccttttcgtattctgtcactggctcctatgtcgctgtgtggcctttgcggaacaaccagcttgaggtggagcattgtctgatcaatccaaaggacaaggagtctcgtgtgaggattttccaggttgtcagcttagcagagaccaccaacatgtccttgcagagtgtcaaagttttctgtgagcagtggtacggtccgttcagagatggcgatcagcttggaggctgtgccatccgtagctccggctttgctgctacacctaccactgcagcttcagtggttaccggttcttggagagttctacttgctaccactagctttcacgcctctgatttcgtgagttggcgtccttacactgtgtattcaagtgtgtacttccattcgatgattgccgtaagtttgtttattttgtgagtatgttcagggttgtatacaacaagttactggcgagaaggtgattgagattgtgagagaagaaaatgatcttttattgcttccgcaagagctgtggtgctcactccaacaaggcaaagaccgcgaaagagtattttcagtaggatgggtctttgagccaggccatgctatcacatccagctgcgtcttctctagcgattctaagctaaaggtaaccaataatcttctttgttgacaactacatactcttctccttgcaacttgtggtcattattctatctcttttactttgcgcaggaggtaacaatggggagagagactgctctatcagatgtatgatcaataatcgtttaaatctccacagatcattcttataattttctttgtaggatgtgtgcacataagtcaaattacaataatctcatatgacttcctatactgatgtttgattcagtttatctgttaataatacatatcagttcgttttagaatgcagagcctttgttgattcaatctttaccgggaaggatccagaccatgggaaccatatttctgcagagctttgtagcttttgcatatcttcgttcagctctatcaaaaacgactgtttcacgtacaccgatgtatagacttgtcagtttgggaaagaatttgatggaatttaccttgaaaaagtgagaaaggcttaacctgtacataatcgtgagattgcttgcttctcactgcgagacggcattgttcctgatgctcatgtttatgcttttcctcattgttcttccaacaatgcctttctgcatcatagctacaaactccccgtagtcaatccttccatcctgaaacaagaagaaaaaaatgatccctggcctttgaccatgtactctccaagccagaggatatgtatgcataagtcactcacattgtcttggtcgacttccttgatcacatcttctagaaagacatcactcattccctgttcagcacatgcgtgctgtagctcatcgatagtgatgtaaccgctcccatctttgtcaaagtacctgaaggctgacagaagatgttcttcacgctctaatttgttcagatggattgttgcagcaatgaattcaccataatctatggtcccactcttgtcaatatctgcctggtaaatcacagtcacagattaatactaaacatactgatttcaagcaggtactcacacagatcagatcagagcaaagtgcttacagcctccataaggtcacgaatctcagtatccttgagggttgaaccatatcttcgcaacccggctttcagctcgtcaaacgtaatcgctccactgttatccgtgtccattgctttgaacatttccttcagtccagcaatttcttcctccgagagactctcagctattacctgaatcacagcagaagacatttatggaaaattgttcacaataaaggccaaaaggcttgcggccgggggcttacccgtaaagccatctgctttagtttattcatcgcagagaactgtttaagacgagaaagcacagcaggatctagtgctctgtctggcgcaactccattttcacagatccaaggatggcctgcaaaattctaaataagctagcagatacactaattcaggacctgaaataggagcaactggttagacttacgcaatacttgatgagctgtcagtcgctcagagggccgggaacatagcatgccacggatcaagttttttgcagagtcggatattaggggccaagggtcggagtcaaagtcaatatgtcccttcagcactgcatcaaatatcccttgctgtgtttctggagttgaagcaaaacaaatatttaagaatcttttaccttggaagcctaatcacagttgtttcatttgggtgcatacctgcccagaacggagggactccgctcaccaatatgtacagtatgacccctgcggtccacacatcagcctcgggtccgtagtgcttgagcagaacctcaggagcaacataatacggacttccaaccacatcctcgaatatttgacctgaaagttgcagatgatgtagcaagtgtgaaattctgactgaagatgttgcaaatgatgcagctgatgttatcacctggtttgaagaacacggaaagcccaaaatcaatggctttgagagagaagtcgtcgtccttgttaaccaacaagaaattttcgggctttagatctctatgcatgacaccaagcgaatggcaagcctcaacaacaccaacgatgatctttatcagctcagctgcttttctctcgctgtaatgtcctctctggataattctgtcaaacaattccccacctgagcaaagctccatcacgatgtgaacatacaatggatcctcgtaagcacctttaatggtgacaatgttcttgtagccagccagatggtgcatgatttgaatttccctgcgtacgtcttccacatcttcctttgatatcaactttcgttttgttatagacttgcatgcgtattcacgccctgttgagatctctttgcacatgtaagtcgtcccaaactgtccttgacctagtttgtgtcccaacgagtagagatctcggatgcttggggtcttttgaccaagaacatagcaggcttggttcccaccgctgtgcttcattgtggcttcttcctgggggcgtcttttgccagtttgtgtgctgaaacaaatcgttgaaagacaaaatgtattagaagtggtttggcttgtaaagaattgcccatcaaacaaatcccttaccaagttagttcacctccccttccaaattagtttgccatcagaggaaaacagagcaagtcccatagcaagatctgaaacattatacgaatttagcataaagaaatcgcaataataaggagagacatcaaaacaggggaattagaggaagagatggatgtgtaccagacaaagatgataagaatggatgaaaattaagtcagattggtgcagatccgatgatacacattgttgaacatggttttgcaatattctcgccaacgtctccacatcctgactaaaaataacaaaagaagaagatatctttgattaatagtcatcaacagatctgtctctttaattagaatattctaaaaatgcaggggaactccacaaggctcttttcttaggcctacttcacatgagacaaatcaagacctccaattggtcgcatcggaacaaacctttaatgatcccatggcctcagattctagttgacgggttataccagagaagatgggtcgagtgccttgattggctactcgccaaagatgtaataaaagttacttctttgaagcaacacgcattatttagtacatgtttgaagagatatgtacactagcaatagagaagccaaaacaagtgggacgaagaaaaactgcatagaatgatttgcattcgtataagttacccacaagataatcactaataaaacaactgaaatatatttaaccctgaccctttcaaggggttcccataacttctaagccaatcagccaggtcaccagagcttccttgctgttaaagttaaccccaccgctcgacaaactcatccataaataacaatacaacctaacagctgctagaaggaggctgcatgcggtccaaaatcttcttttcctttcatctgcttgtgaaacccggttagcacagaactgtaagcaatggttaagatgtaaatgatgctggttggagaagtacatgttttgcatcaggaatttcgaattccaagctgcattacagaatctggcccaaccaggaatacacgtcttgttgtctggattcgaaacaccactactcctttatatgctgttcgaggcacaccatcctacacaatcaaaggggtacaaaaaaagtgacccatttggacctacaattattgaagattatagttcaatcatctcaaatttaccttccattcttcaaatataccaaattcccctgcaatgcgttcaaactctacttggtctttataccggatacgaacatcatcctttatgttttgagcctttaagacaaggtcagaaccttgaattggtcgtgcttgtctcactaagccagaaaagtacttggtatagtttccctttgatagacatgagagaacaggttaaaaactacatttctccactcaaaacatgcaaaatggtataaaaaaaaaaggccggagttctgtaaatgttacctctgtcaggtatcccaggtcctttgctttccagtcaacctttatgaatgaaataggaaaccagtgaaaactagtgatgcaacaaaagggggtaaaaaacacacttacgcttaccgtcacatcgtttagctttataggttccagatactgactgaaaaactgtcccaaactagacccctgccaaattaatataacaaggttatggataagtatgaaatgcaaaaatatattatgtggtattgactgtctacatccatgtgtcgggaaactataggacgaagctgcaataatacatttttcatacagaaagcagaagtcatatgcagcgaacataggtcaatttaacagcattacaaaaacagacttgtaaaactatgatatataggatagcataatcgggtactaacatgttcaccaaaattgtatgttctacagacttccggtcgaatgaattggcggcctttatggttttcctttagtctcagccaatcatcccagtaagtggatatttgttaagaaaagtcttagaaacgtcaaactatttttttttttagaatttaagaagcgtcaaactatagtcatcgagattgaaagaaaaaaaagcatataaggatatgcctttggccactttggtgataactcatcccaagtcgatctcttgagcatccacccaaggccaggaaaaaaatctgatcggtatagcgcatctgcagattattttagctcgcatgagctagacataatgaggtattgaaagaacaggcaagagaggaagcaaggtaaagaagaagaagaagaagaatcttacagggatcatgcacaaactgcttctgtccattatcattccatgatgaagcagccataatggttctaacacatgtttggaccagaaaagaatgagaaacagtaataaaaacatttgtatactctgtggaaacttatactataagagtctagcttcagtaggtaacatacttatccctatccatgagactagctgcagcctcaaagtaatcaaagaagtctggagcaatttccatatcatctgttaaagagacaagataacctctcttaagcaatactccacaaggtaaagacagcccctcttaaacaatacaacagcaaggtacgatgagtgtgaaaggttaaaaagcgccaccttctagtataatcactcgactaaatttgtgtttgtaaaacaactggtccagtgcccacttgtagtgacctgtattaaaaagtgtttcagtaatggagctggagggacgcagagaaaagagaaaccagtccttacgtgcaatcttgtagtacgcagtcagttcgccaggcctttcagtgaccactggttcaaaatccaagtgctgaaaaggggaaaacgagccttcatcctcatttatctacttgaacagtgaggagaaaaatcacgctagattaaattacctgcatatatgttaattgattatagctcaatgacttgctcttgacagcttgatcagatccatcctgtcagaaaatatgtcgttggaaaagaccatggttagtaattcgttgaatataaaacagtctaagagaccaccaccctgcaaattaagtacctgagatataaatagaggatattttgaagcaacgggagtttgatatctgtataaaaaaagaaatagccattagatagttcaatcaaaatgtggtataagaattaaatcagtatagtatctcacgttaaaactgatttaacagtcctttcaagatagtctgcacgactgcaggccataaccactacagcagccacaggcatctgctaaataaaaaacaagaaacaggttagatgtatatatatagcaagtgatagcagttacaaatacgaagaaaggcatcttcttatccagacctgtccaccttgagtgagttttgctattcctttttctggaggaagaaaataagcattagtagaaaaactaataaaaagaaagcaagaaaatgagttttacaggtgatagtaaggcactttcaaacgtctggattagatccttaagctgcacaagttcttcgtcctggcggttcttcatatctacaagacactcagaaatcaatgtataagtcttctactccatttagaaagttaattttgtatagtattcaataggttccaagaaccatggtcatctaggattccacaagtcccaatgaggaaagaagaaggggatataccttcgagggcaacaatccgcgactgtttgatgctaacttcatctatgaggcctcgcatttgactagtgcaatggttctcagattcgatctggagaaacaaatgaaaggctgtgtatagatcttcatcacacaccaggaaaaaatcgaaataccaaaggcaatgatatggtgtaatagtgcagatagtgtcttcttcttgaaagtagttcatgggcttgtaaagagccaaaaaatgggatttcaaaaggaactagtagcaatggtctaaagacaaaaggcagtggtaaaagtagaaactcacagcggaactgaggcgatctgcatactgtgattgcgtctggaaaagcctcatctagagaagagaagagaggataattacagacagatttaggttgcagcgatggaatcaatttcagtttcaacttcaaaaagcgagatcatcggatatagattgacctggatgtagatgaacatgaaagctgccgggatgagaagaaatctcaagtcacacgagatcctcgccatatcgacgacaaacaaccagatcaaaaccggtggatcttctggtgtttgccgccgggagggagctagctaataaggaagttgtttgaaacggcgtcgtgcgttataacaaaaacggtaccgtttcccagtaaaaatgataagatgaccatttcatttcatccataaatagagccgagcttcttcctctgtaaatctctgacaacaaaccaaaaaagagagtccaccaactctacacgcaattcatccaattatcttgctgtcgccattcgccaatatccatccccatcttcttcgatttctgagattcggtcgaaaatcatcagatgggttttcagaacgaagctagctcctcctcttatacccttaaaatacctccaccggccagagaggactcgcctcttctcggcaagggacctcccctctccagccagtttaagaccttcgccaacgtcttcatcgctgtcgtcggcgctggtgttcttggtcttccttacgccttcaagcgaaccggatggctcatgggtgtcctcctcctcgtctccgtctctgttttgacccatcactgtatgatgcttcttgtctatacccgccgcaagctcgactctttcaatgctggcatctccaagatcggctcttttggtgaccttggattcgccgtctgcggctccttggggaggatcgtcgttgacttatttatcattctgtctcaagctggtttttgtgtcggatatcttatcttcatcggcactactttagctaatctatccgatcctgaatcgcccaccagtctgaggcatcagtttacaaggctgggttctgaattcctgggcgtgtcttctaagagtctctacatatggggatgctttccctttcagctcggtttgaattcgatcaagacgctcactcacttggctcctctcagcatcttcgccgatattgttgatcttggcgctatggctgtggtcattgttgaggattccatgattatactcaagcaaaggcctgacgtggttgcctttggtggtatgtccctcttcttgtatggtatgggcgtcgctgtctattccttcgaaggcgttggaatggtcttgcctcttgaatcggagatgaaggacaaggacaagtttggcaaagtcttggctctcggcatgggattcatctctctcatatacatcgcatttggtatcttaggttacttggcttttggtgaggacaccatggacattatcactgctaacttgggggcaggacttgtcagcactgttgtccagcttggactgtgcatcaacctcttcttcaccttccccttgatgatgaatccagtgtttgagatagtggagaggcgtttctcacgcgggatgtactctgcgtggctcagatgggtactcgtcttagcagtgactctggtggctctttttgtgccaaactttgcagattttttgtcattggttggcagcagcacttgctgtgtgttaggctttgtgttacctgcattgtttcatttattggtgttcaaggaagagatggggtggctgcaatggagttcagacacagcgattgtggtactaggtgtggttcttgctgtgtcgggaacttggagttccctgagtgagatcttctctgtcaaagtgtgagcgtccgtgaagtcagagattggagaggtttttctctccttgtgtgcaattatgtatatggaattggttgtggttttaagagtaactgtgattgtatttgtattttgatggtttggaataaaagagatcagctctgtcttctgttttgtgtttacatgtacaacatatgtgagagttttgatttctcaatgttacaagcaagggaagctcgcgaaataagcctggctagctaatcaaatgctttggttttgtattattacaaactgttgagtgtgttccttccatgaatcgccttcttcaagatgcctctcgtagaagcaaatctcaccatcaccaccaccatctccatgggacttgacgatgatcgcagagatgcttctggtcccataacgcccctgtatctccatgagtgagactgaatatttatggaaagtgttaaacaaacaatcaatgtactctaaaaaaggaaggttacagttggtctctgcatgtcgacgaagatggagctgagatggtattccgtctctggtgtgaaaacgtgaggtagctcggtttcttcgtccttgacagtattggtcatcacctcctccaccatggtcttcaccgggaattcaccgctcccgttctcagccagaagctgttggaaaccctccctcagcctcagacactgcagagacaaaaacacgcaattgggggagtctgcaaaaggtaaataaagggagaaatggcccacatttacttaccttgggccaaggggagtcgaggttggcgttggaaaggacatggatcccgggagagacttgcgtcacgagcttgtcaccgtggggtggtcggttggtaatgtaaatcatggatttggacaagacatgagcgacaaccaggttaaagccattgtagagtgaaatttcgtcttggatctcctcggcaaactcggccggactcttttcgctctgttctcaccaaaacgttaaaagtactctcagtctctaacatgagagacaatctaaagcatattaggtggtggtgtagacctgcaagtaacgaagaggcagatctccacgggatttagcagcagggaaggaggaggcttccttgaaattggtgaggaaagccagacggccatgcctcgtgcagcccagccacgtcccgccgccaacaaggtctcttcctcccaccgtctctccgtcttcccaccaacgcagcgcctctgtcgcccttgacaatttacacaaaagattagtacaatctcatcaaaggaaacgattacagaggggattgaatcacctgttgtgatcttcatctctgttgagaaatagaagaaaagggtacagcggatgcgattgccacagaaatactgctatgcacattctcttctcctccgacgaaccaacgaaccaaccatctctctgctctaatcaaagtcgtcgtctcttttttttttttttttctccgtcttctacttaaagaaactgcgtgtagtttttcttaccacgaaacggcagcacgtgcaggttttaacaaacctctcgattgattgatttgctttaaagaaagctcgccggcgatgtggtaatatcagtcagatccagatgacgacgttctctacatgcgccgcctttttatcgctggtacctagcttgattgttctctctccgttcgatatgattatctatatttacttagctcgtcctggaattcgcactactctcttaaaatggatcatctgatcaaattgtgccttaattttttgacatgtcgacgatttgcaggtagtagtgctacatgctgttcatgtcggtggagccattttagagtcacaagcaccgtaatgatacatctccttgaagcttgtcttttggctacactgtttctattttatttttatactcttttcttctttttgccatgatgtttccttatgcagccacagagaacttaaagcttatcgtccgctgcaagataataatctacaggtcccattctcctcttgttctccagataacttatttggttcaaatatcagactttgctgtgattaagtttttgttatccacttttgcctttaggaggtgtatgcttcctcagctgctgcagtgcactacgatccagatctgaaagtaaggctgcagtcctctttctctgagtagtgaatacaatttgtatgcttcctacttctaataaagctgttatctcaggatgtgaacatagttgcgacatacagtgaccattacggcaatatacgccttggtagggtgaaaatgggggatctttcaccttcttgggttttggagaatcctgcctatcaagttagccgcaaaacaaaaggttcgcaggtaccaaacatttcatgttctggtttttagttttaatgagatttgatcatcagtttaagaatagaactgtatatcctatgggcatatggagttctatagtagaaaacttaaagtgtgtgaagtgattacttaccactcttctcaccgagcaaaaaatacctctcatgaacttcatttgttctaaccttgtgtttcttgaatttatccttaagcttgctcatattctttgttctctagttgctgacatttttttgtatggaattagctagttataccacgggattcatttcaaaatgatactggaatggaagataatgcaagccattctacaactaatcagactgatgaaagcgaaaatcagtttccaaacgtggattttgcaagcccagcaaaactgaagcggcaggtgatctgtcaaatagccttcttttctaatctctggatgccttaacactatatgactgagattgtaacaactgtagaccctttcagattttacgtcaggaaaggagaggtcaacgaactttagagctgatccgacaagaaaaggaaactgatgagcagatgcaagaagcagccattcagaagtcaatgagctttgaaaactcagtcatagggaaatacagtatatggaggagagactatgagagcccaaatgctgatgctatcttgaagcttatgagagaccagatcataatggcaaaagcatatgcaaatattgccaaatcaaaaaatgtaaccaatctgtacgttttcttgatgcagcagtgtggagaaaataaacgtgttataggtaaagcaacctctgatgctgaccttccttcaaggtacttttttacattcctcttgtcagcaatctttgtgggacaacaatctttgttgaaactttttccatcccattttctttgctagcgctcttgatcaagcaaaagccatgggccatgcactctctcttgcaaaagacgagttatatgactgccatgaacttgcaaaaaagttccgggccatccttcagtccactgaacgcaaagtagatggactgaagaaaaagggaaccttcttaattcagctagctgccaaaacatttcccaagccattgcattgcctgagtctgcagctagcggcagactattttattctaggtttcaatgaagaggatgcagtgaaagaggatgtcagtcaaaagaagcttgaagatccttcgctctatcactatgcgatcttttcggataacgttctggctacatcagtggtggtgaactccactgtcttgaatgcaaaggaaccgcagaggcatgtgttccatatagtaactgacaaactgaattttggtgcaatgaagatgtggtttcgcatcaatgctcctgctgatgcgacgattcaagttgaaaacataaatgatttcaagtggctgaactcctcttactgctctgttctacggcagcttgaatctgcaaggctgaaagaatactatttcaaagcaaatcatccttcatcaatctcagctggcgcagataatctaaagtaccgcaacccaaagtatctatcgatgctgaatcatctcagattctaccttcctgaggtttatccgaagctggagaagattctgtttctagacgatgacattgtggtgcagaaggacctggcaccactatgggaaatagacatgcaaggaaaagtgaatggtgcggtggagacgtgcaaggagagcttccacagatttgacaagtacctcaacttctcaaatccaaagatttcagagaattttgacgctggtgcttgtgggtgggcatttgggatgaatatgtttgacctgaaagagtggaggaaacggaacattacagggatatatcactattggcaagacttggtaaggcattggaaatttctcaaaagaaatacatataaatatttttggatgatgaatggatgtgtcaattaatatatgattgatgcagaatgaagacagaacactgtggaagctgggatcgttgccaccggggctgataacattttacaacctgacgtatgcaatggataggagctggcacgtactagggctgggatatgacccagcgctaaaccaaacagcaatagagaatgcagcggtagtgcattacaatgggaactacaagccatggctgggtttagcattcgccaagtacaaaccgtactggtccaagtacgttgagtacgacaacccttatctccgacggtgcgacatcaatgaatgaatgaagagatggtggaggtagtatacatgatgaagcactcaaaggaaactaaataagtaaaaattgttttcagtttaccataatactaggaatcagcagacaatcacacatgacgattaattaaatagaatctcttgtttttctcaaactcagaaaaactcaccaaaggaaactgaacaatcttttcactcggagtgttgttcttcacttgtttttttggtatcaacgtgactgaaaagcatatgggccttagaatgcgatgctttgtctatatacagtgtgtacagtgagtaaaactgccccgtgaatgcacataatgggccttacactggcccatcattgctttactctcctctctagctagcgacgagatgagtaaaacgccatctctcggagcggaacggctctgctctgctcttatcctctgtctgatccgtctccatcaccatctccgttctacaggtaaattgttttgcttcgcgctcctccgattgattattcactgatcagattctaataattataatcctgagtcctcgtttggttgatgttgaagcaccgcagatcctctttgaacttgttatttgtaagcttcttcttagtttctccttaatcgcagtgaaatggagattccggaggggacatcaaaagattcagaaaaggccaacgaacaagattcagtgtcatcaattggggcaaagaaacctccactggaatctccagccactactaatgctgcaagcggtcgacttgtttatgtccggagaagagtggaggttgacacatccaaagcagctgctagcactactaatccgaacccgcctcctactaaggcaccacttcaaataccttcatcacccgcacaggaaccaacccctaccagccataagttagactgggaagagcgttaccttcatcttcaaatgcttcttaacaagcttaatcaatctgatcggaccgatcatgttcagagtaagctcctcccagtatcactctaattcctaaccttgatgcttctgtttttttatatatatatatgtttccactgttattagtgctttggtcactttcctccgccgagcttagcaagcatgctgttgacttggaaaagaggtctattcagttctctctcgaggaaggtactctactcctttacttacactctctcacttcctaccattgctgaatcatatctgtttggcacagttctagttgaccatccataagtggattattcatgctgctgcttaagccattttttccatatctgctgacaactatagaggttttagtcacatgcttttaggtttgtagctaggaaccatctggaatcaagttcatgctagaaataatgttgttgatcctctgttgcagcgagagagatgcagcgcgtagcagctttaaacatgttaggaaggtctgtgaatagtctaaaatctacatcaaatgagtgaagggaaatgggcagcgtaagtgttgttagtactagtcacttggctttattagattgtcttgaatcatcttggtccctgttagactgatcagtagaaatatcttggtgtctatttccagaacacatgtggtggatgcggagaaagggcagtcagtaatgaggcagaaaggagcattatccaagatattgttacagcagtgattgtgactcgaagagaagatatatatttgacaggtatccatattttgttctagcctaagaaggattcataatctggaaatcatactattagtaaattattttggagagatgctcccacgagttaggagatttcaatagattagattagatccctccaaaggtcttgatgttaaactcctgagagacaactgtcgcaacgactgtcacttgggcttaagatcccattgcattctgtatctatctacttacacctgtacttgagacagcctaatactaccaagtccattgcattttctgttatccccctgttctatatatagatttgaagagatgagatttttaaattgctacaaaagagagagtctacaatttcgcaattatcaacaaaattatagagagagagagagaggcttttgacatttttggtctgtaagatatgtaaatagtagaaagggagggggagtgagtattttgcaaaagagtgtttgaaacttgaaaagtgaagtaaaataaggactaggaggggatgcatgcttataccattatgacatgttccttttggaatgggattctctggcttagctccgattcttcacaagctgataatcttttgggaccaacctgaagcccttcacacgacaggttatgagattttgatgggtttgctttatgggttaggagctctggtttatgcaactaggatcccagagagatggatgccgggtaaattcgatatagcaggacatagccatcagttgtttcatgttctggtagttgctggtgcgttcacgcactatagagctgggctagtgtatcttaagtggagagatattgaaggatgttgaagatgaagattagatggattctttgatgttttaaatcttgtttgtagtagcttcatatagaagttggattatgtaaagtcttatctgtaatcaaacgtttaattgtttcctttattcatcaaaaggattgatattgttaatctacatattactggttaaagaagctgaaggattcatatttttagatgagagatacactgtttattattgttttcaatatatgagaggaggaactcccatactatttttatttttttagccaatgagagagctccacttcataccccacttttaccaatcgtgccatttcacatccacaaaaatcattccttttaggatccacgcacctcattctcaaaaatccatcgcgtgtcttattttttgggttttcttctctaaaccaaagtaaaccgaaccgagatcaatttgaatttcaaaccaatgtaaacccataaaacccatctgtgaaaacaaaaagctcggccacaaaaatggagacgacacagaggtacaacttggaagagaaatcaattcgaaagagccaagagaatgtattttatcatcctaacggacataccgtatttcagccaaaatcaattcgaaaaaccgttaataaaccggctaaaaattgtaaccaaaaccagattcaaattgcaaactgaactaaaccggaaaacagagacttgtgaacctgagagcggtggtcgaggctgctgctgatatcaatctcggtgagccagattgggagctggagcgtagcgagtttatcgaggatggctctcatcagcgctacgtttggcgtcgtgaagtgaccctcgagaccgattccgtccatccttatgccgtcgtaccgttggagttccctcaccctggcgatgtattcgtcaaccgttgacttctcgtcgctgcaagtctccaccacgttgaaatcattgaagaacagagtcgccaacgagtcaatctcacgaaccgcggcgaagaacccgtacgacgttcttccccagtctgctctcgtagaagtcgaagtgaagcatctcgttgctcacgtcccaatgcacgaactctcctctgtaccgagtcattagactcttgattcgccggttaaccgccgaccggagatcttcgccggttagattacgaacccagtcgggattgtatttgggatcctcccagaatatgttgtggccgcgagcgatgattctgttagctctgacgagattcatcatcttatcagccaatgtgtagttgagtttgccttgatcggactccgtcgcgtaccatttcagctcgttctcgaataccgtggcgtcgaatctcttgacgaaccattcctaccaaaacagaatccgtttaaagaagcaaagacattgttgttttagtgtagactttagcgagtgtgttttacttggtaaggaatgtttccaaggatagttttggagatggcagatccaatggggaagtctttagagatctgctctactgtcacctctgctccttcaacgctctctccgttttcttttgacacgtgaattgtcactgctcgttttctcgcttgaaaatgagtgttaagagggaaccacataaagaatacagtttgcgattttgatgttagaaatgagtgtgtgtattatgcaacatggtaaactattattgtgtcgatagtcttcctagctagaagagttaggcagcgtgtcctgtttatcttaacagcggtacaagacaagtatgagttgcatttcagctacaagagagtacaagagattgtctgagattaaggcattgttttgtgatacatcagcttaagctatatcatcatcaaaacatgaagaatgctccatgtaaagagaggacaaggttgcagttattaaagaaaagttcttggtggttcttttgggaataaaagaattagattgagtggctacatgaagaaaggagatgtgtcacacgttttggcacactttcttaagagttatgtcacagaaactcattcggatacattagaacgtgtgagtgaatcaaagaaacagtgaagagcatgcagcataactcatagaagagaagctgagcttacaaagacaaagtgacatccttttttttagtttctggtgaagctatgttcatggaggttgtcttaggtatgtagctcaatggatgagtcaaaaggctgcagaaaatgtttgataaagattcatggaagttcagtttaccaaaagaaaggaaagccaagaataactggttatgaacaagttcaaaggttataaatctgtgggtaaaaggactcttacggatttgtttgaaggtcgttgattggttaagatattcagaaacgaattgcagatctctagagaattgcaggttttcgaaactaagttgcagatcctagaataagttgcaggattctgaattattatgttttttagggctgagtaagctaagaagaggttattggagtgattcagtgggattcttagaagaagaaaatggaagagacaagtgcaagtgctgcatgaactgtctcaaggctactcacttcaataatgtgaaagtgtcatgtatctagtttgataaacgacacatctcaatgctggtggcagtggctgaaaagaagctctagaaggaagcaaatgcaagaaatttaaactgcatttagaagacagtaactaaggagtttgagttagctgtctgcatcatgagaagattacataagtaactactcaagggaaattcactcgcaggttagtcaagtgaacggtttttcaaagtatcagagaatcataaagaagacaaaggctctagtaccaatttttctgttatccacctgttttatatatagatttgaagagatgagatttttaaattgctacaaaagagagagtctacaatttcacaagcttgtaccaatttcagcaaaatgattggacaaacttgtaccaatatatttaacatgtttagaaaatattcaactcacttagtttgatttcttcagctgcgattctttgaatcaagttttcagttataagcttcaacctgtaaaaatggctgcagaacaaaatgatgaggaaattttttagtatcacaaagtccagattcaagttttttttcaattgtatctaaaacacacacaactttcagattgaataaaatctgaatttcattctcagcaggggctaatataaaaatgacaaaaggagaggaggaggataggagctatatgtctactatttttagttttttagccaatgagagagctccacttcataccccacttttaccgatcgtgccatttcacagtcactctcacccatgtcgcgttgagcgcgtgtctacgatttctaaagggggttaatccacaaaaatcattcatttttcgatccacgcacctcattctcaaaaacccgtcgcgtgtcttatttttttttgttttcttctctaaaccaaagtaaaccgaaccaagatcaatttgaatttcaaaaccaatgtaaacccataaaacccatcgctgtttcactttcactatccaattccaacgaaccagattgataattttgattcgattccacacagagatcataatctaaaccaatgcgattaataagagagccaaatcttacagtatagcttaaaatcttagctaaatcccaaaaacacgagattctaggcgaaaagagaagaaaaaaaaattgccagaatgcataaacagcagaggccagaggcctccattttcaccggagtgacaaattccgggattacttcctggtcggaggtgaagagtcggagtgaaacggcgacgtttatacgtgggccataaatgggctttgacggaactcaaattatattaaaagtatatttagcattcaagtaattaatttagaaattcatttgtttctgtaaaatatatatatttgctgtaaacaacgattgtgattctggtttctggatacttataaagcttttagaaggaaaaaaaattcaaataaattgtaaaaaaaatatatgtaaatgatatttatccttttaatatttttgagcattatggctcagatttatatggaaataattagttagagagaactttaattagtggaaattctcaaacgattatattctatacataaatcgtgtgcattaataacctgacttcaaagttcaaagtcttaacacttgccataaatgtttcgatagtaatatcaattttatattaggagaaaaactaaaaactatgttaaatctgtgtcagaattataataatccctttatcttaccatacatttagttgactcacatttttacttcatcacccaactgttctcagagttttactgaaatttctcatcatctctaatcactgcattgtagattctcagtcacatgacatcatctccgatgggaaaacacggcgggtcaaagactagaaccaccgtttgtttatcagatggtgttatctttctcgccggagctttcatgtctcttaccctcgtctggtcttacttctctatcttttcaccttctttcactttcaccttcaccggtttacgtcacggctgcgaatcggttcaatgttccggtttaaacatgcaattagaccctcccgagcccggtttttacgacgatccggatctaagctactcgatcgagaaatcaatcacaaactgggacgagaaacggcacgaatggtttaaatcacacccttcattcaaacccggttcagaaaaccggatcttaatggtaaccggttcacaatcctcgccgtgtaaaaacccaatcggagaccatttgttactcctccgatgtttcaaaaacaaagtcgattacgctagaatccatggtcacgacatcttctacagcaattctcttcttcatccgaagatgaattcgtattgggcgaaacttccggtggttaaagctgcgatgcttgctcacccatttatggattgaagctttaggtaattttctcaaacacatttatggattgaagctttaggtaatgaatgagctgaatttgcatataaaaaatcgatactttcattttccagaacaaaccaagatttagcataaatgttcaaaattgaaactttgattcctaacttcttggaatgattcatattgagctagatttagatctgtatgattgatatgatgggtttggtttgtttatgagtagagagaaaatgggtgatgaggcagagatcaaggaacatttaaagccacaagcttcatctgaaacaatagacaagaaacataatgtgaaagggaagaggttatggcagaaagtcaagtatcaattggtggagtttcattcattgcctgcttatttaagagacaatgagtacatcattggtcattaccgatccgaatggccgatcaaacagattcttctcagcatctttaccattcataatgagactttgaatgtttggacgtaagtgttgaatcatgtttcttgatgtatccttgtttaaagttcaagaaaccttgagtgtgtttgtgtgtgtgtgttctttgggatttgcaggcatttgattgggtttttcctgtttttggcactcactatatacactgcaacgaaagtaccgagtgtcgtggatcttcattcgcttcaacaccgtttacccgatttgttgaggaaaacagatctccacaaacttcattctgagctcatgtctcgccttccttctagtccatctagttggcatgtgatggaccttctttataactgtttgcctgaaagattttctcatggcaactacactgacatgtgtgttctggtaagaaaagactcaatctttctctctattcctgcagattactgtttcaaaatgtggccaagttcatgtctttgtaattgcattgcagcattctgtgagggaagatcttgcaaacttgatagctcctttgatcttcaggccaattactcgatggccgttttatgcatttctaggtggtgctatattctgtctattagcaagcagcacgtgccacctcctctcatgtcactccgagcgagtctcctacataatgcttaggcttgattacgccggcatcgcagctctaatagcgacttccttctaccctccggtttattactccttcatgtgtgatcctttcttctgcaacctctacttaggattcataaccatcttaggaatcgccactgtgcttgtttctctcctcccggttttccaaagcctggagtttcgggtggtgagggcgtctctgttctttggaatgggattctctggcttagctccgattcttcacaagctgatcatcttttgggaccaacctgaagcccttcacatgacaggttatgagattttgatgggtttgctttatgggttaggagctgtggtttatgcaactaggatcccagagagatggatgccgggtaaattcgatatagcaggacatagccatcagttgtttcatgttctggttgttgctggtgcgttaacgcactatagagctgggctatgagagatattgaaggatgttgaagatgaagattgaagattagatggaatctttgatgttttaaatcttgtttgtagtagcttcatataaaagttggattatgtaaagtcttatctgtaatcaaacgtttaattgtttcttttattcaacaaaggattcatattgttaatctgcatattactggttaaagaagctgaaggattcatatttttagatgattccagtcttgattgcagcattcaaagtatcataatctagtgtcaacctcatataagcctccttgtgaacctgacacaagcctaactggttccatcgcagaggatactttggttctgatcttcttcttgaagatttcccctgactagttggtatacatttcgaatgatccataagtgttgataaactacaagtacacaagtaactactcaagggaaattcacttgcaggttagtcaagtgaacgttttttcaaagtatcagagaatcataaagaagacaaaggctctagtttgagtctggaaattgttaatgatgatggtactaagttctggtggagtttgcatgtaagacaaagcattgcagactgaggttacagcaggaagtgcatctgggttcaatggttgatgtgtaagttgctgtaaggacgtgtctcaaggatatcacaacggtttgttgagatgagacagagttaaagataactagtagtggttaagaatacagtgttaattattgttttcaatatatgagaggaggagcttccctactatttttatttttttagccaatgagagagctccacttcataccccacttttaccaatcgctagatttcacagccactctcacccatgtcgcgttgagcgcgtgtccacaaaaatcattctttttttgatccacgcacctcattctcaaaaacccaccgcgtgtcttatttttttttgttttcttctctaaaccaaagtaaaccgaaccgagatcaatttgaatttcaaaaccaatgtaaacccatcgctgtgaaaacaaaaagctcggccactgtaacaacaaaaatggagacgacacaacttggaaaagaaatcaactcgaaatagccaagagaatgttcgaaaaccctctcaaatccgatgcttcctttgattccaacctccaaaagcccatctgctcaaatcttcatttcgaggacgaggactcgaggagtattacaaggtacctctatagaatcaatggcttccatggtttttgaaactttacttctaataaacaccattgtaatgtcttgttgtgaaattgtgtaaggaacaaaggatagtgaaagctgaagagtgggcagagtttttttttgactaagtggcctctgtttttgattcttcagtggtcaattttgtgatgggatttgattgaaattggagaatgatttcatgaaatctcttcgggctgaggttgattcatgactctttcatttttctagtgtctcattgatgatagacataagaagcactcagatgttggtttttgttttccatacttaaggccatagagagtggtgaattggaggcaatcaagcctttgccttggtaccctaagaatcttcacttttctagtgtctcattgatgatagacataagaagcaccattgctgaatcatatctgtttggcacagttctagttgaccatccataagtggattattcatgctgctgcttaagccattttttccatatctgctgacaactatagaggctttagtcacatgcttttaggtttgtagctaggaaccatctggaatcaagtacttgctagaaataatgttgttgatcctctgctgcagcgagagagatgcagcgcgtagcagctttaaacgtgttaggaaggtctgtgaatagtctaaaatctacatcaaatgagtgaagggaaatgggcagcgtaagtgttgttagtacttgtcacttggctttattagattgtcttgaatcatcttggtctctgttagactgatcagtagaaacatcttggtgtctatttccagaacacatgtggtgaatgcggagaaagggcagtcagtaatgaggcagaaaggagcattatccaagatattgttacagcagtgattgtgagtcgaagagaagatatatatttgacaggtatccatattttgttctagcctaagaaggattcataatctggaaatcatactattagtagtttattttggagagatgcccccacgagttaggagatttcaatagattagattagattcctccaaaggtgttgttgttcaacgacgtcacttgggcttaagatccccattgcattgtatctatctgcttacatctgtacttgagactcagcctaatactattaccaagtccagtgcattttatgatatccccctttttttaatatagatatgaagagatgagatttttaaattgctacaaaagagagagtctacaatttcgcaattatcaacataattatagagagagaggcttaagagaggagcattgtttggatgtttgattaatgatgatgatatgactacaacaacaacaacaacaaaaaaaaaagtatgtgtgtatacgtggacgattattattaggttgttgacttcagctgtttccgtttagttattaaagagctccgtgatgtcatccaatttctttattatatactatacacactttcttatttatttatctaaactcatttgctgtacaattttttaagaaaactcccattacctagtttttatcttgttaaaagacttatcccaacgtaatttcaaaattaggattgtggttaatggatgcacatatctcacaaagatttgaaatacgatttttatgaagcattatttcaagtaaattcatttgatttgttttacttattaagagattccttactactccggactaattcgataaaaggaacatccatatatgtataatacatatttctggatctttaataatgagactaagattaaaaaattattatttatagatctttggtattaatatttaataatgaaactaagattctgacaggttgctgatgtcatatggagaaagattcggacagatccatcattgatctcatcaactcacacccttaattatgcaaaaataatagtttgagagaccactgcttttgtgcaaggcacgtaaacgagattgtcaataaaaaggaagattggatatacaattagtaacctctaaaatcaactattgatccttttctatactcgcatgctcttaagtcttatacactctcctcagattaacatcccatttagatcaagtctctataaatggtaaatatcacatttagattcactttataaagcaaaagcattaacgaatccctcttcttaattatggaaacatatagtatactgcaagtagctagctaggtaggcagtagccacctcttatataagaatctttagtttattattatatatctgccttttatatattgaactaaaaaagctaacacgtacggtaatcatctgcgtactaatttatggtaaattataaatttatcgaaaaaaaaaaaagaatgtttagttacaaactgttttcgacccaaaggaatcaagtatatttaaaaaaagagaagaaagaactaatcaagtaaattatgtgaagtttttggaatcgaaaataaagaagtgtgggtcatgtccctacaaaagcaacattttgctactaatcttctaacattaattagaataacacgtatgatgagtaaggttgataatgatgctgctgaaccattatttctgaggatgcggagaatcgatgagaagcttggcatttgaggggctttggcttccagtaactctcaagagtcatcacactagttattttgactttgataacgcacactaataagtgacctctctctctctctcttcttttcttatctacagtacttttttttggtttaccatctgcctttctgtcattggcttcttcagaaacaatttctaaatttgcaataaagagtgtttgaaacttgagaagtgaagtaaaataacgactaaggaggggatgcatgcttataccattatgacatgttccttttggaatctttcatggaatcacccttgattagtgattatatatgtattttttttaaagtattatcgtgaagccctagctttcgttgcctttataacctatagtaggaaataaaaaatgaatatatagtaagtacatcgactcgagtgcttctgatacaatcaatataaaccacccaaccctcggagattcagaactttggatttttgattatataaaatttgaatagttaattagtatttatggtgggaccttttaaaaagattctgcacgctcacaaccaaagattccctccatcttcttcttcttctctggatccagttgttgatgattcttcaagaaaacaaacaaggatcatcctctcttacttgcttcatctctctctctctctacacattacatattctctctgtcttttacatttttttgtgtgtatatattgttcttgttatctttgatatataatatttgtaactggccgatatatgtaatggattagatagattcagatgaggtcggctccaaatccatccatcaaacatttataaaaaaaacaagctatggggtttgaccttgtgggcaattgggtttttattttagctgctgacttatcccattttggcagctcttctgtttgacataatataataaaaagggagggagtcgttggcgtttgatattgaacaaccaaggaaggagagcctatcaaaccacatgcttgcatcatctcttttagccaactctgcctcataattactttctataggaggccaagctttccttcttctttctctatttgtctgatcagtttggttcatcaaatcccttttctcccatggaagaaagcaacaactcggccgttgtggattttcctgacaactttatggaccagctcttgtgggaggagtgctgggaagaagaggcaacgcagcatgaccaggcattatcatcaccatcagggctgaaggagagggtggcttgcgccatggggcacctgcaagaggtgatgggagagagggagttgctgatccagctgtgggtgcctgttgagacaaggagcggccgagtgctgagcacggaggagcagccttactctatcaacaccttctcccagagccagagcctggccctctaccgagacgcctcagctggctacagcttcgcagcagaagttgggtcggagcagctggtggggctgcctgggcgtgtgttcctgaggagaatgcctgagtggaccccagacgttcggtttttcaggaaggaggagtaccctcgcattggatacgcccgcaggtaccaggttcgagccaccctcgccctcccactcttccaaggaacgtccgggaactgcgtggccgtgatggagatggtcaccactcaccgcaacttggagtatgcctcccaactcagcaccatctgccatgcccttgaggtcatttttgaatcttaacctaactcttactcttggttgatgattaataacgtaaataagattacattgatgaaaagaaaaaaaaaaagattacattgatgaataaagtcagcctgattgagtctttataattcccatgtaagaaatggtaaaaatatacttacctggcaatattcttgtcactgcactgttggaacactgctcagcattgactagttcccatgtctttgcattattattattagttatttggttgacgtaagcaacctttgaagagcttcaatggttaacatccgttactttatataaacactaaatatattactcacaatcggaatttctctctcgcaggcctttgatctcaggacttcacaaacctccatcgttccagcctctctcaaggtcacctcttcttcttcttcttcttcaagaacagaggtggcctctattctccaaggcatctgcagttcacacggactccctctagccgtcacgtggggtcaccaagactcctcatcctgcctttcggctctaatatcggcctcttacgccgctgaccacggcagccgctgcttcctggccgcctgctcagagcaccatctactcgggggcgaaggaatcgctggaagagcttttgctaccaagaaacagtgtttcgcaacagatgttgccatcttcagcaagtggagctaccctctctcccactacgccaagatgttcgacctccacgctgctcttgccgtccctatcctgacaagaggcaaccgcaccgtccaatttgttctcgagctcttcttcccgagagactgtcttgacatccaaactcatagtctgaccctcgcctcccaactcaagctacgcttccagagctcaccacatctgatggtagacgacaaccaaattgcagaggaagtgagagacgcagccacaccacccctgacacaagaggatcccaagggcaaacaagtgtcgttttccttttcttctgcttcctctctcgagaaccgaaaacgcaagacaaaggctgaaaaggatatcactttggacactctccgacaacactttgctggcagcctaaaggacgccgctaaaaacattggtggtgcgtcagagtttttataaaatttgaattgatatttacatattatgatgatgatgatgatcatgatggcattacatattgcagtatgtccgacgaccttgaagaggatatgcagacaaaacggaatctcaaggtggccatcgaggaagatcaagaaagttggacattctcttcgaaaactgcaggtggtgatggactctgttgaaggagttcaaggctctctccatctcgcctccttctactcaagtttccctcaactacaatcttcttcttcttcttcttttcctttcattaacccaacccaaactgtccatgtgcctccaaagtcaccaccttcgtcatctggcagccagagctcgtcaggttcaagcacttgttgctcctccgaagagcaacaacttggtggcttccaaaaaccagctctcagtcatccacaactgcttactctaagcagcatgcacgaggaccaaaggcctgttcgtgtgacctcatccctacccccactgccatccgcaactactccaaggaaagcaaaggacgggatgaaagtgaaggctatgtttggagattcgatgctgagaatgagcctgcttccacactctcgtctcacagacctcagaagagagatcgcaaagcggtttgggatggatgatgttttgagaagtaacttcagtctcaagtatctagacgatgatcaagaatgggttctcttgacgtgcgatgctgatcttgaggagtgcatacaagtctacaagtcctcctctcttaaagaaactatcagaatattggttcaccatcctctttctcgtccttcctttggttcttaactatatcctaaaaccttttggctaattccaccatcgtcaccacatctatttattttggcttggtttgtatatctttttaacatatgcaacatacttgtttgatctaaatgtattcgttagttgttgacttcttgtgatcccatcttttcccccttcaaaaactatataagatactagctttcattgaggctattatgattttgtaagaaacattatctataataatctacagttgcattgcatcttcagtttcttttctgtttttgttctttagctataaactctttaatttttcatgtttttcctaaaccttttttactcgagttaagaaagtgtaccaacatgccatactttgggccatgggcctatcacttaactttcatacaaaggacatccagtgatcactatttgagtttttgacattgtgtgatacatttgaaggaaaggagtaatgtttaaggttgagttaacatgtaagagagtctgtggagttactcagttcagtagggaagaggaagcttcgtctgtctgctgctgctcgatgtccaagttcagctgcggcgggccagctaaactcagtatgacctgaaattcacaacaagtgcctaatcaatcacccatcttactgtcatataagtagatgctagcagataaatccagcttaacttacaggtaagaaaacgagcccatgcaagaagccgattataaccaaagccaagtacatttggaagtaatacacctgtatgcaccaatacatatccatttgaatcaactcaaacaagaggaccaagaactgctcaaggcatcggatttgggtatccttaccacaaatatctcagatcttgcaaagcaaagcacgatcactccaacaagttttgtgagtgtgatcccactgtccccaacaacatattttcattatcaagtcccacaaatatgaccactaaaccagttagacaaacgcctttgcataccaaaaaaaaaaaaattgctatggagaaaataaaagtgtagcaactagcaagtgatcgcaagtttcatcacctgaaaactgaagctcccatggtttccagtgcctccctcgctctatgttctctgtccccactactcatctgcatttgaagcagtgcaggaaataaacatattatttttcagaacagatccatgcaaggtcgaaaggaaacatggcttgttctgcatccttatatccacttaaccaataagtagttgacaattgtgaggaaggctgttctgctactacatggctacagattgtagtgccaatatatgcagtatagtgttcggggtaaggttgcaaaggggcatggcttgttcttaccaggaaagcatgtgatatgtgcacgcagaattc

SEQ ID NO: 683 - DNA, 93760 bp, Arabidopsis thaliana
gaattccaagctgcattacagaatctggcccaaccaggaatacacgtcttgttgtctggattcgaaacaccactactcctttatatgctgttcgaggcacaccatcctacacaatcaaaggggtacaaaaaaagtgacccatttggacctacaattattgaagattatagttcaatcatctcaaatttaccttccattcttcaaatataccaaattcccctgcaatgcgttcaaactctacttggtctttataccggatacgaacatcatcctttatgttttgagcctttaagacaaggtcagaaccttgaattggtcgtgcttgtctcactaagccagaaaagtacttggtatagtttccctttgatagacatgagagaacaggttaaaaactacatttctccactcaaaacatgcaaaatggtataaaaaaaaaaggccggagttctgtaaatgttacctctgtcaggtatcccaggtcctttgctttccagtcaacctttatgaatgaaataggaaaccagtgaaaactagtgatgcaacaaaagggggtaaaaaacacacttacgcttaccgtcacatcgtttagctttataggttccagatactgactgaaaaactgtcccaaactagacccctgccaaattaatataacaaggttatggataagtatgaaatgcaaaaatatattatgtggtattgactgtctacatccatgtgtcgggaaactataggacgaagctgcaataatacatttttcatacagaaagcagaagtcatatgcagcgaacataggtcaatttaacagcattacaaaaacagacttgtaaaactatgatatataggatagcataatcgggtactaacatgttcaccaaaattgtatgttctacagacttccggtcgaatgaattggcggcctttatggttttcctttagtctcagccaatcatcccagtaagtggatatttgttaagaaaagtcttagaaacgtcaaactatttttttttttagaatttaagaagcgtcaaactatagtcatcgagattgaaagaaaaaaaagcatataaggatatgcctttggccactttggtgataactcatcccaagtcgatctcttgagcatccacccaaggccaggaaaaaaatctgatcggtatagcgcatctgcagattattttagctcgcatgagctagacataatgaggtattgaaagaacaggcaagagaggaagcaaggtaaagaagaagaagaagaagaatcttacagggatcatgcacaaactgcttctgtccattatcattccatgatgaagcagccataatggttctaacacatgtttggaccagaaaagaatgagaaacagtaataaaaacatttgtatactctgtggaaacttatactataagagtctagcttcagtaggtaacatacttatccctatccatgagactagctgcagcctcaaagtaatcaaagaagtctggagcaatttccatatcatctgttaaagagacaagataacctctcttaagcaatactccacaaggtaaagacagcccctcttaaacaatacaacagcaaggtacgatgagtgtgaaaggttaaaaagcgccaccttctagtataatcactcgactaaatttgtgtttgtaaaacaactggtccagtgcccacttgtagtgacctgtattaaaaagtgtttcagtaatggagctggagggacgcagagaaaagagaaaccagtccttacgtgcaatcttgtagtacgcagtcagttcgccaggcctttcagtgaccactggttcaaaatccaagtgctgaaaaggggaaaacgagccttcatcctcatttatctacttgaacagtgaggagaaaaatcacgctagattaaattacctgcatatatgttaattgattatagctcaatgacttgctcttgacagcttgatcagatccatcctgtcagaaaatatgtcgttggaaaagaccatggttagtaattcgttgaatataaaacagtctaagagaccaccaccctgcaaattaagtacctgagatataaatagaggatattttgaagcaacgggagtttgatatctgtataaaaaaagaaatagccattagatagttcaatcaaaatgtggtataagaattaaatcagtatagtatctcacgttaaaactgatttaacagtcctttcaagatagtctgcacgactgcaggccataaccactacagcagccacaggcatctgctaaataaaaaacaagaaacaggttagatgtatatatatagcaagtgatagcagttacaaatacgaagaaaggcatcttcttatccagacctgtccaccttgagtgagttttgctattcctttttctggaggaagaaaataagcattagtagaaaaactaataaaaagaaagcaagaaaatgagttttacaggtgatagtaaggcactttcaaacgtctggattagatccttaagctgcacaagttcttcgtcctggcggttcttcatatctacaagacactcagaaatcaatgtataagtcttctactccatttagaaagttaattttgtatagtattcaataggttccaagaaccatggtcatctaggattccacaagtcccaatgaggaaagaagaaggggatataccttcgagggcaacaatccgcgactgtttgatgctaacttcatctatgaggcctcgcatttgactagtgcaatggttctcagattcgatctggagaaacaaatgaaaggctgtgtatagatcttcatcacacaccaggaaaaaatcgaaataccaaaggcaatgatatggtgtaatagtgcagatagtgtcttcttcttgaaagtagttcatgggcttgtaaagagccaaaaaatgggatttcaaaaggaactagtagcaatggtctaaagacaaaaggcagtggtaaaagtagaaactcacagcggaactgaggcgatctgcatactgtgattgcgtctggaaaagcctcatctagagaagagaagagaggataattacagacagatttaggttgcagcgatggaatcaatttcagtttcaacttcaaaaagcgagatcatcggatatagattgacctggatgtagatgaacatgaaagctgccgggatgagaagaaatctcaagtcacacgagatcctcgccatatcgacgacaaacaaccagatcaaaaccggtggatcttctggtgtttgccgccgggagggagctagctaataaggaagttgtttgaaacggcgtcgtgcgttataacaaaaacggtaccgtttcccagtaaaaatgataagatgaccatttcatttcatccataaatagagccgagcttcttcctctgtaaatctctgacaacaaaccaaaaaagagagtccaccaactctacacgcaattcatccaattatcttgctgtcgccattcgccaatatccatccccatcttcttcgatttctgagattcggtcgaaaatcatcagatgggttttcagaacgaagctagctcctcctcttatacccttaaaatacctccaccggccagagaggactcgcctcttctcggcaagggacctcccctctccagccagtttaagaccttcgccaacgtcttcatcgctgtcgtcggcgctggtgttcttggtcttccttacgccttcaagcgaaccggatggctcatgggtgtcctcctcctcgtctccgtctctgttttgacccatcactgtatgatgcttcttgtctatacccgccgcaagctcgactctttcaatgctggcatctccaagatcggctcttttggtgaccttggattcgccgtctgcggctccttggggaggatcgtcgttgacttatttatcattctgtctcaagctggtttttgtgtcggatatcttatcttcatcggcactactttagctaatctatccgatcctgaatcgcccaccagtctgaggcatcagtttacaaggctgggttctgaattcctgggcgtgtcttctaagagtctctacatatggggatgctttccctttcagctcggtttgaattcgatcaagacgctcactcacttggctcctctcagcatcttcgccgatattgttgatcttggcgctatggctgtggtcattgttgaggattccatgattatactcaagcaaaggcctgacgtggttgcctttggtggtatgtccctcttcttgtatggtatgggcgtcgctgtctattccttcgaaggcgttggaatggtcttgcctcttgaatcggagatgaaggacaaggacaagtttggcaaagtcttggctctcggcatgggattcatctctctcatatacatcgcatttggtatcttaggttacttggcttttggtgaggacaccatggacattatcactgctaacttgggggcaggacttgtcagcactgttgtccagcttggactgtgcatcaacctcttcttcaccttccccttgatgatgaatccagtgtttgagatagtggagaggcgtttctcacgcgggatgtactctgcgtggctcagatgggtactcgtcttagcagtgactctggtggctctttttgtgccaaactttgcagattttttgtcattggttggcagcagcacttgctgtgtgttaggctttgtgttacctgcattgtttcatttattggtgttcaaggaagagatggggtggctgcaatggagttcagacacagcgattgtggtactaggtgtggttcttgctgtgtcgggaacttggagttccctgagtgagatcttctctgtcaaagtgtgagcgtccgtgaagtcagagattggagaggtttttctctccttgtgtgcaattatgtatatggaattggttgtggttttaagagtaactgtgattgtatttgtattttgatggtttggaataaaagagatcagctctgtcttctgttttgtgtttacatgtacaacatatgtgagagttttgatttctcaatgttacaagcaagggaagctcgcgaaataagcctggctagctaatcaaatgctttggttttgtattattacaaactgttgagtgtgttccttccatgaatcgccttcttcaagatgcctctcgtagaagcaaatctcaccatcaccaccaccatctccatgggacttgacgatgatcgcagagatgcttctggtcccataacgcccctgtatctccatgagtgagactgaatatttatggaaagtgttaaacaaacaatcaatgtactctaaaaaaggaaggttacagttggtctctgcatgtcgacgaagatggagctgagatggtattccgtctctggtgtgaaaacgtgaggtagctcggtttcttcgtccttgacagtattggtcatcacctcctccaccatggtcttcaccgggaattcaccgctcccgttctcagccagaagctgttggaaaccctccctcagcctcagacactgcagagacaaaaacacgcaattgggggagtctgcaaaaggtaaataaagggagaaatggcccacatttacttaccttgggccaaggggagtcgaggttggcgttggaaaggacatggatcccgggagagacttgcgtcacgagcttgtcaccgtggggtggtcggttggtaatgtaaatcatggatttggacaagacatgagcgacaaccaggttaaagccattgtagagtgaaatttcgtcttggatctcctcggcaaactcggccggactcttttcgctctgttctcaccaaaacgttaaaagtactctcagtctctaacatgagagacaatctaaagcatattaggtggtggtgtagacctgcaagtaacgaagaggcagatctccacgggatttagcagcagggaaggaggaggcttccttgaaattggtgaggaaagccagacggccatgcctcgtgcagcccagccacgtcccgccgccaacaaggtctcttcctcccaccgtctctccgtcttcccaccaacgcagcgcctctgtcgcccttgacaatttacacaaaagattagtacaatctcatcaaaggaaacgattacagaggggattgaatcacctgttgtgatcttcatctctgttgagaaatagaagaaaagggtacagcggatgcgattgccacagaaatactgctatgcacattctcttctcctccgacgaaccaacgaaccaaccatctctctgctctaatcaaagtcgtcgtctcttttttttttttttttctccgtcttctacttaaagaaactgcgtgtagtttttcttaccacgaaacggcagcacgtgcaggttttaacaaacctctcgattgattgatttgctttaaagaaagctcgccggcgatgtggtaatatcagtcagatccagatgacgacgttctctacatgcgccgcctttttatcgctggtacctagcttgattgttctctctccgttcgatatgattatctatatttacttagctcgtcctggaattcgcactactctcttaaaatggatcatctgatcaaattgtgccttaattttttgacatgtcgacgatttgcaggtagtagtgctacatgctgttcatgtcggtggagccattttagagtcacaagcaccgtaatgatacatctccttgaagcttgtcttttggctacactgtttctattttatttttatactcttttcttctttttgccatgatgtttccttatgcagccacagagaacttaaagcttatcgtccgctgcaagataataatctacaggtcccattctcctcttgttctccagataacttatttggttcaaatatcagactttgctgtgattaagtttttgttatccacttttgcctttaggaggtgtatgcttcctcagctgctgcagtgcactacgatccagatctgaaagtaaggctgcagtcctctttctctgagtagtgaatacaatttgtatgcttcctacttctaataaagctgttatctcaggatgtgaacatagttgcgacatacagtgaccattacggcaatatacgccttggtagggtgaaaatgggggatctttcaccttcttgggttttggagaatcctgcctatcaagttagccgcaaaacaaaaggttcgcaggtaccaaacatttcatgttctggtttttagttttaatgagatttgatcatcagtttaagaatagaactgtatatcctatgggcatatggagttctatagtagaaaacttaaagtgtgtgaagtgattacttaccactcttctcaccgagcaaaaaatacctctcatgaacttcatttgttctaaccttgtgtttcttgaatttatccttaagcttgctcatattctttgttctctagttgctgacatttttttgtatggaattagctagttataccacgggattcatttcaaaatgatactggaatggaagataatgcaagccattctacaactaatcagactgatgaaagcgaaaatcagtttccaaacgtggattttgcaagcccagcaaaactgaagcggcaggtgatctgtcaaatagccttcttttctaatctctggatgccttaacactatatgactgagattgtaacaactgtagaccctttcagattttacgtcaggaaaggagaggtcaacgaactttagagctgatccgacaagaaaaggaaactgatgagcagatgcaagaagcagccattcagaagtcaatgagctttgaaaactcagtcatagggaaatacagtatatggaggagagactatgagagcccaaatgctgatgctatcttgaagcttatgagagaccagatcataatggcaaaagcatatgcaaatattgccaaatcaaaaaatgtaaccaatctgtacgttttcttgatgcagcagtgtggagaaaataaacgtgttataggtaaagcaacctctgatgctgaccttccttcaaggtacttttttacattcctcttgtcagcaatctttgtgggacaacaatctttgttgaaactttttccatcccattttctttgctagcgctcttgatcaagcaaaagccatgggccatgcactctctcttgcaaaagacgagttatatgactgccatgaacttgcaaaaaagttccgggccatccttcagtccactgaacgcaaagtagatggactgaagaaaaagggaaccttcttaattcagctagctgccaaaacatttcccaagccattgcattgcctgagtctgcagctagcggcagactattttattctaggtttcaatgaagaggatgcagtgaaagaggatgtcagtcaaaagaagcttgaagatccttcgctctatcactatgcgatcttttcggataacgttctggctacatcagtggtggtgaactccactgtcttgaatgcaaaggaaccgcagaggcatgtgttccatatagtaactgacaaactgaattttggtgcaatgaagatgtggtttcgcatcaatgctcctgctgatgcgacgattcaagttgaaaacataaatgatttcaagtggctgaactcctcttactgctctgttctacggcagcttgaatctgcaaggctgaaagaatactatttcaaagcaaatcatccttcatcaatctcagctggcgcagataatctaaagtaccgcaacccaaagtatctatcgatgctgaatcatctcagattctaccttcctgaggtttatccgaagctggagaagattctgtttctagacgatgacattgtggtgcagaaggacctggcaccactatgggaaatagacatgcaaggaaaagtgaatggtgcggtggagacgtgcaaggagagcttccacagatttgacaagtacctcaacttctcaaatccaaagatttcagagaattttgacgctggtgcttgtgggtgggcatttgggatgaatatgtttgacctgaaagagtggaggaaacggaacattacagggatatatcactattggcaagacttggtaaggcattggaaatttctcaaaagaaatacatataaatatttttggatgatgaatggatgtgtcaattaatatatgattgatgcagaatgaagacagaacactgtggaagctgggatcgttgccaccggggctgataacattttacaacctgacgtatgcaatggataggagctggcacgtactagggctgggatatgacccagcgctaaaccaaacagcaatagagaatgcagcggtagtgcattacaatgggaactacaagccatggctgggtttagcattcgccaagtacaaaccgtactggtccaagtacgttgagtacgacaacccttatctccgacggtgcgacatcaatgaatgaatgaagagatggtggaggtagtatacatgatgaagcactcaaaggaaactaaataagtaaaaattgttttcagtttaccataatactaggaatcagcagacaatcacacatgacgattaattaaatagaatctcttgtttttctcaaactcagaaaaactcaccaaaggaaactgaacaatcttttcactcggagtgttgttcttcacttgtttttttggtatcaacgtgactgaaaagcatatgggccttagaatgcgatgctttgtctatatacagtgtgtacagtgagtaaaactgccccgtgaatgcacataatgggccttacactggcccatcattgctttactctcctctctagctagcgacgagatgagtaaaacgccatctctcggagcggaacggctctgctctgctcttatcctctgtctgatccgtctccatcaccatctccgttctacaggtaaattgttttgcttcgcgctcctccgattgattattcactgatcagattctaataattataatcctgagtcctcgtttggttgatgttgaagcaccgcagatcctctttgaacttgttatttgtaagcttcttcttagtttctccttaatcgcagtgaaatggagattccggaggggacatcaaaagattcagaaaaggccaacgaacaagattcagtgtcatcaattggggcaaagaaacctccactggaatctccagccactactaatgctgcaagcggtcgacttgtttatgtccggagaagagtggaggttgacacatccaaagcagctgctagcactactaatccgaacccgcctcctactaaggcaccacttcaaataccttcatcacccgcacaggaaccaacccctaccagccataagttagactgggaagagcgttaccttcatcttcaaatgcttcttaacaagcttaatcaatctgatcggaccgatcatgttcagagtaagctcctcccagtatcactctaattcctaaccttgatgcttctgtttttttatatatatatatgtttccactgttattagtgctttggtcactttcctccgccgagcttagcaagcatgctgttgacttggaaaagaggtctattcagttctctctcgaggaaggtactctactcctttacttacactctctcacttcctaccattgctgaatcatatctgtttggcacagttctagttgaccatccataagtggattattcatgctgctgcttaagccattttttccatatctgctgacaactatagaggttttagtcacatgcttttaggtttgtagctaggaaccatctggaatcaagttcatgctagaaataatgttgttgatcctctgttgcagcgagagagatgcagcgcgtagcagctttaaacatgttaggaaggtctgtgaatagtctaaaatctacatcaaatgagtgaagggaaatgggcagcgtaagtgttgttagtactagtcacttggctttattagattgtcttgaatcatcttggtccctgttagactgatcagtagaaatatcttggtgtctatttccagaacacatgtggtggatgcggagaaagggcagtcagtaatgaggcagaaaggagcattatccaagatattgttacagcagtgattgtgactcgaagagaagatatatatttgacaggtatccatattttgttctagcctaagaaggattcataatctggaaatcatactattagtaaattattttggagagatgctcccacgagttaggagatttcaatagattagattagatccctccaaaggtcttgatgttaaactcctgagagacaactgtcgcaacgactgtcacttgggcttaagatcccattgcattctgtatctatctacttacacctgtacttgagacagcctaatactaccaagtccattgcattttctgttatccccctgttctatatatagatttgaagagatgagatttttaaattgctacaaaagagagagtctacaatttcgcaattatcaacaaaattatagagagagagagagaggcttttgacatttttggtctgtaagatatgtaaatagtagaaagggagggggagtgagtattttgcaaaagagtgtttgaaacttgaaaagtgaagtaaaataaggactaggaggggatgcatgcttataccattatgacatgttccttttggaatgggattctctggcttagctccgattcttcacaagctgataatcttttgggaccaacctgaagcccttcacacgacaggttatgagattttgatgggtttgctttatgggttaggagctctggtttatgcaactaggatcccagagagatggatgccgggtaaattcgatatagcaggacatagccatcagttgtttcatgttctggtagttgctggtgcgttcacgcactatagagctgggctagtgtatcttaagtggagagatattgaaggatgttgaagatgaagattagatggattctttgatgttttaaatcttgtttgtagtagcttcatatagaagttggattatgtaaagtcttatctgtaatcaaacgtttaattgtttcctttattcatcaaaaggattgatattgttaatctacatattactggttaaagaagctgaaggattcatatttttagatgagagatacactgtttattattgttttcaatatatgagaggaggaactcccatactatttttatttttttagccaatgagagagctccacttcataccccacttttaccaatcgtgccatttcacatccacaaaaatcattccttttaggatccacgcacctcattctcaaaaatccatcgcgtgtcttattttttgggttttcttctctaaaccaaagtaaaccgaaccgagatcaatttgaatttcaaaccaatgtaaacccataaaacccatctgtgaaaacaaaaagctcggccacaaaaatggagacgacacagaggtacaacttggaagagaaatcaattcgaaagagccaagagaatgtattttatcatcctaacggacataccgtatttcagccaaaatcaattcgaaaaaccgttaataaaccggctaaaaattgtaaccaaaaccagattcaaattgcaaactgaactaaaccggaaaacagagacttgtgaacctgagagcggtggtcgaggctgctgctgatatcaatctcggtgagccagattgggagctggagcgtagcgagtttatcgaggatggctctcatcagcgctacgtttggcgtcgtgaagtgaccctcgagaccgattccgtccatccttatgccgtcgtaccgttggagttccctcaccctggcgatgtattcgtcaaccgttgacttctcgtcgctgcaagtctccaccacgttgaaatcattgaagaacagagtcgccaacgagtcaatctcacgaaccgcggcgaagaacccgtacgacgttcttccccagtctgctctcgtagaagtcgaagtgaagcatctcgttgctcacgtcccaatgcacgaactctcctctgtaccgagtcattagactcttgattcgccggttaaccgccgaccggagatcttcgccggttagattacgaacccagtcgggattgtatttgggatcctcccagaatatgttgtggccgcgagcgatgattctgttagctctgacgagattcatcatcttatcagccaatgtgtagttgagtttgccttgatcggactccgtcgcgtaccatttcagctcgttctcgaataccgtggcgtcgaatctcttgacgaaccattcctaccaaaacagaatccgtttaaagaagcaaagacattgttgttttagtgtagactttagcgagtgtgttttacttggtaaggaatgtttccaaggatagttttggagatggcagatccaatggggaagtctttagagatctgctctactgtcacctctgctccttcaacgctctctccgttttcttttgacacgtgaattgtcactgctcgttttctcgcttgaaaatgagtgttaagagggaaccacataaagaatacagtttgcgattttgatgttagaaatgagtgtgtgtattatgcaacatggtaaactattattgtgtcgatagtcttcctagctagaagagttaggcagcgtgtcctgtttatcttaacagcggtacaagacaagtatgagttgcatttcagctacaagagagtacaagagattgtctgagattaaggcattgttttgtgatacatcagcttaagctatatcatcatcaaaacatgaagaatgctccatgtaaagagaggacaaggttgcagttattaaagaaaagttcttggtggttcttttgggaataaaagaattagattgagtggctacatgaagaaaggagatgtgtcacacgttttggcacactttcttaagagttatgtcacagaaactcattcggatacattagaacgtgtgagtgaatcaaagaaacagtgaagagcatgcagcataactcatagaagagaagctgagcttacaaagacaaagtgacatccttttttttagtttctggtgaagctatgttcatggaggttgtcttaggtatgtagctcaatggatgagtcaaaaggctgcagaaaatgtttgataaagattcatggaagttcagtttaccaaaagaaaggaaagccaagaataactggttatgaacaagttcaaaggttataaatctgtgggtaaaaggactcttacggatttgtttgaaggtcgttgattggttaagatattcagaaacgaattgcagatctctagagaattgcaggttttcgaaactaagttgcagatcctagaataagttgcaggattctgaattattatgttttttagggctgagtaagctaagaagaggttattggagtgattcagtgggattcttagaagaagaaaatggaagagacaagtgcaagtgctgcatgaactgtctcaaggctactcacttcaataatgtgaaagtgtcatgtatctagtttgataaacgacacatctcaatgctggtggcagtggctgaaaagaagctctagaaggaagcaaatgcaagaaatttaaactgcatttagaagacagtaactaaggagtttgagttagctgtctgcatcatgagaagattacataagtaactactcaagggaaattcactcgcaggttagtcaagtgaacggtttttcaaagtatcagagaatcataaagaagacaaaggctctagtaccaatttttctgttatccacctgttttatatatagatttgaagagatgagatttttaaattgctacaaaagagagagtctacaatttcacaagcttgtaccaatttcagcaaaatgattggacaaacttgtaccaatatatttaacatgtttagaaaatattcaactcacttagtttgatttcttcagctgcgattctttgaatcaagttttcagttataagcttcaacctgtaaaaatggctgcagaacaaaatgatgaggaaattttttagtatcacaaagtccagattcaagttttttttcaattgtatctaaaacacacacaactttcagattgaataaaatctgaatttcattctcagcaggggctaatataaaaatgacaaaaggagaggaggaggataggagctatatgtctactatttttagttttttagccaatgagagagctccacttcataccccacttttaccgatcgtgccatttcacagtcactctcacccatgtcgcgttgagcgcgtgtctacgatttctaaagggggttaatccacaaaaatcattcatttttcgatccacgcacctcattctcaaaaacccgtcgcgtgtcttatttttttttgttttcttctctaaaccaaagtaaaccgaaccaagatcaatttgaatttcaaaaccaatgtaaacccataaaacccatcgctgtttcactttcactatccaattccaacgaaccagattgataattttgattcgattccacacagagatcataatctaaaccaatgcgattaataagagagccaaatcttacagtatagcttaaaatcttagctaaatcccaaaaacacgagattctaggcgaaaagagaagaaaaaaaaattgccagaatgcataaacagcagaggccagaggcctccattttcaccggagtgacaaattccgggattacttcctggtcggaggtgaagagtcggagtgaaacggcgacgtttatacgtgggccataaatgggctttgacggaactcaaattatattaaaagtatatttagcattcaagtaattaatttagaaattcatttgtttctgtaaaatatatatatttgctgtaaacaacgattgtgattctggtttctggatacttataaagcttttagaaggaaaaaaaattcaaataaattgtaaaaaaaatatatgtaaatgatatttatccttttaatatttttgagcattatggctcagatttatatggaaataattagttagagagaactttaattagtggaaattctcaaacgattatattctatacataaatcgtgtgcattaataacctgacttcaaagttcaaagtcttaacacttgccataaatgtttcgatagtaatatcaattttatattaggagaaaaactaaaaactatgttaaatctgtgtcagaattataataatccctttatcttaccatacatttagttgactcacatttttacttcatcacccaactgttctcagagttttactgaaatttctcatcatctctaatcactgcattgtagattctcagtcacatgacatcatctccgatgggaaaacacggcgggtcaaagactagaaccaccgtttgtttatcagatggtgttatctttctcgccggagctttcatgtctcttaccctcgtctggtcttacttctctatcttttcaccttctttcactttcaccttcaccggtttacgtcacggctgcgaatcggttcaatgttccggtttaaacatgcaattagaccctcccgagcccggtttttacgacgatccggatctaagctactcgatcgagaaatcaatcacaaactgggacgagaaacggcacgaatggtttaaatcacacccttcattcaaacccggttcagaaaaccggatcttaatggtaaccggttcacaatcctcgccgtgtaaaaacccaatcggagaccatttgttactcctccgatgtttcaaaaacaaagtcgattacgctagaatccatggtcacgacatcttctacagcaattctcttcttcatccgaagatgaattcgtattgggcgaaacttccggtggttaaagctgcgatgcttgctcacccatttatggattgaagctttaggtaattttctcaaacacatttatggattgaagctttaggtaatgaatgagctgaatttgcatataaaaaatcgatactttcattttccagaacaaaccaagatttagcataaatgttcaaaattgaaactttgattcctaacttcttggaatgattcatattgagctagatttagatctgtatgattgatatgatgggtttggtttgtttatgagtagagagaaaatgggtgatgaggcagagatcaaggaacatttaaagccacaagcttcatctgaaacaatagacaagaaacataatgtgaaagggaagaggttatggcagaaagtcaagtatcaattggtggagtttcattcattgcctgcttatttaagagacaatgagtacatcattggtcattaccgatccgaatggccgatcaaacagattcttctcagcatctttaccattcataatgagactttgaatgtttggacgtaagtgttgaatcatgtttcttgatgtatccttgtttaaagttcaagaaaccttgagtgtgtttgtgtgtgtgtgttctttgggatttgcaggcatttgattgggtttttcctgtttttggcactcactatatacactgcaacgaaagtaccgagtgtcgtggatcttcattcgcttcaacaccgtttacccgatttgttgaggaaaacagatctccacaaacttcattctgagctcatgtctcgccttccttctagtccatctagttggcatgtgatggaccttctttataactgtttgcctgaaagattttctcatggcaactacactgacatgtgtgttctggtaagaaaagactcaatctttctctctattcctgcagattactgtttcaaaatgtggccaagttcatgtctttgtaattgcattgcagcattctgtgagggaagatcttgcaaacttgatagctcctttgatcttcaggccaattactcgatggccgttttatgcatttctaggtggtgctatattctgtctattagcaagcagcacgtgccacctcctctcatgtcactccgagcgagtctcctacataatgcttaggcttgattacgccggcatcgcagctctaatagcgacttccttctaccctccggtttattactccttcatgtgtgatcctttcttctgcaacctctacttaggattcataaccatcttaggaatcgccactgtgcttgtttctctcctcccggttttccaaagcctggagtttcgggtggtgagggcgtctctgttctttggaatgggattctctggcttagctccgattcttcacaagctgatcatcttttgggaccaacctgaagcccttcacatgacaggttatgagattttgatgggtttgctttatgggttaggagctgtggtttatgcaactaggatcccagagagatggatgccgggtaaattcgatatagcaggacatagccatcagttgtttcatgttctggttgttgctggtgcgttaacgcactatagagctgggctatgagagatattgaaggatgttgaagatgaagattgaagattagatggaatctttgatgttttaaatcttgtttgtagtagcttcatataaaagttggattatgtaaagtcttatctgtaatcaaacgtttaattgtttcttttattcaacaaaggattcatattgttaatctgcatattactggttaaagaagctgaaggattcatatttttagatgattccagtcttgattgcagcattcaaagtatcataatctagtgtcaacctcatataagcctccttgtgaacctgacacaagcctaactggttccatcgcagaggatactttggttctgatcttcttcttgaagatttcccctgactagttggtatacatttcgaatgatccataagtgttgataaactacaagtacacaagtaactactcaagggaaattcacttgcaggttagtcaagtgaacgttttttcaaagtatcagagaatcataaagaagacaaaggctctagtttgagtctggaaattgttaatgatgatggtactaagttctggtggagtttgcatgtaagacaaagcattgcagactgaggttacagcaggaagtgcatctgggttcaatggttgatgtgtaagttgctgtaaggacgtgtctcaaggatatcacaacggtttgttgagatgagacagagttaaagataactagtagtggttaagaatacagtgttaattattgttttcaatatatgagaggaggagcttccctactatttttatttttttagccaatgagagagctccacttcataccccacttttaccaatcgctagatttcacagccactctcacccatgtcgcgttgagcgcgtgtccacaaaaatcattctttttttgatccacgcacctcattctcaaaaacccaccgcgtgtcttatttttttttgttttcttctctaaaccaaagtaaaccgaaccgagatcaatttgaatttcaaaaccaatgtaaacccatcgctgtgaaaacaaaaagctcggccactgtaacaacaaaaatggagacgacacaacttggaaaagaaatcaactcgaaatagccaagagaatgttcgaaaaccctctcaaatccgatgcttcctttgattccaacctccaaaagcccatctgctcaaatcttcatttcgaggacgaggactcgaggagtattacaaggtacctctatagaatcaatggcttccatggtttttgaaactttacttctaataaacaccattgtaatgtcttgttgtgaaattgtgtaaggaacaaaggatagtgaaagctgaagagtgggcagagtttttttttgactaagtggcctctgtttttgattcttcagtggtcaattttgtgatgggatttgattgaaattggagaatgatttcatgaaatctcttcgggctgaggttgattcatgactctttcatttttctagtgtctcattgatgatagacataagaagcactcagatgttggtttttgttttccatacttaaggccatagagagtggtgaattggaggcaatcaagcctttgccttggtaccctaagaatcttcacttttctagtgtctcattgatgatagacataagaagcaccattgctgaatcatatctgtttggcacagttctagttgaccatccataagtggattattcatgctgctgcttaagccattttttccatatctgctgacaactatagaggctttagtcacatgcttttaggtttgtagctaggaaccatctggaatcaagtacttgctagaaataatgttgttgatcctctgctgcagcgagagagatgcagcgcgtagcagctttaaacgtgttaggaaggtctgtgaatagtctaaaatctacatcaaatgagtgaagggaaatgggcagcgtaagtgttgttagtacttgtcacttggctttattagattgtcttgaatcatcttggtctctgttagactgatcagtagaaacatcttggtgtctatttccagaacacatgtggtgaatgcggagaaagggcagtcagtaatgaggcagaaaggagcattatccaagatattgttacagcagtgattgtgagtcgaagagaagatatatatttgacaggtatccatattttgttctagcctaagaaggattcataatctggaaatcatactattagtagtttattttggagagatgcccccacgagttaggagatttcaatagattagattagattcctccaaaggtgttgttgttcaacgacgtcacttgggcttaagatccccattgcattgtatctatctgcttacatctgtacttgagactcagcctaatactattaccaagtccagtgcattttatgatatccccctttttttaatatagatatgaagagatgagatttttaaattgctacaaaagagagagtctacaatttcgcaattatcaacataattatagagagagaggcttaagagaggagcattgtttggatgtttgattaatgatgatgatatgactacaacaacaacaacaacaaaaaaaaaagtatgtgtgtatacgtggacgattattattaggttgttgacttcagctgtttccgtttagttattaaagagctccgtgatgtcatccaatttctttattatatactatacacactttcttatttatttatctaaactcatttgctgtacaattttttaagaaaactcccattacctagtttttatcttgttaaaagacttatcccaacgtaatttcaaaattaggattgtggttaatggatgcacatatctcacaaagatttgaaatacgatttttatgaagcattatttcaagtaaattcatttgatttgttttacttattaagagattccttactactccggactaattcgataaaaggaacatccatatatgtataatacatatttctggatctttaataatgagactaagattaaaaaattattatttatagatctttggtattaatatttaataatgaaactaagattctgacaggttgctgatgtcatatggagaaagattcggacagatccatcattgatctcatcaactcacacccttaattatgcaaaaataatagtttgagagaccactgcttttgtgcaaggcacgtaaacgagattgtcaataaaaaggaagattggatatacaattagtaacctctaaaatcaactattgatccttttctatactcgcatgctcttaagtcttatacactctcctcagattaacatcccatttagatcaagtctctataaatggtaaatatcacatttagattcactttataaagcaaaagcattaacgaatccctcttcttaattatggaaacatatagtatactgcaagtagctagctaggtaggcagtagccacctcttatataagaatctttagtttattattatatatctgccttttatatattgaactaaaaaagctaacacgtacggtaatcatctgcgtactaatttatggtaaattataaatttatcgaaaaaaaaaaaagaatgtttagttacaaactgttttcgacccaaaggaatcaagtatatttaaaaaaagagaagaaagaactaatcaagtaaattatgtgaagtttttggaatcgaaaataaagaagtgtgggtcatgtccctacaaaagcaacattttgctactaatcttctaacattaattagaataacacgtatgatgagtaaggttgataatgatgctgctgaaccattatttctgaggatgcggagaatcgatgagaagcttggcatttgaggggctttggcttccagtaactctcaagagtcatcacactagttattttgactttgataacgcacactaataagtgacctctctctctctctcttcttttcttatctacagtacttttttttggtttaccatctgcctttctgtcattggcttcttcagaaacaatttctaaatttgcaataaagagtgtttgaaacttgagaagtgaagtaaaataacgactaaggaggggatgcatgcttataccattatgacatgttccttttggaatctttcatggaatcacccttgattagtgattatatatgtattttttttaaagtattatcgtgaagccctagctttcgttgcctttataacctatagtaggaaataaaaaatgaatatatagtaagtacatcgactcgagtgcttctgatacaatcaatataaaccacccaaccctcggagattcagaactttggatttttgattatataaaatttgaatagttaattagtatttatggtgggaccttttaaaaagattctgcacgctcacaaccaaagattccctccatcttcttcttcttctctggatccagttgttgatgattcttcaagaaaacaaacaaggatcatcctctcttacttgcttcatctctctctctctctacacattacatattctctctgtcttttacatttttttgtgtgtatatattgttcttgttatctttgatatataatatttgtaactggccgatatatgtaatggattagatagattcagatgaggtcggctccaaatccatccatcaaacatttataaaaaaaacaagctatggggtttgaccttgtgggcaattgggtttttattttagctgctgacttatcccattttggcagctcttctgtttgacataatataataaaaagggagggagtcgttggcgtttgatattgaacaaccaaggaaggagagcctatcaaaccacatgcttgcatcatctcttttagccaactctgcctcataattactttctataggaggccaagctttccttcttctttctctatttgtctgatcagtttggttcatcaaatcccttttctcccatggaagaaagcaacaactcggccgttgtggattttcctgacaactttatggaccagctcttgtgggaggagtgctgggaagaagaggcaacgcagcatgaccaggcattatcatcaccatcagggctgaaggagagggtggcttgcgccatggggcacctgcaagaggtgatgggagagagggagttgctgatccagctgtgggtgcctgttgagacaaggagcggccgagtgctgagcacggaggagcagccttactctatcaacaccttctcccagagccagagcctggccctctaccgagacgcctcagctggctacagcttcgcagcagaagttgggtcggagcagctggtggggctgcctgggcgtgtgttcctgaggagaatgcctgagtggaccccagacgttcggtttttcaggaaggaggagtaccctcgcattggatacgcccgcaggtaccaggttcgagccaccctcgccctcccactcttccaaggaacgtccgggaactgcgtggccgtgatggagatggtcaccactcaccgcaacttggagtatgcctcccaactcagcaccatctgccatgcccttgaggtcatttttgaatcttaacctaactcttactcttggttgatgattaataacgtaaataagattacattgatgaaaagaaaaaaaaaaagattacattgatgaataaagtcagcctgattgagtctttataattcccatgtaagaaatggtaaaaatatacttacctggcaatattcttgtcactgcactgttggaacactgctcagcattgactagttcccatgtctttgcattattattattagttatttggttgacgtaagcaacctttgaagagcttcaatggttaacatccgttactttatataaacactaaatatattactcacaatcggaatttctctctcgcaggcctttgatctcaggacttcacaaacctccatcgttccagcctctctcaaggtcacctcttcttcttcttcttcttcaagaacagaggtggcctctattctccaaggcatctgcagttcacacggactccctctagccgtcacgtggggtcaccaagactcctcatcctgcctttcggctctaatatcggcctcttacgccgctgaccacggcagccgctgcttcctggccgcctgctcagagcaccatctactcgggggcgaaggaatcgctggaagagcttttgctaccaagaaacagtgtttcgcaacagatgttgccatcttcagcaagtggagctaccctctctcccactacgccaagatgttcgacctccacgctgctcttgccgtccctatcctgacaagaggcaaccgcaccgtccaatttgttctcgagctcttcttcccgagagactgtcttgacatccaaactcatagtctgaccctcgcctcccaactcaagctacgcttccagagctcaccacatctgatggtagacgacaaccaaattgcagaggaagtgagagacgcagccacaccacccctgacacaagaggatcccaagggcaaacaagtgtcgttttccttttcttctgcttcctctctcgagaaccgaaaacgcaagacaaaggctgaaaaggatatcactttggacactctccgacaacactttgctggcagcctaaaggacgccgctaaaaacattggtggtgcgtcagagtttttataaaatttgaattgatatttacatattatgatgatgatgatgatcatgatggcattacatattgcagtatgtccgacgaccttgaagaggatatgcagacaaaacggaatctcaaggtggccatcgaggaagatcaagaaagttggacattctcttcgaaaactgcaggtggtgatggactctgttgaaggagttcaaggctctctccatctcgcctccttctactcaagtttccctcaactacaatcttcttcttcttcttcttttcctttcattaacccaacccaaactgtccatgtgcctccaaagtcaccaccttcgtcatctggcagccagagctcgtcaggttcaagcacttgttgctcctccgaagagcaacaacttggtggcttccaaaaaccagctctcagtcatccacaactgcttactctaagcagcatgcacgaggaccaaaggcctgttcgtgtgacctcatccctacccccactgccatccgcaactactccaaggaaagcaaaggacgggatgaaagtgaaggctatgtttggagattcgatgctgagaatgagcctgcttccacactctcgtctcacagacctcagaagagagatcgcaaagcggtttgggatggatgatgttttgagaagtaacttcagtctcaagtatctagacgatgatcaagaatgggttctcttgacgtgcgatgctgatcttgaggagtgcatacaagtctacaagtcctcctctcttaaagaaactatcagaatattggttcaccatcctctttctcgtccttcctttggttcttaactatatcctaaaaccttttggctaattccaccatcgtcaccacatctatttattttggcttggtttgtatatctttttaacatatgcaacatacttgtttgatctaaatgtattcgttagttgttgacttcttgtgatcccatcttttcccccttcaaaaactatataagatactagctttcattgaggctattatgattttgtaagaaacattatctataataatctacagttgcattgcatcttcagtttcttttctgtttttgttctttagctataaactctttaatttttcatgtttttcctaaaccttttttactcgagttaagaaagtgtaccaacatgccatactttgggccatgggcctatcacttaactttcatacaaaggacatccagtgatcactatttgagtttttgacattgtgtgatacatttgaaggaaaggagtaatgtttaaggttgagttaacatgtaagagagtctgtggagttactcagttcagtagggaagaggaagcttcgtctgtctgctgctgctcgatgtccaagttcagctgcggcgggccagctaaactcagtatgacctgaaattcacaacaagtgcctaatcaatcacccatcttactgtcatataagtagatgctagcagataaatccagcttaacttacaggtaagaaaacgagcccatgcaagaagccgattataaccaaagccaagtacatttggaagtaatacacctgtatgcaccaatacatatccatttgaatcaactcaaacaagaggaccaagaactgctcaaggcatcggatttgggtatccttaccacaaatatctcagatcttgcaaagcaaagcacgatcactccaacaagttttgtgagtgtgatcccactgtccccaacaacatattttcattatcaagtcccacaaatatgaccactaaaccagttagacaaacgcctttgcataccaaaaaaaaaaaaattgctatggagaaaataaaagtgtagcaactagcaagtgatcgcaagtttcatcacctgaaaactgaagctcccatggtttccagtgcctccctcgctctatgttctctgtccccactactcatctgcatttgaagcagtgcaggaaataaacatattatttttcagaacagatccatgcaaggtcgaaaggaaacatggcttgttctgcatccttatatccacttaaccaataagtagttgacaattgtgaggaaggctgttctgctactacatggctacagattgtagtgccaatatatgcagtatagtgttcggggtaaggttgcaaaggggcatggcttgttcttaccaggaaagcatgtgatatgtgcacgcagaattctacagcaatcccgattgacattatcaaattcacaacagaaactgcattgagttggatgcctagaatcaccatcataccctgctcaaacacatcaaggatgattatcctttactacaacttataacatccataacggcatgaaccaaaatgcaaatcggtacaatattctatggatcattttcaatataacatagtaccatgagatccacgagtatcatcactaacacaaggacaatgatggctgaactccaggcactgaaattggcaagttagtaaaagaaaccaacatcaagacatctccaaattctaaaattttgcttaatctatagagagataactgacctggaagtgattaaccagcaaacaataaatatagcacctgccaaagcaatataagaatgtaaagagttgtcttttggtaaaatctctagcaaaaactcaaaatttgatagatgggaagcaaaccgattgctatagcaaggtttgtcaaagctactgtccagatattcagatattgctcaaagaaaatgtagaagacagaatatggaaagatgtcaatctgcataacaaaaaacacaagggttattatataggaggctgagcagaaaaaaaagacatatggcggaccatcctccttctagcaaagccagctaatctatacttctataaataaagaattcatcaccaggttcaaaccttcaaggaattggatattcttgaactgaactcccgagcagctcgcagtgcattaacatagtcaccctaaggaaattttctcacttggtgagtttttctttttaataattcgcttgccagaaacaataatgtcatacttgtgtgttaagtggagtgtggtatgtacggaactccgatgcctgtataacaccactctcataccctgaaagaaaaaaacaagcgtccaagaagatgttcagaccaaaagtaaattaaagaaatgaggtagtgcaaatagattttcttattaaggaaattctagagtaccttttaaatccacgctattcgtataagccccgtgaccaccctttgcacagtcagccgatggcaaagcatttagaaaccagggtagtttctccctgaattgagctgtagatggacgatcctgaaccaaatctgagtgtcgaaagcactgcaatggtttacagacttagatctattctaaatattgttgagaaagaaagagagagacacttactgtggtacagtctttacagatcccatctaaactgcatatatcttcctcagccgtgcagcaaggtggctgtaacttgacaatttaagttagaaactgaaacactagtttgcattttgaacagctggtttttgattaaaggcaataaagtagcttatgaaccattataatatcttttgggatgaagagagaaactatatcagttaaagcgaaatagaaacagaaaactcaaagtagtttccacaataatctctataagataagactgacctggtcatctggaggacaataactgccattagtgaacttccgacaacagccaaaagcctctggtgatagccatacaagaaagtcatcgagccaagaagcagctggtttggcaatgtaacttgtatctgaagcctgtgacgctcttgatatctggtggaaggtggggaaaacaaagaattttaaggacaaaacccttctgggtggatctttaccgaagatgcattaaacttataagaattcatatgatgattttagtaggataaatcacaccaattactgattaaaatgaaaatcgtttcaaacaggagcaatctccgctatacattcattattattacctcatttaaaagggaattcgaattgcattggctgatagagcacaactgatttgtatgccttgattccgagctgccaaaataatccatttcagtgcaggaaaactgctagataataaattgtaccagagagagtgcttttctgtgtgtgtatcagatagagaacctataattgtaattcttgacaacaaaatacaaaggcggccccactctgaggtactctgagagactgtcaaaatagtcctgtcaaataaaattccaatcgtgatcgagggaaatgagcaagagatgaacacaaggagaacaacataaaggagaagtcaaaaatggaatacactaaacttgaaggtaggagtctcgaggaagaacaattttctgctccaagccagtttcaagccttgggctgatggccttaatgaataaaaacacaggaatttaagcagacaaataaaaataccaactcgtaattacaaaaacaattgatatagttcttccacattctgaactttttttgatgatatagttatattgtagtgctaaagaagtgttaaagcggaaaaacaaatagtatataactttatatacagtgaaaagaaaataatgagcaaaacgaagtcagaacttacaatgcttgccagtgcaaaagcgaagaatacagcgacaacaaccatttttacaccccaaagtccaagaacgggtgcatgaacctcctgtggaacaccaagactaaaaatcaacaagattgcggactgtaattacatgtttgtgtgtctgtgactgtattgcacatatcatatgtgtattaataagaaagagaggttgtcccagttttgagaaaatcataacaccttcatgtatctctcaagaaacccaggttcccttccacctataaacgcacaaaaccctgcctaagtagctgaaggaaatgatacagttaaaaagacgctaattctaaacatttcctgtagtcagtagtaaccttcaacagattctcgagatgatgaaggaacttttatgcaagggaaacaatcaatcctattatccgcagatcttttgcagtcaaaaactattagcgcaacaaaagcggtgatttgcagaaagaagtccagcataatagccaatgctgcacaagttaaaaaacagtgtcatagactcgcaactaatgtacacagagagcactaaatatttacaaacctgcaaacatggagaagatacgacatgctggcattggaacaaaagctccaacagcaaaagccaagacctcggataaacttgccaatgttatggatggacctacttcaacaagtgcagagctaattcgttgctctaaagaaacctcacgaggttgtctctttacagcatgaaccagtatgcacatattatctactcccacctgttcgcgtatggaaaaaccattagtatatccatcaacatatataccaaatttccactgttcctactacggagactgaaaacgaacttacagccaggactaggaaaggaatgacttccattatgatcaatgtggatttaactccaagggcactgaaaactccaacagatccaagtacagaaagcaagacaagcacaacccccgaaagaccgagcaaaacctagaagtcatgatattgataagtatattgcgtaatataattgaacatccacaatactttcgtattcccagtcctagatagttgaacgtgaatatttagcttcaaaaattatatacactcatggtagacggattaggggaaaaaaaaggagtatcaccctgacaaagttataggcattataatcatttcagttgggaacagcgagcataagtaattcctagcatatcataagattcccattattcaatactttgcttctccaaactctaaaagaatactcacgtgattgaatacaactgaaatgcctataaaggaacaatgaagttgagaggaagatcaaggcgcacatacctttgatgaaatgtaaaaggtatagaactgcggagcatctccaagtgtgaccgaaatgtaaacaaacataaccaaatagcttgcctggttaagggaaacaaaaacagatcactggcatgaaaatcttcgcaggacatattaccaaagaaatctgggtaggaatggaaagagatagctctcaaagatatatcttatcgtacagctattgttataacatcagcagtactttctcttttcagctcttcctctattgagctttcggatgaaaatgacagactcaaattcttggatcgcaccataggtagcagctcctcctggaaagtccaagtaaatgctaattaagaaccgtatccctttttgagaaattggaaatataaacttaagctctggagaaaagaaaatgacaattttgaaacagggaaaacctttgctaattgaatgaacgatttttcccatgctactgcccttgcgttttcgttgcttgaatcaccaatgacgttgttgactggatatgttacaacaaacgcagtagcctgaaataacgttcgttttacgtcagaataacaatcaaagggtactgagcagccaagttctgaaaccattacctctgagtaattattccccgagaatcctcccaacactgcactaggatcaacaggcgcctgaaaagcgctcaaacacgtctctgatgaagtgtaatgctggagggtgaagagagagggtatcagtaaacagtattcaatcactaatcaagagggcatacattcaacaatgtaattacgaagtgaatgacccaaatccccatcgttgatgaaaaattagctatgtgtaagatactgaacaaaaaataaacctggaaacagtactcagcatgctcaactcctccataatcatcaaaagttccagagtccatcttgaaatactgaaaatgttatccaaaaagagatgtcagtagagaagcgattccatgtgcaagatgaatttttatgttcaagaatttgagataacacatggaagtactctgtgtatctaaaccaggaggagttacacaacatattaaaaccattgaaaatttcacgagatcagaaattatcaacctgcagaatactctgagtggcgcaatcctctcccaaaggcttcaaacatatgtcgggcaaagagacctctgaacctgaataatttccacgaatttgatcaacctgtcatatttggtggaaacaaaatcaatagaaacagaagaaataaacggatgatactggaataacctgatgtattagatcagtagttattgattagaagcatttttttagaataccttctgttgtatgtcaaaaagcaaaagaatattttcatctgttacaatactaggcgccctgccacttttgggatcaggaacagtggccaagataagctgccacagaaggaaatcgtgaacaaagattatatatacggttaataataaactggaatatagacagacgaagcaaaacatagaaactacctgctcgattctgtagaatggcgaaaggtgggtatcaaagaactttttctcttctgctgctttgctttcaggaccaacccacaactacaacatgtagaaattcacatgaacaatcataccagtatttgcagttgcttttctgctgaatgatttgtacaattatggtcctggcaaagttaatacataccttttctggtcgtgtttccaccttgaaattatagagacctgaacagagtgcaagaacaatagctactgacatgaagagaacaagagatggatttctagcaatccatgacccatatgatctgaggcaaacaattggaaacaattacgaatttcatctcatctaattgtagagataacttgcgagtaagatacagacaacgaaacaaaatcctggagattcacctgtaaaattttgccatatatctctgaacaggagagagttgagcatgtctttgcacctaagaattagaagtcaattgatcaattagttctttcctccaaacagattaaatcttcaaggatagtccagcatttatgtgggtatataaatgtattttatgttatatatacatacacataagaactacaatttctagccaatacattgatataccttgacaccaagtatgttttccttcatttcactattaattccatcttcttccacaggatgcaatagtggctttgagctatcaagaggctgtgtcgtatttcttcttcgatttaaaccagcccatccgaagaagcaagacaccagcaagacgtatacaagtgccattgataactcaatgcatctaacctgaaaatacaaatcaatataatcaaatccaagatcataccaactcaataatgttttcaagcaacaatgggataattcataactcacaccttaagaggaccgattctaattgagcaagaatcttcatcatggggcggcaggggttcgggacttgagcaagctggtgaggaagggcaatcaccacaagagcatccaagggatgtgtcaccacatgaataaacagatacattcattggtaccatcgcagatgactcagggatgcttgatttgaagttgatcgcatatggtgaaccaggaaagccagatggtgctttctgaccaataaacgtaaaccattctggaaaagcagaagtaaagatgaaacatggaacttttgaaacaagataaagcgtgtatggaacgccttagaacaaaactgcagagcacctctgaagtttttagcaccaccgccaacaaagttaattgcacgtgtgttcattgttccaaatttcacctctttacaggactcgtaaaggccttctccaaacgtatcagttatgtgatagtctataccatccactgtcaaatttccactcacctagaataaatcccaactagctagtgttgttaaccatataaatgggtgtcaagtaaccaacaaaagctgaaaaaaatggaagctaacctcagcaacagaagtgacgttgatgaaaagagactgatttggagaacaggagagctcgcagaacaaatttaagaagttccgtaagcatgcaggacaacccacaagaaaagggacagcctaaaagagattgcattgacaacgaattagtaaaaatggcctgctctgataatagcaaaaacaagagaataagaaaaaggtcatacctgttgaacttgagacctcaaagtgtcaaactgagtctctgtacaacagacattgccacttatggttgggcaaaggctttggattttggcagaaaacagttcatcaggctgcagaaaggaatgtcagattgactcagacatgcagaagtaattggaaaagtaatggtcttactccatgatctgaaaagttgtctacctgaatggaaggggaggcataaggacagttaaggacttttccatcgctgcggtgtccgcaaatgtcatacatagcgcaatactcttttgaatgtctattattactgagcagcagtacagattaccgaaagagagatgaataagagattgagaaaaaaggaaggccatatgtctcggtcactaaaatgcaaattaccttggttctgagtgggtcaggtttgcggtgagtaaaagtgagaaagtaaagagctgcaacatgacaatcattcccaattatacgataatagcatcgatagaagtcagaggcggaaatcgttcaataaaagcaaaggcctaataagaagaagcacacaaagtatatgcaatttgcataacgaaaaaacccagaaagaaaacataacaagtttttttttaaaaaggaaaatttggcaagaaacgctaggacaagacagaaaatgaagaggattgcctgtaagaggagaagcttggtaggaatcgccatgttttgtctgaagagcaattaagcaagcagttggggtttatttaatcttggcgtagtagttagttgcagagagattggattgttgactaaaattgaattggagagtaaagtaaggagagtcgggagacacgaggcaagaggaggacggtgatgatgagtcagtaccagtaacatctgcttgccgttttaaatgctaacaattgcaatgcatgccgtttttacgttttcttttaccatcaaagttagatgaaaaaaaaggcatctcttttgtcttgtttgttttttctcatcatcctctcatgggtcgtccattgcagacgtgagctcgtctgatcaaatcctccttggcttctcttcgttttctccaatccatttctttgtttataccaaacttcatgtcattaggtcctccgatcattcttcgaatcggtttttgtgtggcggatccagtttaatcatcatcaattcatcatcatcatcatcactggtcgcagctgaattcgattctttgattgggcttgtgggatgggaacttgttcctgatggatatattaaagtcttaccatctcctagctgctgcttactcggctcctgcgtgggcaagctttatggccggtgcttttttggttctcaccctctccctttccttgtttcttgtcttcgatcacctttctacttacaagaaccctgaggttttctctctctctctctttctattccctctactttggcttttatatccttgcttaccttaactactatcttctctctcaggagcaaaagtttttgattggagtcatcctcatggtcccttgctattctattgaatcggtcagttacttttttcttaagcaaatcaggaggttttgatgatacgtattttgggttgaagattttaggaacctaaaaaaattgacttttttatcgccaaagtgtagaagaagcctgtatcatactcataataatacagtcatgttcagcgttgataatctcatcgaatatttacttgtattgtgctcgtcaacggatcgtcaactgaatgtgtttccctaagatatctgttcctaattgtgtttgtttgtaacagtttgcatcacttgttaaaccatccatcagtgttgactgtgggattcttcgagactgctatgaatcctttgccatgtactgttttggtagataccttgttgcctgcattggtatgaccattttcactcttttttatgtctaatattgattaggttccgcatcttgtagttctacctgtgaaacaaggataatcgcacaaacttactttctctttcccttgctctttgttctaaattgacttgtttaccaggtggggaagaaaggactatcgagtttatggaaagacaagggcgtaagagctttaagacgccactcttagatcacaaggatgaaaagggaatcatcaaacatccttttcctatgaatttattcttaaaaccgtggaggctcagtccctggttttatcaagttgttaagtttggtattgttcaatatgtatgtttctcacaaatgcctcctgtttctcttgctccaaaactcttttctttgaagtggaagttaactatttctctccttttgcagatgataataaagtctttaactgccctcacagctctgattcttgaagccttcggtgtgtactgtgaaggagagtttaaatggggatgtgggtacgttgagacaattttgacaagaacagtgctaacatacagattgaccttaagaaacgaaaatcagtttcatctatgatggactgtgatcaagatagcagcatcttaccattgttttcttttttgtaggtacccttatttggcagttgttctaaattttagtcagtcatgggcattatactgtctggttcagttctatggtgcaacgaaagatgagcttgcacacatccaaccactggctaaatttctaacatttaagtcgattgtgtttctcacttggtggcaaggtgttgccattgctctcctctcttccctcggcttgttcaaaagttcaattgcacaaagcttgcagttgaagactagcgtgcaagatttcatcatttgcatagaggtaaatgtcttctgttgttaccaattcctgcaaaaggttaaacattatgtgtgatctttgtttacgagtgcaaaactttttcttcattgcttcctattaacaagcagtctatggagtcgtctgttttcctttctttaaataaattaaagctcttaacacttgtgctggtccagtgcagatgggtattgcttccgttgttcacctgtatgtattcccagcaaagccttatggtctaatgggagaccgctttactggatccgtttcagttcttggtgactatgcatctgttgactgtcctattgatccagatgagattagggacagtgagagaccaacaaaagtccgtctaccacatcctgacgttgatatcagaagtggtatgaccatcaaagaaagtatgcgagatgttttcgttggtggtggtgaatacgtgagtcttctaattctttcatacaaataaatgatcattggattaagagcttctgatcacaaagaggctaaatgttgtagattgttaaagacgtgagattcacagtgactcaagcggtggagcctatggagaagagcatcacaaagttcaatgagaaactgcacaagatctcccagaacattaagaaacacgacaaggaaaagagaagagtgaaggacgatagttgcatgtcatcatcacccagtcggagagtgattcgagggattgatgatccgcttctaaatgggagttttagcgatagtggagttacaagaaccaaaaagcacaggcgtaaatcgggatacactagcgcagagagcgggggagagagcagtagtgatcaagcttatggtggatttgaagtcaggggccgcagatggatcaccaaagattaacaaaatattgatctacaagtttgttccacatttttctcctcaaagcgcagttgtttgcgagaagaggatgatcacgtagaagccgttaaatattgaacatctgtgtacagatttgaagatacatataacataaatgagcatgatttcttattacaggagtaaatcttcatgttttctctaacaaacagaggtgataataaacaggctaatccaagtttggcaattgcaagaatgccaatgggagagaaataggaattgataacaaaagagttcaaggaaagacattccaaaagctgaatacattgattgccaatcagatgaggggtcggagttccccagtgagcaaagcaaacttgcggtgctgtgacaagacagaagcaactctgctcaactgaaacttctctgccaaaccatctccttcctgttgctttgctgaatggaaaacgttctgcaacatctgcagaggatctccatgactcaccaccagaattgcacacctaggggatatgaagaaaaaacatacttaagctttcagttggatgcagaagaaatgggtgttagaggattgtttacctttgatattcagcttccatggatttcatggcagtggcaagtcgggaaacaacatcatcagcactttcacctccttctggtcccataaaaggatctttttcatcaagagcccatatctctgggtactggggcaaccagaaaagatggaacttgagaacacatgtcatttggccgtttccgtcataggtaagttaatgagaaagtaccttgtcatgggacttgagttcaaatgtaggtccaaaatagcgttcgcgcagatcttccatcatctgctcagcaagaaacaacctttgaattacggataaacataggtttgagcaaatgtagaaatatgtgggatgcataaaagagcatcctttagggacacgtatgtctaccttgcattgaggagcatcaaaggggagattgaggaccttagcaacaaccctagcggtgtgagtggttctggagaagggggagtagcaaatgcgaaccttgtccagttctatgttactttccttgagttgctgaatgttgatcatgaaaaggttgagtgttttttttctatttggggggtagggtaggcaaataaagagatgaaagcaaaccaaacctggaggaacgattcgccggcgagacgagcctgagcgacaccatcaggggctaactggtactcggggaggacaccattttcctacaattgccagcagcagagaattttatgtataggcgattaaggagacgaatagatgatgaagaagaaaagaggaccaaaccatggaagagacgacgaggcctctctcgttgggaatgctcttgccgtggcggaggacccagtacctgttggtgttccctactgacgacgaatccatctctttctctctgtttttcccctaaacccaccaatgtcaaaattcccactttacctctctatacatttcatttactctatctatctgaggtttgatatttatacggtcgtattcactaatttcttctaattcctaatttttatcgaaaatctcatatcagtaatttctaaggttttgactggctgcattcttatctcttttatcccttatcttttagtcaaagcttaacatttacagtcactaatttccttctaatccgatatttttttaaatactgtaataaggaatatttattcaccattcttcgtggatattgctgcactacacaattgtcaaaatgtagctaaatacggcaaatatgtgtttttgatacacagcactgcaatcaagcatcggttttggcttttgcctacattaagttttcttctttgtcgtaaattcacaagtcgacatattttatatattgatgatcgaaaaatgagtgacaaacaaagctagctaataagtaaaatctatcaaatcgaattataaaagacagttttttggatctgtggttgttgtatatgtgaaaaggtgatgaagaagatgactgggcacgtcactctctccttctctatctctctttcacagttttaagcaagacgctgccatataatccacaggaaacagagttaacaagaaaagctttgcaattgcaggtccccaaaaaatagaataaaaactataagaagaagcgtagaagaggctctctcaccttgtcactggtatgcatgaaccaccatggacccttcctccacattaatctaccatacacacacacatttgagagctttattattaccacaaaaattacacttttggttcaccttgtatttatttatagatagatacaggtagctctttctttacctgctgaatccagccaccatccgcaatcccatgaacatgctcagccccacccacactccacttagccccaaccctgccggtgcatacagcatgaacgctgatgatattcctcccaccaccatctgccacacacacacaaatcaatcaatcaccctatatcttatcttttcttttaacaaagaggacttctctctctctctctctcttccttaccatcgagcaagccgcgtaggggaagtcagacatcccatagtgcagcccatcaaagataaacgctagcgctgttattggttgagtcgccgctacaaactgaatgcatgttacgtgaatataacaggaaaagctcggcccactctatgtaattacatcactcaccaatacaccctttctcacaatccgcagaacttcagggtctttggaaaacaaaccagctattgaactgaaagacatccccaacacaatagccagtgcgatcccagtcaccactcctatctgtacaacaccaaacacgttacatctctctctatatatatatatataacaagagatcaagtagcatccccaaaaagtgaatatgaactgcgaaaagggaagtaggctcagaccttcagaacaaaagtagtaacctctttcacaccttcaaagtctcttttggatgcagagctcgcgatcaaggcctgctcaacaagacacacgaggcttaattacattctatttaataccaaagagatgaagaaagctatagccaaaatctctaggtatgaaaaccaagctgagaatctaatacctgtccagatgaagctagtgcatcagtaagcagagataccgccaaccacacttgcatgcatatctgatgtgctgccattgcgaaaactccctgacgagccgccattgatgtggcaacagtcatggtcacgagcacagaaagagtccttcccagaacaaatccccctataattcaagtcaagtttaaaacctagaaatatcaatacagtgcttacatccataagtcccataagggagaaaccagtgtctacatacctgattttaggtaatcgccgaactttagtgacccaatctttggaggaagcagtataactcttttgttcaagagtataagcatcaaaatggcaacagtgtacctatgaatcagaggaaaggggtttagcaccatcctacaaggttgaccaaaggaggaaaacaggaaaagaaaaaagatctatggatacatactgggagatgacactagagattgctgccccggctacacccatcctgaatttgtatataaacagagggaatagaaatacagccagaaaattaccaatacctgaattatggaaattagggaacgaaagaactgatgtaaaccgagaacaataaagataatctaatgttcttggatatgtaacaagatctcaaagaatgctaacctaaacagtagactggagtttttgtatccttgaatccacgaaaaatgccttgaagtgctaaggaaaccacataagcaggagcaccaagcgccctaaggacaagaaactgccgcgcagggatgaacatttctgacatctgggtttcaggtaaaaaaaaagacagaaaacatgcattcctcagcatagatttctcacgaaatttcgtaagacatagaagacaataagcactctctggaccgaacttacagattgtatacccattaaccttagaaagggtccagatgccaaagacaatgccagtgcctcgaagatgccaattccaatggctaacactagcgctgttgacactgaagataactgtttcctttctggtaaaccttgagaaggtatgtcactctgactatcttctgtaaatccattcaaagagatataaggctgggaaaaattgggaagagaaaaaagctattatcaacgtatacctgaggctaaatcttgagcggcaatctttgcaatatcttcagcgacgaaagaagtggcaacgctgaggagcggaatgttgaagagctttgatatggtattgaaaatggccatggaaacgccagctgaacccaactctacagatcctgcatattggaaagaaggggagtccttagaactctcaaaacaacatcttccatggtgaaataactctagagaagcaaaggaaaaataccgagccttccgatgtatgcagtctccattagcagcgtcaaaggatcaatagcttggccagcaatggctggaagagagagcatcacgagttctcgtttgatatcgacaggacgtgctacaccagtgtgaaccccattaacctccctagcaagaacggagaccaaagcattacataggcaagaaacgcaaagcaacatggccaaagagtaacaaagggataacgcaacacctcaatagccttacgggagtttgtccagtgaagagcaagagtcatcttcttcccccaacttgacgacaccgcaatcagggttagtctggctcttgcggcgagtaacaaaagggaacatggggtttggattggtgtgaagggagcatttttggggggcagagacattattgatccgagatagaggtagaaaagtcccttgttggattttgggtttggcaaagctagagttcctcctattcgccaagggcagcccaccacccactactactctactggactccatcacacacagacactgcaaaaacgaaactttactagttcgtctatatataattagaaccaaaagaaagaaagaaagcttcgaggatgataactgacctaaattccggttctttaggggaagaaaattggatgagcgtgggagagaaaagaaacgacggtgaaagaaactaaaacgatatagaaaaccgagaagaagacgatagtggcagaggagaagaaacgattcaaaaccgaaacttacggaatcgggaggatgattgagcggtgcgaaagagatcgtcgaagaaacagacagagagagagagggttcaatcaggggttaaccgttgcagggaggcggtttttgtttggggaagacgatggtaaatgggccttttgcttctctttagttaagcccattaaagcccactgacatcggcaccttattagaaacaagaaaaatatcttcttttctttttgtttctgcgtcccgttcggtcgtgtccaaaccgctctaagcatatctttttatttttgctgcgaaagtgcgagtgagtccctctcatgattataacaaacgatttttaataataaaagatttaatattgtaatgcatcatttttattcaaaaccaaattaaaaaaaaaaaaaaatgacttgttcttctctacgcttttatccttcttacatgtcatcacgtatgagatatgttctgctattgactcgaaacacatctttctaatattagctttttttgtttgacttcatttttttcaaaaagaaaaacctttttaaaactcattcaatgcttgacgttttaaatcccaatctttaataggataagtttgttttcagaattcaaaaaaacaaaattaagtcgatttcaattcatgataataatctaaacagctaattaacatttggcaaagtaacaataatataactacatttgaaagagagagcaagagattcgctgtggtttgcttatgcataagaataaagggaattaaaaaaaaccaaactcagtttttttcttcttttttaaaaaatttgtgtgtgtgtttgtttgtttgagattagtttggactttggagttttgttcatagtttctcggcaaccaacttctcctctgccttaacgtcatcgagaaatggcgtcttcttcctcttcctcctcctccttttgcactctctccttcccatttctcttgttttcttcctattctttgtagcctatcctccttgctttttttgtgtctgcgttatacaactcattaatggcctctttgaagttgaagaaaagggataatggcgctgaacccgacaagaaaaagctggtcatcgccggtattcgccaccagttactccttctccttcgccgccgtcaccgtctatttccgctggtatctgccgtctccggctgtctcctcctcatcctcttctcattctccaccctctctcctcctccattgatccatcataacaatcaagtggccgtcgaacccaatccaaccactccatttcgtgtacccgtacgtaaactcttttttgtttcattgaggttttacacaaactttccaggtcattcatgatcattaatgcgtgtcacaggaaaatggcggaaggtcggatcgccagttatggagctcgagattgtccaacttgtactatgcctgcagtaatgcaactgacacctttcaaggtaaagatttgatccatttgcgtaaatagacgcgaaaaccagatattccactctctgcataaattgacttaaattgaaattgtggcagttacggatacgagaagccaaaccaatcggtatttactgatcgcaacaagcggagggttaaaccaacagcggacaggggtgagttcctccttgtgtgttatgatgcttcttcaagtggttaattcatatatatatttctgattaagtttggtttctactgcagataatagatgctgtagtagcggcatacattctaaacgccactcttgtggtccctaaacttgaccagaagtcgtactggaaggacaccaggtccctgccctgtccctctctgttcccattttaaaaatttgttggttcgaagttctaacacacaggttttgttttgaattgttttgtggtacgcagcaactttgaggatatatttgatgttgattggttcatatcgcatctctccaaagacgtgaagatcatcaaggagcttcctaaagaagagcagtcaagaatatccaccagcctacagtcaatgcgtgtcccaaggaagtgcacgccttcttgctacttgcagcgtgttttgcccattcttactaagaaacatgtcagttctcctcttccaaactatatctatcatgattgtacatatgctcatctttttctaaatgttgcaggttgtacaactctccaaattcgattacaggctgtccaacgctcttgatacagagctccagaaactgcgttgtagagtcaactaccatgccgtcaggtatacagagtctatcaacaggatgggccaattgttggttgaccggatgagaaaaaaggccaaacattttgttgcccttcatctcaggtacacacatacaaattaatatcttaatatgtaataacatttttcaagtgtgtagctaatcaatgtgcatgttggttcctagattcgaacctgatatgctggccttctccggatgctattacggcggtggtcaaaaggagagactcgaactcggagctatgagaagaaggtggaaaacgttacatgtgagaacatcatgcattgcttaatttgaataccataaatgaatgttaggtgcagtatcaactcttcttaattctattattggggttgttgcaatgtgcaggcggcaaaccctgaaaaggtacggcggcacgggagatgtcccctgacgccagaggagattggtctgatgctcagaggcttaggttttgggaaagaggttcacttgtacgttgcatcaggcgaggtatacggaggggaggatacattggcacctttaagagctctgtttccgaatcttcatacaaaagagacactgacctccaagaaagaactggctccgtttgcaaacttctcatcacgcatggctgctcttgacttcattgtctgtgataagagcgacgcatttgtcacaaacaacaacggcaacatggctcgaatcttagctgggagaaggtataactcttagtccagctgtgtctcttaacatcactttttccctctcttttctaatatgcacatgcatgtgtgtttgcaggagatacttgggacacaaagtaaccatccgtccaaacgccaagaaactctacgaaatcttcaaaaatagacacaacatgacatggggtgagttctcatcgaaggtcagaagataccagacgggtttcatgggggagccagatgaaatgaaaccaggagagggggagttccatgagaacccagcctcctgcatttgtcgaacctctgaagcaagagtcaaagaaaaagcaaaacatgtaaatgaagatgactcatcggagtactcagagattggtaatgtccccatatccagtagaagcgatttggatcactcacaatttgatgaagtgatcttctgagactaaactcatgtttttttatgcacgaatcagcattgtttgtcaatagagaaattctttttcaaaaaaactgtaatgtcatttaagtcgcaaggttacagatagaaaagaataatggtgtacatatatagaccttttgtacatacatatacaatcctttttcttcttcttagctctctcttgttttgtttcattcattcttatgaaatcgtcagattatgcattcccgttgattcttcctctcatctaataaacaagtctgttacttacacattagaaggaaagcagagagactcagttccagatgtgatcgtcgcatggatcacaaccttcctgagcaatgtctgtgatctgaacgccggcgtcataggactttccagcttcccagttagctggaaggaccctctgcgaccagaccattttgccgtcgtagcctgcggtcaccacgaacctgaactgcagagctccgttgggtactttgtcagtaacccacacggctccgtggcttctggtcatgtaactccaatgtgacgaaccaacctgagcaatgtaaatggctaccacttcagtttggcctccttggtacaagagctttatcgccaagtagtttggatttttgcttgattcttcaactctcacgttcatcttcttgttaccgtaatcgcaaggaactctgtttcaatattcaatagttcttattactactagctacttgaaggaaaatgagaaaagctagcataacatagatggttcgggaatcgaacctcctgtattcaatatcgacaatgccttgtttgagaagatctctgtcggcgccaacaacaggcttagccatggccctaaaggctctgctgctaaggacaagatcggtttggttggtcttgttcaagtctgtgacaatcaccgtggttcctttgctgctgcaaagcgtcgggttcttgcatctgacctggaagcaagctccgcagccggagccgtctttgtagatggaaggcagagccgcagcaatgtgtccggcgaagaaaccggtagccatagagccatatgcacaagctccagctaaatttaaaaacccataacatatacaagagatgagaaaagaaaaggaaaaaaaaaaaagactggaaagagtgaagtaatgagaggagatggaaagctcacaggagagagcagatgcagaggagaaataagctgccttagaactgtgaagacatcggtcgcaggcggctgcagatgaggagaagaggagtacgactgagaggaggaagagaaagccttgcagcattttcttgaaattgaagaataactaaaaaaacaattataatgttaatgaggtgtgtgggggatgcgatgaatagagaggagaggaaggagagagtgaatcaaatatataaatagtgaacagaaaagaatgaagaagaagaagggaatgggttccagctcagcatcacagcacacgtcacgtcatatatagaagcagctggcacaagggtaggcgtgttcattatttattgagttgagagttttgagtagtaggaatgtgtagtgtgtgtctagcctataaatcatcattccaagtaaaaaggaaaaaaggtagtgtgaaagctagagctaccaccacattacccaatagtctagggtgaatgacgtggcattgcaccgactctctgctctgcctcacagctgggcctggtactacatgttgatgtcggtcggtctcttgttttctcaagtgatttattaccacacactctatctagctaattgtgttcctattaatcattcatcggacatgttaaactgttgatttcagtcaatgatgagatcttcaatattcagcagattggtagctaagaaacatccatgtgagaacgactctgtcacatctacggcattcattactacatgtgatgatatcttcatacttctccctctcttgtttaagaccctatatcaactgctgatttctttcaagttctaatgatggataacagatttagagaaacacccatgtcttgttgggtttaggctcatgactagaacaggaagagtaaacctttggttcctcttctttttttagtggtggggctgtaaagaagtccaatgacgtgagcagcattaaccaaaaccatcaagtttaacccaatactggcccttttatgtttatgtaagcccatcttctgattcggcccaatcaagacacttcagttagcagtaagattttcaaacttatttttctaataatgtctaaacaatttaaacagtgcttttgctctctttattggataacgtggaccgtccacaccgacaatccattggtcgacgaaacgcagagtattcggacatgtactatgttttttattacactttccgaaaaaaacaaaccttgttccgatcaaagtcggtccttaaaatattgacttgttagtacaatttgccggcaacaccttggctaaacgcgaaccgagtgttaattactataaattaactgtaactaaaataaacaaactaaaagctagagctactataaatacagtgtcgcaggggtttgtgtaactcatcagtcctcacagctagcaaaggaaagtctcgttggtaaattaaaagtgagtcttgaataccttgtttgcgtttttcctaaaagatggcggatcatcctcgttctactgagcagcaagaagctgatgctgcagcttccaaaggctgtgggatgtttgactttctcaagaagaaacccgaagatgtacattcttccgagaatgcccgtgtaaccaaggagcccaaggaagaggagaagccttctctcgctgaaagattccacctttctgacagctctgtaagcttaattgtatactcttgttcttatgcatgagaaatgttaataacacttgttgatggaggatgtgatatatatgtatatgcagtcaagtgatgaggaagcgggtgaaaatggggaaaagaaggagaagaagaagaagaagaagaagaatgaagttgctgaagatcaatgtgaaacagaggagaagattcctgcgggtataggccatgaggatgggaaggagaaagggtttatggagaagataaaggataagcttcccggaggtcacaatggaaagcctgaagctgaacctcataatgacaaggccaaggagaaagggtttatggaaaagatcaaagagaagcttcctggtcataccaatgatgagaagaagaaggaaacctagttataagaagaccctttttttttttactttcgcttttaccacttgcgttttcatcttcttgtattgttgtccacctcgttatgtgtcagtgaaatgccaacttttcgaattgaacaactcttgaatcttaaataactcatactattataacattgaaatcctcaagtatttaaaacctgttgttttcatctgttagtgaaaaaaacctatgtatgtatgaaacgttaaaaccctaaattttaccacaaaaaaaaaacgttaaaaccctaaaaccggcatccaataacccattaaacatataagaagaaacccatgctttctgagcaagaaacggttctgcttagttaggtttgggctgactaaaaagggcccaaaaggcccatttgaaatcacggaaaataggaaaaagttcaaggggaaggagcagccagagacacggagagtctgtgtatgaaagtgaagggaaaaggagatcgacgtctcctctcagactctcacgggaagaagacagtctgtgactttttgtgtttccagctgttttcatatcatttctcaattctcactcgtatacctgacaatttgggttaccaagttgaccgttgaaatttgtgtttatataataagaattttgtggactattactaatttactagtattattttatacttccagcatatatacatacatacattgcttcttcatattctctacgcgttcaatcaatatttctcgtgtaggctggctatttgtgccaaaatacaactcaaattgtttcaccccaaaaaaaaaaaagcagatacaataaaataaaatttatataattatatgttaattctcatttgtgtaaaatattgaagcagcttaaaataaaataaacctcacagtaaaaatgaaataaaataccttgcaattaaatgagaatgcttatttttaacaaaataaaaaataaataaaaatcaatgcatcaccggattgggattttattttctttcaaaaaaataaaataacaatccccaacccaaaggacaaaataatgggtatttaattagtaggtggggtggccttataatatattacaggttgaaataaaaacacggaattagctgattggaaaagcttccccctccccattggactttaaatacgacaccagagtcatttgttccgttactacaaaacagagttgaagctttctcttccaactttatcttcttcttcttcttgtcaaagcgagtatgtgctggtggctaaatggggccgtttggacgatgatgatgatgacgatatccatcatttcttttgttcaagctgatgatccctaccgttttttcgactggagagtcacttacggcaacatttctccacttggcattcctcaaagggtatttttttttttttccaacatccacaaaaatggcgggatgctttctgtttttgtttgctcgatcatgcatgctttatattctattcatacacgcagggaatcctgataaacggacaatatccaggacccgatatttactcagtcaccaatgacaatttgatcatcaatgttcacaacgatctcgacgagccctttctcttatcttggtaccatttatctagctccccttctctaccattttctttcattcattagttatattagaggaaatagatattggagtttggtaaatggcatgatggagccaatttgcatgcactagtgttgtttcttcacattcttgttagagattatattggtggcgagacgtcaagttttcatgttaatataatatcaatgaattaatataatacaaaatggtaaatactaatgaaggaacggagtgcaactgaggaagaattcttaccaagatggagtgtatgggacgacttgtccaatcccaccgggtaaaaactacacttatgccatccaagtcaaagaccagatcggtagtttcttctatttcccttccctcgccgttcacaaagctgccggtggttttggcggtttccgtatcctcagccgccctcgcatccccgtccctttccctgaacccgctggagatttcaccttcctcattggtgattggtttaagcatgaccacaaggtatttctttcttgaattaacaaattatgttcgttttagtatttgtcattgttatacaaggaccataattaaatgtaacattattcaggttttgaaggcaattttggatagaggacacaagctacctttgcctcaaggggttttgatcaatggccaaggagtcagttacatgtcttccatcaccgtccacaaaggttcatcctaaaaacactcaaatactttgattacgaagaaaagcattatattatctcatcatttattttttgttgtggaacaattatcaggtaaaacatacagatttaggatatcgaatgtagggcttcaacacactctgaatttcagaatccaaggtcatcagatgaagctcgttgaggtagagggaacacacacagtccagtccatgtatacctctctcgacattcacgttggacagtcttactcggtcttggtcaccatggaccagcctgaccaagactatgacattgtcgtctccacaaaatttgtcgccaaaaaactcttggtctcatctactatccactactccaactcaagacatagccactcatcttctgctaattcagtccatgttcaacaacctgccgatgaactagattggtctatcaaacaagcccggtccattaggaccaatctaaccgcgtctgggccaaggcctaaccctcagggttcgtaccactatggtcgaatcaagatttctaggactttgatattggaaagctcagcggcactagtgaagaggaagcaacgctacgccataaacggagtgtcgtttgtacctggagatactccgctaaagcttgcggattacttcaagatcaaaggcgttttcaaaatgggaagcatacctgacaagccgagaagaggaagagggatgagaatggagacgtcagtgatgggagcacaccatagagacttccttgaaatcatatttcaaaaccgcgagaagatcgtccaaagctaccacctcgatggatatagtttttgggttgttgggtgagaataattaaagattagctatatctatcgtcctctatatatagtagctagtaataatgcattgcatgcatctgatgtttgtgagtactgtccacaggacggatagaggaacatggtcaaaagcaagcagacgagagtataatcttagggatgctatttctcgctccaccactcaggtacaaatagtttctaactccatatatcttaccaaaaattttaaaaaatcatctcaaaactagtatttggttgttgtaggtatatccagaatcttggacagccgtatatgtggcactggacaatgtggggatgtggaatctaaggagtgaatattgggcgaggcaatacttgggtcaacaattctaccttcgagtttattctccaacacactctcttagagatgaatatcttttgcctaagaatgctttgttgtgtggccgagcctccaataaacacaccactccttaatgactctactcagaccaatcgtcaatggctgatttagggatatgtattttattatattgagttctttattctttataatttcaatagctagatatatgttgcacaattattatatatacttcaaaaattgtaatgtatacccaaatttgatgaaaattttactgttttgtaacggttattgctaagtttgaagttaatttttgtaggcaaatgcaatgttttcatatgaatcaaccaagtaactctaccatatcaccaagcaaaatagtatagtttgaagagagagagtaaattaaaaaaaaaaaaaaaccatacataacatattagaaacattaatttcgaataaacagactttaacgatgaaataaaaatttaaattattatccaccggtagatgtagaatgtttattggtatagaaagttgttctatttggtcaaagtttttgttgaccttgcaattacaaattacaaggctgtcaatcgaatgaaaaacatggcaatggaaaagatttgctaataatgccaagacaaacaaacgtttatttggaaggttaaaagccttttagagaagaaaaaaaaagagcagagagtcaactaattaagccatgcatgtgaatcaacaccaatccatagcatattctagtgatcagtgacattaatattgtagattactatattaacccgaattcaaagggcattaaataggtactttaatgaattgaattaagaagagtaatataatcaacggcttagattcgttgcgtgaaaaaaccataaccgaaaacagcggaatccacgaaataagtaagccaaacgcaatctagaccgtacgatgtgaatactttaatgacgccagaatactatggacagtgtagatcaggcgaatgggcgtaatacacgtggcgtaaaatcacgaggatagatatggtgcaacgtagttcaggccggtgtggtacgagagagtctgatgatccgacaaggaatacttctagtccacacaatgtcagcctttctttattttctcggtcgcttcgagattctcaattctgctctgtagaaaagatcctgatggttcacttttaatatccaacggttgatataacacaagcgcatgctcctcttatgagaacggccgtgggatataatttaatctcgccgttaaaaaatgtgacgaccgtgagttaacggtttatctgttaccaacctcatacctgtccctaacggcagaggataacgccgtgagtatggatggatgggagagaaaagaagagagagagtgtgagtgaggaaatgaaaggagtcttttttatttgttatctctcatctctctctctctttctctctgagctttgctttttatcaaacaagcatcatcatcacatccacttccttcttcttcctttctctgtctgtctcttaacccaaatgtggactctttgagccgttattagatctctgccgcttcaataatggggagcttatcttctgaggaagacgacgaagtctcttccgagagatgcggaagttacagtcccagcgccgacattagcgagtccgagagttccagcagcttctcctgccaccgcttcgacggcgagggtgcctctagctccatcccttcttcccctcgagttgtcgctggtagaggattttacttcccggccccagtcatgcttccggtgatcggcggcaaagatgtggtctgggatgacaaacaaccagacaacgatttatccggtataaaagtttccaaatttgacctcttttgtaaacattgatgaacactaggattcaatttcccttttgtttcctattgggtttcagaaattgagatgatgaaggagagatttgctaagctacttctcggggaagacatgtctggtggaggtaaaggggtttgtacggcgcttgctatctccaacgccatcaccaatctctctggtaccatctcaatcttcttccctttttgttagttggtatatatagtaggggtttctagttttttaataaggctagtgtccacacagcgactgtgtttggcgaactatggaggcttgagcctcttgctcctcagaagaaggccatgtggcgcagagaacttgagtggctgctctgtgttagcgattctatcgttgagctcattccttccattcagcagttccctggaggcggaacttatgagatcatggagacccgtccacgttctgatctctatgccaatctccctgctctcaagaagctcgatgctatgttgatcgatatgcttgacgctttctccgatactgagttctggtacactgatcgcggcatagttcttggtgattgtgacaaggattcttacaattctccagcttccgttaggcaggaggacaagtggtggctgccttgccctaaggttccgcctaacggtttgtcagaagaggccaggaagaaactgcagcagtgtcgggactttgctaaccagattctcaaggctgcattggcaattaacagtggcgtgcttgccgaaatggagattcccgacccttacttggagactttgcccaaggtatgcgccttctcgagctcaaggattagctttttcattgctgctggagcataaattcttttaccgttatatgtgattagctcattgagttatgattttaaacttaatgcagagcgggaaggaatgtcttggagagatcatctaccagtacttaactgcaaacaagttctctcccgaatgcctcctggactgtcttgatctctcatcggaacatcagactcttgaaatcgccaaccggattgaggcggctgtgcatgtttggagacaaaagaatgggaggaggcacaagaagcaggcgaaactaaagctgtcttcttggggtggcaaggttaaaggccttgttaatgacaacgaaagaaatgatttccttgtgcagagagccgagaccctcttgcagagtctcaggatccgtttcccgggacttccccagacaacgctggacatgaacaagattcagtacaacaaggtacattatagtttggagtgtgctttgctggttgcatcatgaaacgatgcttagataatttaagagtttgtgtgtgttcttgcaggatgtagggcaatcaattctggagagttactctagggtgatggagagcatggccttcaacatcacggccagaatagatgatgtgctttatgttgatgatgccatgagaagatccatctctgtcacagaatcgctatccctattcagcatcaatggactcaaccctcaaaaagcgttctctgtgcagagctctccgcacggttcaccatttgcaacgcctgccctaagtgtagcatcaagaagcccgaggagagcaccgccgctgtattcagtgaagaggaatgggacgagagagaagggaatagtgggagaaacagagaaagcatggtcgtatgcagggaatctgagttcaagaagagtaacgggagtgacgccggaaagagattaagattgaaaatagaagaatgtaaatcaatggttgtagagactgtagttgtttcttgtttgtctgactacgaagacgaatgtggtaatagcaacaagaatgttatcttatgtggagttttgaaatgttgttaacaaatcaattccttagctcatttaccaagtttacaaagattatggtccaagtcctaaaactgaatgaacatcacatacccgtctcttgagtgatttaatcatgttcttcattgcactaaagcgacaacttttggttcaaatatagactatgactatatggtttgttttgcacaggattaaagttgatgttccaattttataattaaaaagtcagaaaggggttttcttgttattttttacttgttcttataagctatcgggacgacacggagttttaaagagttttccgttttgctgagcggaggcgagagagggtttagagtgatggagcaaagtagcgggagagtcaatccggaacagccgaacaacgtcttggcgagccttgtcgggagcatcgtggagaaaggaatatcggagaataagcctccaagcaagccgcttcccccaaggccctcccttctttccttccccgtcgctcgtcatcgttctcacggacccgtaagccaatccaatcctctagtgcgtgctttttaggtttccatcttccttttgttgccttcttctagattttaagcaccttctactgttgtttagtacttgggactccacaatttttcaccgtgcctgaccttgtaattcagctttctgagacatctaatttttgtttctcatgtttgattttgtagcatttggctcctgtgggaagcagcatagcacaacctaaggattacaatgacgatcaggaagaagaagaagcagaagaacgtttcatgaatgcagactccattgctgcttttgctaaaccgcttcaaagaaaagagaagaaagacatggacctcgggaggtggaaagatatggtctctggggatgatcctgcatccacacatgtccctcagcaatcaaggaaacttaagatcattgaaacgagaccgccctatgttgcttcagccgatgcggccactacatccagcaacactttactggctgccagggcatcagaccagagagagtttgtttctgataaagcaccgtttattaaaaatttgggaaccaaggaaagggttcctttaaacgcttctcctcccctagctgtttcgaatggacttgggactcgacacgcgtcttcgtctcttgaaagtgatattgatgttgagaaccatgcaaagttgcagacaatgtcacccgacgagattgctgaggctcaggctgagttattggacaagatggatcctgcactactctccattttgaagaaacgaggtgaggcaaaattgaagaagcgaaagcattctgtgcagggggtttccatcaccgatgaaacagcaaagaattcaagaactgagggtcattttgtcactcctaaagtgatggcaataccgaaagaaaaaagtgtggtgcaaaagccagggatagcccaaggattcgtgtgggatgcatggactgagagggttgaggcagccagagacttgagattttcttttgacgggaatgttgttgaggaagatgttgtctcgccagctgaaactggtgagtagaacaatacaactgaaacacatgacaatcttaggttgcttacactttgactgtacaggtggaaagtggtctggtgttgaatctgctgccgaacgtgatttcttgagaaccgagggggatcctggggccgcaggttacactatcaaagaagctattgctcttgcacgaagtgtggtatgtatgattgccacatattttaattttgatgctaattaatggttaaattcttttttccctccattttggctttagctgaacaaaacctgtaggctgagactgcgtttttttcgttatcactgctcattgatttgtatgtattattgatatatatatcagattcccgggcagagatgtcttgctttgcatctgcttgcatctgtactcgacaaagctttgaacaaactttgtcaaagcagaataggctacgcaagggaagaaaaagataaatccactgactgggaagccatctgggcttatgcccttggaccggaacctgagcttgtcttagcattgaggtaatttcctgatgggtgtaattttgagacttatttgtgaagttgtcactcataaatcataaattgtttgttcttatcaatataagtttcttttcttctttaggatggctcttgatgacaaccatgcctctgttgttatagcatgtgtaaaagtgattcagtgtctactgagctgttctcttaacgagaatttctttaatattctggaggtatagttgatttttctcactcctaagaagttatagtcctcatagaacgtgattatacatgttcaaactgataaaacccatttctatttccagaacatgggaccacacgggaaagatatcttcacggcctcggtgttcaggagtaagccggaaattgatcttggcttcctccgtggttgctactggaagtacagcgctaaaccctccaatattgttgcgttccgtgaagaaatcttggatgacgggacagaagatacggatactattcagaaagatgtttttgtagccggacaagatgttgctgctggtctcgtcagaatggatatccttccaagaatttatcaccttctggaggtgagatcactatctatgtgtaactcagcaagtaaaatcattctttttgtgtcgttgcttagttttctggtttttttttaatgttcatgatttcagacagaaccaacagcagcgcttgaggacagcataatctctgttactattgcgatagcaaggcattctccaaaatgcacaactgcaatcttgaagtatcccaaatttgtgcaaacaattgtgaaaagattccaattgaacaaaagaatggacgttctttcttctcagatcaactctgtccgcctcttaaaggtaatactggtccgctcatacaaaattatcttggggtcgttatattcattcgtctttgatgttttttttacagaacctgatgattcgagtttgttaagctatcaattctcagagctattgtaaccttcgttcttctttctctctttttaatttcactaaggtgttggcccggtatgatcaaagtacttgcatggaatttgtgaagaatgggactttcaatgcggtcacatggcatttgtttcagttcacctcatctcttgactcatgggtgaagctagggaagcagaactgcaagctttcatctaccttgatggttgaacagctccggttttggaaggtctgtatccatagtggctgttgcgtatctcgcttcccagagctattcccagctctgtgtctgtggttgagttgtccatcattcgaaaagctcagggagaaaaatctcatcagcgagtttacttctgtgtcaaacgaggcctacctggtccttgaggcttttgccgagacacttcctaatatgtactcacaaaacattccacggaatgaatctgggacatgggactggagctatgttagccctatgattgattcagcactgagttggataacattggccccgcaattactcaagtgggagaaaggaatcgaaagtgtctctgtatcaactactactctgttgtggttgtattcaggtgtcatgcgtacaatttccaaagtccttgagaaaatctctgcggagggagaggaagaacctctaccatggctaccggagtttgttccaaagattggccttgccattatcaagcacaagcttcttagtttttctgttgcagacgtaagtaggtttggaaaagactcttccaggtgttcctcttttatggagtatttgtgttttctaagagaacgatctcaagatgacgaactagcattagcttctgtgaattgtcttcatgggttaacacggactatcgtgtccatccaaaatctgatagaatctgctagatccaagatgaaagctccgcatcaggtaagtatttccactggagatgaatctgtgcttgcaaatgggatactggcagagtctctggctgagctaacatctgtgtcgtgctcttttagagattctgtttcatcagaatggcccatcgtgcaatcaattgagctacataaacgaggcggattggcccccggcgttggacttggttggggagctagcggtggtgggttttggtcaaccagagttctgttggcacaggctggtgccggtcttctgagtctctttcttaacatctctctgagcgactcgcagaatgatcagggatctgttggctttatggataaagtaaactccgctttagctatgtgtttgattgcaggtccaagggattatttactcgtggaaagagcctttgaatatgtccttagaccgcatgctttagaacacctggcctgctgtatcaagtcaaacaaaaaaaacatatcgtttgaatgggaatgcagcgaaggggactatcatcgtatgagcagtatgcttgcttctcacttcagacatagatggttacagcaaaagggaagatcgatagccgaggaaggggtcagtggggtaaggaagggcacagttggtctggagactattcatgaggacggtgaaatgtcaaatagttcaactcaggataaaaaatcagactcctcgaccatagagtgggctcaccagagaatgcccctacctccacactggtttctcagcgccatctcagcagtccacagtggtaaaacctcaacagggccaccagaatccacagagttgcttgaagttgcaaaagctggagttttctttcttgcaggacttgagtcatcgtctggttttggatcgcttccctctcctgttgtgagtgtaccgttggtttggaagtttcacgctttgtctaccgtattgcttgttggaatggacatcatcgaagacaagaacactaggaacttgtacaattatctgcaggagctttatgggcagtttcttgatgaagcgagactaaatcaccgtgacactgagcttctgaggttcaagtcagacattcatgagaactactctacttttctggagatggtggtggagcagtatgctgcggtgtcatatggtgatgtagtgtatggccggcaggtctcggtttacctgcatcaatgcgtggaacactctgttcggctttcggcatggacagtgctctccaatgcccgtgttctcgagcttctgccgagtctagacaagtgcttgggagaagcggatggttacctcgaacctgttgaggtaatttacaaaaataataaaatgttgatagtggtgaataatggcatcttgagcatccaactaagataaaatggtgaattgatattgcaggaaaatgaggccgtccttgaggcctacctgaagtcatggacttgtggggcattggacagagctgcgacgcgtggatcagtagcctatacgctggttgtgcatcacttttcatctttagtcttttgcaaccaagccaaggataaagtatccctgcggaataagattgtcaagactcttgtcagggatttatcaagaaagcggcatcgtgaggtaacttgaaatccctcatctcttgttcaatgtcattctggggactgaggatgataatgaaacgtggaaataatgtttcaggggatgatgttagatctcctgcggtataagaaagggtctgcgaacgccatggaagaagaagtgatagcagcggagacagagaaaagaatggaggtgttgaaagagggttgcgaagggaactccaccctcctcttggaactggagaagctgaaatcagccgctctctgtggaagaaggtgaacgagagaatgagaggaaagaaagtctgtgtgtttctttctctgttttgaggttctcttacagatgaaaagctgtgtaattaaaaatcgatgttcttcttctgttcttgtaagattttggatttttccaatttctgacaaagttcaattaaaaaacttgactgacattttgaaagcgacgtgtctgtcttagaaatcaatcatatattggcacttcctatcaagagagtttggctgaacccaattttactaaattatcattatctcaaacacaacaaggatagatcatcctcataggcgatgttgtttagtggttcagcgatcccattaagcagcttctgctctcttccggagaaaccccacactcttcctatgaaactctctcccgctgcaatccgatcttcatcctcatctgccccggggtcgttgaacttcgatctgaggacgtattggacgactctgatcaccgagatcaaccagaagctggatgaggccataccggtcaagcaccctgcggggatctacgaggctatgagatactctgtactcgcacaaggcgccaagcgtgcccctcctgtgatgtgtgtggcggcctgcgagctcttcggtggcgatcgcctcgccgctttccccaccgcctgtgccctagaaatggtgagatagattccactctctctcgccttgtaatctcaatttcgccgttagtgtttgatatgagtgagtaagaagaagaaatagaaagtctttgttgttgttgttgagagatgtgtgtgttgtatctaataatggaatgaatcaggtgcacgcggcttcgttgatacacgacgacctcccctgtatggacgacgatcctgtgcgcagaggaaagccatctaaccacactgtctacggctctggcatggccattctcgccggtgacgccctcttcccactcgccttccagcacattgtctcccacacgcctcctgaccttgttccccgagccaccatcctcagactcatcactgagattgcccgcactgtcggctccactggtatggctgcaggccagtacgtcgaccttgaaggaggtccctttcctctttcctttgttcaggagaagaaattcggagccatgggtgaatgctctgccgtgtgcggtggcctattgggcggtgccactgaggatgagctccagagtctccgaaggtacgggagagccgtcgggatgctgtatcaggtggtcgatgacatcaccgaggacaagaagaagagctatgatggtggagcagagaagggaatgatggaaatggcggaagagctcaaggagaaggcgaagaaggagcttcaagtgtttgacaacaagtatggaggaggagacacacttgttcctctctacaccttcgttgactacgctgctcatcgacattttcttcttcccctctgattttgggccctcttttacatttgggccttccttcgctatacgaaattaggccctgtaatggactgtgtatcgttcatttttagcccagagcttcttcgcttgaccattcatcttcgctaccacctgtcattatcattgttttttttttgtgtcggccatgtcaaaatcatttagttactacatgtacttttaaccaaatttatagcaatctactatgtatgtatttatttatttattttgaccaaaattcccaacttttagactagttgaattgtttagtgtttgaataagtgttttatcaccccccccccccccaaaaaaaaaaagacgtttcacaacatgcgagtacatttcctccaagataattgcgaatgcgacaattagtatagttctaaatgaagacctaagccaagtctatgcttttaacaactctttccactattaatcgttggccatcttatccaatatatctacatcatttgctatactatatacatatatccacgtttaatattttctttcaaacaagaaataaatatcttcagtctctttcattcggatttcggattataatcacacttaatttggctatcatacgaggattgaataatccgagtttgcgtacacaacatgtttattggactaaatgaattatatttgtgccaatccatatttgggttgcttactttttcatcatgatattatttctgaacttatctacctaatgtttgtataaactagctaatcccatattcccattctttatatcaacatgctgaataagtgaattatatcattgttttaagtgggactaatatatgcattatgcagagcacatctttgttactcttttgaacgaataagttgtttcaagtattttctgtacgtgttcaatcggatattttcgacaactaacatgttattttcgttcaccgcttcattaaatctaaagctttagttgaataagcagttgctagctgaattacatcaagtgatacctttatatgttttagaaattcaattaatgcagttgaaaatgtgtaggcttattacaactatattatcgggacaatatggacaccatcagaaattgatgtcccgattcaatgaattaacgtgtagacttacaactatatatcgggacaatggacaccatcgggaattgatgtcccgattcaatgaatctgttaaactcttttacacatttgtttaaattttcataatcaatcaatggatcgtgtaatcatactaattagtaaactacatatataattaagtctggctcatgcaagataatttataacaaacaaaaaacttatttaagtgtttctctaacattggccgtatccgttagcatgatccttgaccgacggtgtgtgtgtcattgggtcattagggtttatcatgtcaataataaaaccttgttaaaatatgggtattatttggtgataatattatcaaagtgatcatctgacattgcgtttagtggttgaatctttaatatatcttggtacttggaacggggaataaataaattaataaacacatgtaataacatagtatattgcttcatgatatgaatatgatacatataaataaacatggcacgcaaccatactatagaccagtacttgttaattgttgatgtaaataaactaggatgtattgaaatactgatttacgaaattagtgttttgtttttacgtggcattagtgatgtgaagaaatgaccgatgtgagaaagaagggagaaataaatataatgggagtgtcgatggatggattgcagcaaactttaacggcgacaactcgccgcttacctggccgtcccagtttgtgacctttggtgagagtaaaagggcaaaaatccacgtgggctaaaaaatggagccatgtgccgccacatcatcggtcaattgggaccaaatacctctctatactacttattagtaacttgactatatatcttatgtttttttttataatactaataaaattatgggcgaccgaatcaaagtggtttattcctttttctggctgccgcatctttactctccctctctggtcaactcctacccgagatctatatggagtaccattttattaaagaaagaaaaacaaaaacgaaagtcagttaatttatctctccaaaatatatatatatgaccaaattaaatcgcattgcattaggaatgactgcatgcttaacatatatcgtgatatgcatggggtgtgttaatcataaaaaaatgccatataatttacaatgtacgtgtatattgtgagattaatttacaatttgcgtgtatatctctagtttaagagtatgttacttggaatgattttaaatactaaggaatagagattgcgttagaacgcgcataagacatgtttattaataatatacacgagcagccatacctgcaccacgtgttaccccattatatatgttttaggtttatgataatctcttttctataattttggttgactagcgtgctataagtttagttaattatggtaatgtagtatacaaagttttgatatatatcacacacaacataagagtaaagaatcgtgaatcctccagagatgaggggagtgagatgcgagagagagagagagagacgtttctatagttgggccctaagtttgtttttccaatctttaatgtgtggggatactagtttttactaggtgccaagcaaagcagaacaaaattgaacaaaagggatagattagagggaaagtaagtagggggttggaaaaaggataagtaagaaaacaaagggaccagaatagtaaaacatacaggtggaacctgatccggataagtgagtggggtctttatgaaagggggccacttgtaagaaaacgttttaattttgatcaaaaagggcgtatctgttggagggacaaatggagaatgtgttggattttcttggggatttgatctctcttcattattactacggtttaatatttgattatagtaataataatcacgatttttaaagtggcattaattaaggattaatccagagaagcttcttttgtccacctgcaatgactttaatacccattttagacgttaaaggatcagtatcgccacggcggcatgactcatccgctccttccaatacgccgtcgttttatacccccacctcgaattgaaaaaaaaaaaaccccaacaacaaagataaaaacgtaaaacgaaaaaagcatatcaatctctgtgcctctctcaattctcaaattctgaattctgatcgtatcttcttctctttaagattatcatttgaatatcttcttcatcttcttctccaagcccctctctctctgtatcgatcaatcatcaataggaggagctagcgaggggattcaataaagagatcttcttcttcttcttcgattcactttcctttcttttccattttccctttcgtcgtcgtcgtcaatggtgatggaggacaacgagagttgcgctagtagagttattttcgacgccttacctacctcccaggccactatggaccgccgtgagcgcatcaaaatggaggtcttcgatgaggttctccgccgtctccgtcaatcggacattgaagacgcccatctccctggtttcgaagacgacctctggaatcacttcaatcgcctccctgccaggttccttccttgcttcttcttcttcttgcatgttgttgtgccccattcaatagacgactgattttgttaaattatggtttaggtatgctttggatgtgaatgtggagagggctgaagacgtcttgatgcacaagcgattgctgcattctgcttacgatccccagaatcggcctgctatcgaagttcatctcgtccaggtgagttccttccccactccacttttatctcttttcttctttgttcccttttactttgtataatcccagacgagtgagattcctccacattctcagcacctatgatgattgcttagcctgatctttcatcttttatgttttgcctcttttgtcaacttttggattcctgggctcacaggttctttcgtcactcctcttttcttaaggttcaacctgccgggatctctgctgacttggactctacttctaatgatgctggtcattcttctcctacccgaaaaaggtttgctttcgatacttatcctattcctcattctcttaacattttctatcaaacacaaagctaactttcaacttctcatcatttttcatccatcttcttctttccagcattcatccgccgcctgcctttggttcatcccctaatcttgaagcacttgcacttgcagctagtttatcccaagacgaggatgcagacaactctgttcataacaattcactctattcacggtactttttttcacctacaacacaagaactgatggtttctcctttgtttctggcatcaaatattgtcgcagttccaactcaccctgttgtttcaaatgcaggcccttgcatgagataaccttttccacagaagacaagcctaaactcctttttcaggtatttgattagtacttgttgcttggaagaattgggtttagcaacttgttctctcaagttattgccacatgacttacaacaactaatgattcttatctaaatttcaaaatctatgatttctcgcttcttgcatgataaaaacttcaaacttcaaattacctctttaacttgtttgcatgttttgtgatccctggttttcaacttatccattttaaatgcaagtacaagtcttccttctctttcaccagggtacacctcttgtcgggttattcgtatttcttgctcccaaatacagtctgcaaaattttacctttttatttatttatatatttctaagaaaaaatgtatggtttagtctgacgatgccatcaagtagaatatgtatgtgttctgcaattacaaaatttaaatatgaattcaattattactaagccagtgtaaatgatgcagttaactgccttgcttgctgagcttgggctgaacattcaagaggcacatgctttctctacaactgatggctactcactagatgtttttgttgttgatggctggccgtacgaggtactttttccttgttctgatccttatccttttatagttatactttatcgatgctctatagaacataagcgtgttggcatgtggctgtaatccatttcttttcaagaggtccatttatttatagaatccttggctttatgctttttcgaacttttagtgatctagtagctgaaacgcaactattttgatacgcatacgcaaaaggttccggattataattgtggccgtcatgctatcttcttaattattcaggaaacagagagacttaggatatcattggagaaagaagcagcaaagatcgaggtacttgtttccaattgcaaacttaattaacgtcatgcaaaagatattgaaatttatgattcattgacaaccttttcttcccaaagcaccagattctgagtgaaatggaattagatgctttatgtgaagtcttaaagtttttcatagtgacaccatctgacgcacaagtgttgtgataagttattaataattcgttttcatcacactcagttgcagagccaaagctggcctatgcagcaatccttctctccggaaaaggaaaatgggcaaacaggtgccagaacgcatgttccaatacccaatgacggaactgatgtttgggaaatcaaccttaaacacctaaaatttgggcataaaatagcgtctggttcttatggagatctgtaagttggctgtatctatcaaactcatgttttatactaaagtgttcagatgttaatctctctccttccttctgtttacctcttgttttatttcaggtataaaggtacatactgtagccaggaagttgctatcaaagtcctaaagccagagcgtctagactcagatctagagaaagagtttgcccaagaagtctttattatgaggtttgtgtgccttcttgtctgttcccttgtaatcttatatgcagataaacgataacagctgacgtaaagtatcattcaaaatctttcggttttcaggaaagttagacacaaaaatgttgttcagttcattggtgcttgcaccaagcctccacatctgtgtatcgttacaggtatgttgcagtgaccatgtttatccgtattattcagtttgatatcacgttctacgcttaccattttctttctcgcctgtctctttctcatttaatagaattcatgcccggtggaagtgtatatgactatctacacaagcaaaagggcgtctttaagcttccaactttgtttaaagtagctatagatatttgcaaagggatgagctacttacaccaaaataacataattcacagagatttgaaggctgccaacctcttaatggacgaaaatgaggtaatacttgcaacttattattatatatctttgtcatccatgtacactagtacgtttgtagttggaatgtacgaatctactatatactttggatgaaatactgctccatgttaatactcaaatagtcaaattacatgtttgtgctgcatcacatatgatatctccttgagcttgcgttatacaggattttaaccatcatattcttctcatttacgtggtgtccactacctagttagttcttgcttctgtggatagcaattcagttgcagattcatatatgtgtcttggtttattgttacaggtggttaaggttgcagactttggggtggctagagtgaaagcacaaactggagttatgacagctgaaactggaacatatcgctggatggctccagaggtacgtttttcatggtggttttatatatagtctgcattgacccgcttcccccataagacacttagtaaacctggttacctggtgacggttattagattgactagtatctcattctgagactatgcttttctgaaattcaggtgatagaacacaagccatatgatcacaaggctgacgtattcagctacgggattgtgctatgggagttgttgactgggaaggtacttgcgtgactctttagtctgaaaaacaaaatacatgacctaaaatggctgatagtgtctaactcatgggttgatgacttgatgtgatggcagcttccatatgaatacatgacgccgttgcaggcagcagtaggggttgtccaaaaggtaatcggtgtgaagaatgcattgtgattgtaaacgttttcaacatcatcttacaaaagagtgtgattggcagggattaaggccaacaataccaaagaacacgcatccgaaattggcagagctattggagagattgtgggagcatgattcgacgcagagaccagacttctcagagatcatagagcagcttcaagagatagccaaggaggtaagtaaaaggatttggataggatgaaatgaatatgtgtaaatggaagagtaaacagaattgagtgtgtgtgtgtgtgtgtaggtaggagaagagggagaggagaagaaaaagtcgtcaacaggactaggagggggtatatttgcagccctgaggagaagcaccacacatcattgaaaactgtaaagcagcaaattaatttgcagatgaatgataatgagcctctgtatttgtttgtgtgttgctccccttattcaattgattttgatttcctttgtaagttgctgcaccacactatctctatctcaaaaaaaaaaaagcttttaatgaaagaaaaaactcttcatttagcatcaaagcaaatgcacccaaaaatagaaaaaaaaaaaaaaggctcacgccgaagcaataaaaccaccacaaaaagtcaaaagccaaagtcaaaagagaggcttcgtgggccctaaaagggatacactttggttctctgtttctgttcttcttctctaataagtttttctctagtcgttcaatattacttaacgataaatcagactttttaaactcgatctggtggggacgatgagtggaaggccggcgaaaaggccgaggaccgaccattccgtcgtgaatgtctgggaaagggagctgggtctcttacccaatcgcagtttctcaaaccgtttttcagcatccgaggtctattgattcactctttttctttctttctttagggtttcgttgaatatattgcgttactttgctcctttgtttatgtttaacagccacccaatgcgttacgaacaatatgctactcaatgaacgtttttagattcttcttctcaattgtctttaattttactctaattgctttcagaagaatgtgtttgcaaatgataaaatctttattgtccaaatgtctagtgataggaaaccaaacaactatcttaattagatattgatgattttacaaaagcaggatctattgcggcgtcttggacttgacaagaagcttgataagcataagggatgtgtaaacacagtgagtttcaatgctgatggagatatcttgctttctggttctgatgacagacaagttattctttgggattggcagactgcttctgtcaaactctccttcgattccggccacttcaataatattttccaagccaaatttatgcctttctctgacgatcgtaccattgtcacatctgctgctgataagcaggtaccactctgcctctcctcttcatacctcctaccgcgaaccacacctcttgatagctcctcatgttacaactagcttatgttgatttttgtaacaggtccgctattccaagattcttgaatctggacaggtagagacttctttgttgggtaagcatcaaggacccgtccacaaattggctgttgagcctggaagtcctttctcattctatacttgtggtgaggatggggctgtcaagcatgtgagttgtatttttcattttgttttcttatcgtctgtttttatacctaggccgcctaaaacaacacgtattttcagtttgatcttaggactcgggtggctacaaatcttttcacttgtaaagaagcaaagttcaatttagttgtctacttgcatgcaattgcagttgatcctaggaaccctggtcttcttgccgtggctggaatggatgagtatgctcgtgtctatgatattcgtagctatcgctccgagggttggtataattttacccaacccatagaccacttttgtcctggccatttgattggagatgaccatgtaggaataacaggtctggctttctcggatcaaagtgagctccttgcttcgtatagtgacgagttcatctatcttttcacccctgatatggggcttggcccaaccccatatccatcttcaactaagactgaggagaggatgacgcctcaggtttataaagagcacacgaaccgtgaaacagtcaaaggtgtcaacttttttggacccaagtgtgagtatgtggtaagtggttctgactgcggccgaatattcatctggaggaagaaagacggagagcttctccgtgccatggaagcagacagacatgttgtcaattgtatagagtctcatcctcacatgccactgatgtgtagcagtggaatagatactgatatcaaaatatggactcctggaggaaccgagaaacctctgtcgccaggaaatgcgaaacaggtaatgccacatctattgctaacctcgtttgcttcttttatttttggtgtttgaagactcggaggatatgctttagttaacaagaatgtaactttggatacaatacatgtgactggaggctgaatttggttttggaaggcaaactaaatgtttgtatgtttgcttcttggaaacaggcttcgggttttggtaacccacgatggttcgacggatattatgtggatgacgatgatgattctgacgatgaatctagtgaagagagttcagatgatgatgatagttcggaagaggaggagaatggtgaagttgatgttgagattacgaaggatgatgataatgatcatggggatgatgatgatgatgatgatgaggatgatgatggggatggggatggggatgagggatgagatttgtatagacatgtatttatctaaacacaaaataaaacagcatatggtaacagtaccaaagaaaggattagttatagtttagttagatgtcatcatcgtggatacaaaatactattcaatagacattttcattcttaaccaaatggatcacatacataatcagcttctgtaatgtcagattgtcagtttcttcaatgaactagaatttccaacaatccaaattccaaagtaatttaaaatgtaaaagatgtcattggtaaaatgggtttataatccaggaaactttgagcccaaaaaaggcccatagatcatcgaaggcctttgatatctgcgacggcgagatcagcttcgtcttcctccaacgctcgatttagggaggatggtggtttctccggggctgctctcaactgtttcaggtcactattcgctccggttgcttcttctatatactttcccactgctttttgatattgtccttagtaatcatctagcttcgattttggttcataggcgtaatccgattggctccgtcacaccggattctaagacgcgatgggttcggacccatttgcttcaagttttctggggatttggtaatttacctttctttctattgcggcttaacagcttaagaagcttttcacttaagctctgtttgagtgtgtagagtatcaatgggagagtcagtcataaacatgtgcgtggaagtggcacggtgggatctgtaggttccgctcgtgaaagttggagctctcataagaagcttcccgaagaagagcccttatggctgagtcttcttagagacatggtctggtatgaaattctcccactgagtctagcttttaatatatatatctgctggaagagtctgaatgttgcattatattgaattgcatttttcttgtgagaaggagcacgagatctctcttgtctttcatggctgagcaaccaagtcagctgaaatacatagagtggccaacttttgcaagcacggtatgtcttgttgttgttgttacaacatatgagaaagaaagagatagtttgtgggtgtaactttgtttttttttgttttggtaacaaacagctaaagactgctacactgagtctgtgtctggtagctgtattcattgttgcgctatcatcggtggatgctgctctttgttacatattggcgttgatcttgaggaaagccccatgaggaaggcaactccattatcatttgtctcttgtagccttattgataggtgaatgtttttgatgtagatagaatgcaggaggatgtactcaaaatcaatgtgtttctaaaagttgaattgaaatgaaacctctctggtctagtatctctcacacattaagggaaatccaatcatatatgtcccaagcaaatcacaccataaataataaggaaggattcaacatgttgttggtttacaagtaagagaataagatgatgctaggtgctacttgagaacaacagcagcattgcgaatggagagatactggtggacttggtcggaagaaagtgatctcacagtctggaaaacatgagcattagcatagcggaggtttgttcttgggtccacataaggtgcctgcgagggattagagaagctcattgagttttgttgtttttgggtagtgaataaatttgtagaaaagaatcgatcactcaaaaacagaataaaacctcatatccagtaatatcgcaaagtctcttgcatggttgagtggaaggaggcgattcaatgttaacatctgcgaggcacaaagaagatttgatttttgattcaaacagagtcaaaaatccattcaaaatcagaaatcagagagagagaaaagagttacaagtggggaggtcgggaggaagatctgggaagttctcagcttgaagaatctgcttgaggtgtttccaccttctgctgcttgattgtgcttttgggtacttttcgtaggcttgcttcttcttaaagctcaatcgcgacgccaccactatatctgcctccatcaactctctctccatctctctctctctctctggaaaaaaaaaccttattaattccgacgaggagaacgacgacgacgaaggcttctttcttatacggtgtcctcttaaaaatcaaaccggtccggtacggtagtggaatgaacaatttagtaaaccgatagcagtgtttacattggaaaccgaattgaatgaagtgaagctgtttctttctagatcccccaaagcgagttcatcatcttcttcgcctggattcgatcaagactagcactttcatcagatttgattacaatctctcttatcttccaagttataatcataatatccgagcaatttgggatctgggtctttcctctacattcaatttcttaataaagctggcctctttcttccgagatggttcttgagcgatgatgagtgactctcagcgatcactttctgtgcgattgagccgccggggtgagagaagcaatcattactcacaatctaaaggtctcaacccaactctttttgaactaatgatcatcactttcttttaggtatagtggtttacacatgaaaatttgaagatgacccccgttatagtgttttgtttccactatagaagaatctaatgcgtaatgaatgattatgtcttcgtaatgaatccctaatggattctattactttgtctccaatgatgcagatgctgtggctggcttcttctctcccaccagattgcatgctgattacactttgaaaaaaatttggaaggcaggcttccttcgcttgcttcttgttggcggcattgtctggatgctactcattctatttgccctcttgtttcatgtttggtcctgtcaatcttccctttctttcttctcaggtttcctccaacttctttacacttgccattcttcactaaatctatcatttgtcatacactcaatagaagatgttgttattgtactagttactccaaccatcttctgcattcaccgcagattctatcacagtaacctcatgttctttgtaatttcgttgcagctatttgcaacaaagaaggcagactctatgtcatgttggacactattggatttgtacctaaaccccagcaccgtaagatttttatatcactctgtttagcttctgcttattctagagctacgcttagcaactcttcttttctaggatgccccattcccgttgattatgaccctgataaggtgctcctaccaagtgataaaaccgcagatacaattgtcagaaatttgacctacgtaacagaggatgaatcctctaagtctcagtttcctctatttggcggaaacataagctggtctgaacgagaagaaagcttcaaactgaaacctgagatgaaggtaaaagacttgttttaaggcaatggctaaacctcttctaccattcttcccacgaataatttctaaattatttatttcattacaacccaaaacgtttcaggtccattgcggattcatgccacgtggtggtgctgaaatgtcatctctggataaagaatacgtaaagaagtgcagatttgttgttgccacggggattttcgatgcatatgatgaaccccaccagccatcaaacataagcaagcgttctatgaatctcttctgtttccttatggtggtagatgaggtctctctcgatttcttaagaaaaaatactactgtgaggaaagatgttgaaggaggcatatgggttggcatttggcgtctgattctactgaaaactcctccatatgatgagcctaggaggaacggtaaagtcccgaaaatcttaactcacaggttattccctgaagcacagtacagcatttggattgatgggaaaatggagcttattgttgaccccttgcttattctagaaaggtatgaatacaaataaggatataagacccgtagaaaatggagcttattgttgcccttgcttattctagcagattatatacttctccacaatgtttattagcacagggactatcagtctccgtgttactaagaaaaggctaatagatgcatatttcgctttcatctcactttcaggtatttgtggcgtgggaaacatacttttgccattgcccaacacaaacaccaccgaaacatatatgaggaagctgatgcgtgcaagaggagaaagcgatacgcccgacctctggttgatcttcatatgaaaatatatcgatacgagggcttggaaccatggagcatcaagaagaacactgttagtggtaaagaccatagcaaaaacatcaatgtcatcgtgcaccttattgattactaagcatcttgtcttgcgttccacagatgttccagagggagctgtgataataagagagcacactgcaatgaacaatctgttcagctgcctgtggttcaatgaggtacacctgttaacaccgagggaccagctaagctttgggtatgtagtggacagactaaaaggagccttcaaggtgttcatgttccagaactgtgagtataactctctcttcgaactgcaccctcacattcgagagcattcctcgaagattgagtgggtcaagagtcttcaggaactcaaagggaagggagagagtttgaaggaaagccgaggcggctttgggctctggactccttaccctggtgaccttgattctgttgagctgccaaaagtagtaagaacttctaaagctggttgagacagtaaacattatacactagtttttaactttcgtttgatcgctgtcttcggttttccgaattttccaatttatcaaacatacacgtcttttgaattctatttgtagatcgaagaatcaaatgtaaaacccaaattgttataaaaaaagaagaagaagctgcattgacattcgtgacagtaataagacaaacaaatgtatgttgttctgaaccagtaatttggtaccccaaaaaaaagatgcaaaatctcataaattatacaagaatttcaatttctcttacaaaaagaataatcaacctggcttgctcagtttcgaagacaataataaagggtctagcgattgggaacaaacaccatttattgggacggacgactcagaggtgtgatccaaccgcagaagtaaaaaataaagatgcatttggacatatcatcacaccaaggcagtagaaactatgttcttcagttggtggtatcgcgactgtaaaactgatcaagggttttcgcgggtatacggtgaagtaactcacgggggaagattctgaggagagtccatgccaggtcgagtgactggaagatgtttcgggtatcataagctccctgagccacaaacttcctctcgaacttatccaagaactcaagatatagctgtttgcatcagataaaaaaagtgttaagaggaataaaacggaaagcatttagactgtggtaagaagaaaagaagagagaccagatcctcggaagaaagagcttcttctccaaccacggctttcatggcctgcacgtcctttccaatagcgtaattggcatacaactgaaatcacaaaaacataataacaagttaagctcaggctaaaaaagttgacaagtaaaacttacataaacaaagcttttctgcaatgctggtaatggacaagaaataaagtcttacttgattagaaacatcagagtggtccctgcgagtcataccctcaccaatggcactctgcaatacaaagtcattgttacgtttacaatcgatcatttggcttcatctattatttttgaatcccccacacttaccttcatgagacgagacagagatggcaagacattgatcggagggtagatctgtgaaacacaacgaaaattggtacaccagctattacataaaactagaaccaacgccttacacttacacacaaactaaagtgaaacaactttcaaaatttctgacatttcgggtattacagaatataaacacaacataataaatgtataagtactgttcacttataggcttctagcctttagcttgggcgtacatagattattattacattcaaatgtcagtgttttgaagtcatgaacaaaatgtttcagttttcaagaatatttctcttcatccacatgctctctatatctaaaaactaaagggggtgattctggatttaacagaataaatcaaaagtccaataataggattgttactaggtatataggtttctcatacaggttaatttttcacgttgtaataacatcgattatgataagaactttgaaccaactatcttctgaaagagtgtacctgtctattgtgaagttgtcggtcaatatagatttgcccctctgtaatgtatcctgtcagatctggtgtgggatgcgtgatatctggacagataaagggggcaaaaaaaaaaagacatttcgaacaaaattatccacctgaccaacaaaccttttatataggaccaacaaatattcctctgtaagaaggctttatgatcagattaactgcataggtgtactacactaacactagtatatcagccactcagtctgttagagtcccaaacagctagacctagatcgggcaacgacttattatagcatggtttgtctattcctctaagccagtttccgggtgagttctattccatgtttactttcaactatctcggtgtcggtcaaggtttcctatcacctattgtttacttcaaacaaaaatcattcgaattaaaggcaataatgctaaaacaaaacaccatgaaaatagcactaagaattaccatcgtttggcatggttaaaatgggaatttgagtgatggaacctttcctcccttcaattcgccctgctctctcgtatatggtagccaagtcggtgtacatgtaacctgggtaaccacgccttccaggcacttcttcacgggcagcagagacctaagggtattagtcaacgttaaacactatttcaggcttcctatcatctcaaagttcaagaattgtgaacagagcatgcaaatatcggttatcacctcacgaagagcatcggcgtaggaactcatgtctgtgagaatgacaaggacatgcttgccacattcatatgccaagtactcagcagttgtaagtgcgatacgaggagtgatgatacgctcaatagtggggtcgtttgcctgtgcggaaaacagaatgagaaaccttcagaaaaacattggaactaaaatttgcttcaagatgtctgtagtgtgattgcgagacttgccaagttaaggaaaagagtcactctctccatcgatccattctcctcgaaatcacgtttaaaaaattgtgcagtctccatgttcacacccattgctgcgaacacaatggcgaagttatcatcctcctgatgctgcaaattcacataaatggaccaatgtgatactgttttataatacattatggcattacacaactaccaactcattgtagattttaccaaatcaaaggagaaggacaaggggcgttaagtcacaaaaaagtaatactaacaaatctccccaagtaggatttggtcgacagagcgcatgcaatgctctcataaaaaaagaaagattcaagagagaatatcctagcttaacttaaccctcttaatttatcttgtaatgggtatgtctaactgtctaagggatcactgttataattgtaacaaaccaatttccaactgtagacacggaccagtaatgtataaatcgtgatacctcgagaagattatctgacttctctaaacgcttaaccaaaccagcctgacggcaaatctgagcagcaatttcattgtggggaagacctgcggcagaaaagaggggaatcttctgtcctctggcgatagagttcatgacatcaatggtggatatacccgtctgaatcatctcttcaggataggttctctcactgggattgatagaacttcctggagaaacaaaagtctagaattatatctgtgtgttttattatgagatagtaattatgtgacaagaggctaaagcagctcaccagaaatatccaagtacgcctcaggcaatataggtggaccgttgtcaatgggcttccctgaaccattgaagatgcgaccaagcatatccaaagaaacaggagttttcaaaacctatggaaaaaacattggaaaatgtgagtatattatagacactgatactttaaaacttggtagcaaaaacaaacctctcctgtaaattgcacagttgtgtacttgttgtcgattccagatgttccctcaaatacctggacaagcaaatcaaagaaatttacctcgcagtgtgttgaataataatgactatgcaagattacattgatttacaaatgcgttcaattaagcatcaaagtggagacaagaggagcagaaaactaaagaagagaggaagattcaagaaacctgaacaacagctttctctccatcaacttcgagaacttgaccacgtcgggtagttccatccccaagacggatattgacaatttcttggtatttaggcccctagagaggaaagcagtatcatcaggaaacccatgggacgagaacattataaaagagaaagatggaaacaccaataccttgactttttcaaggatgacgagaggtcccgcaacaccagaaacagttctatactctgcggtataagcaaaagggtgtcaaatagaaaaagaaaccaggcaatgcaatcactgaatgatcaaatgatgataactcataagatcccatagggtatatagcaaataaaggacgtcttacccatgccgatctccagggtaccctccatttcaaggttgttttcagcagcacccattttagatcttcagaaatcagagcaaacaaacgaacatgtcagcaacaaataaaagaatcagagactcaaaggaaagcgatggacgtgaatctacttaattcgttccattttacccaattttagagctctatcaatatgaatttctcgatcagatcaacgggattacttaccctcagagcataaaacctaacaacaaattcaaaacgaagataacaaatggatgggaataatcgacaagtagagaaatgggaaagacattgtttagagtgtacgtacctctttcttctgaatccaaagatctgtgtagaggaagaaaggagccacagcaagagagagatctatgttggtggactatacatacataccaccgatttcaattcaatcagtttcataactttcagctaattacatttatagccttttactttcccatattatcacattaatcattttctcatctttatactttaaaatttttgaagagaaaaaaaacatatccaacgttctacttaatttggtatgatttttttattttatttaaaacacctaagttataagaaaacctagtttggtaagatttattttgtcccgctatttttagattttacagaaaattatggtcttttagaaaatcataagtttactaattagtaattaatacaaaatagtatttatcaaaatttaataattttctttattttttttcaaaaaagaaaagaataaatcaagtattgattgatatatgtgttaaactctttgctatttgcatttccgagagatttaataatgagagaaaaaatctaaaaatttcattttaagaaaagttgaaaactctcaggcgagattatatgagagctgagacttattgattggttcagaacacaactgcataccaaaggccatgtgttttgtaaggccatggtctgagaataagctgagtttctctagtctgaatcagtaataccttaaaaagcaagcaatgaaaattaatgaagaagaagaagaattcttgtcacctttctttctccagtacacagctaacaaagggaacaaacaaaactaaccacttgattatgatatatcctttcccacttgatgatgatatatcctttcccagtcaatgataataataatcaaatatatatatttatatatagttacaggaaggatcttggaaagaattttaaggacaccgtaaaaattcaatagtcaggaggcgccagcagcagcagcttgagtgggcgtggtgcaaggcgccagggtgttgtgaggtagattcacacccgctcctctcactgacacggctggtcctctcaacatacttcctctgctcactaggtttgtatcaaagaagacaacaatcactgttatgtcatcgtggaaatgtctcctcactcctctgtctatctttttcaggtctgagtatctcatctctctcttctttgccgcttcttgtagcgctactttcaccagccgctttgctatcccctgccattaaagagtccttattattatgtgcattctttatatatagtctagtagtacaaacagagtggggtgtgtgttctcacgtttcgcggatgattctggactatgtctactgcttcttggttgctcatatgttcccacagtccatctgatgcacatataatgaactgatcgtgcggctccagtgtatgcaccgtgatcgccggctctgcactcagtaatggcttgctgaacggtgacctcagccggaattttgcatacagtggttccctgttgaactctgaccttttcaaatacacatcaccaatggatcttgaaacctgagtatagtcataaagccactcagaaagacaacaggaattgtaagacatacaaaaacagatttagtccaactctagtttattaaatacctgaatgatgccttttactcgccagacgttatgtttcagaaccacaatatctggatgatccggatgcagggcctgaagttcccgtctcactgactctatagatgcgttgtgctctgctgagagctgagtggcatgagcttcacctgttaccctcatgacttgtcccagaacggcccgtgagtcccctgcgttggccacgtatagcttcccatcgcagatgacacttacaagacagcatgatcccactgtggctatctgaggtctagtttgaaattgatttgtaactatggataagaagccttcttcagtggcttggaacgctttttttatcacctctgatgacatacactgttgctctgcagtaaaccctgtgcataacataaaagatgagagatcaaaactagaaccattttctggactagtgctgctattagagaaatgcttctatatttcctttctagattagctaatccaaacaagagttaaaagcataggttgagcgactcactcttgaggtggtggaacatatgatcattgatgaagcgagatgtctcaggcccaccgtggccgtcgtagacgccaacaaaggtgccaaagggaccagagtcgtgggagctaagagagccagactcgagctggctctggtcctctagcaagctgttggcttgaacgacggccatggagaagtcaccaaagacgtgctggccggagtctctgaaccagagcaaaccctcttggcggccaccagaatctgaggcagaacgagcctgctgatctgaccgtggccagagacaggcattcagaaaattcatcaacccagatagcatccctcatctcatccgccacaacatagaacttgtccgtttttaagatagcacaaatcacagctctctgaaatctgcaatgccaaaagtagttcttcacaggaacggcgcaagtttcacacagcttaaaagagtgctcttcttcaagacctgaatgaactcaaagacaatctaaagagcaaaaaagtgagaaaactcaattgttatgagtggcaatagaaatgaatctgtaggagattatagtgagactgattagtctagtgattgaacaatctaagaaacttgatgcaacattgaaaagttaacatctttaagtaaggaaaccatcggaagaaagcaaaattagtgatgcggcaagcaagaaaaaaaaacaaaaggatttatgcggcagattccaactggttcgtattcgctaccaaaaaaaaggaaactttaccttgcaagatgttggaagcaactcaagttgagcaagaaaatgaatgaagagaaggatctcaagaggacggaggagatgtgggcgtggaatttcagagcttgtagatctactacgactacggatggatcaaccaaacacaaaatttatacttttatataaaaatgaacaccgatttttattattattaaattaaatataagcgagcggatgaggaagaagaagaccaattgacaaaaaaaaaaactttttaagaagaaaaaaaaatggttatcccctcagaaactaatgatctttctttcaatgtctggaaacagtgaacaatgaaggtaaaagagagagagagagagaggtcaagtcgccgaacgagacatcctccttcgacgtttttatgtaaaaaaaagaaagaaagttggagttgttttttttatcttctctctttatctctctctatagtcttaagactaagagtgattcttaccagacaagacccataaaagaccaacgatggcgaggtcggagccagcacatcaaaggtcccagctttcgggctccacttccctctcgtccttttttgcctcattagatggacaacaccaaacagtggcaaagaataatattacagtttttttagggaagaaaataaaatagttgatattattgatataataattcattcaagtctcctctttattttaaaaatattcaactcttttactttagacattatcataaactggggtcaaacggaagatttttcttcaacgtttaataaaatctcttaacacaaatcaaagaagagtaaaaatatacggtttcgataaaatttggttatgtggcggtgttacatgactacgactgataaaactacacgagtacttttgtttttctgtcaccaagatttatttcttttacttactccatgtgtttttttctttcttcgttaaaactactcctcgtaaattataatcaagattttaagcagtgtgcatataaaataaaatacatgtacagtctagaaataatatatgtggattcatgaatctttcatttttaatttccccacacaatttgtatcaaacgtttaatgcccataaaagtggtggtccaggaccctgagattaaaattttaaaaaaatatatagagaagaggcttgggcttgaagaatgaaaaattgaataacaaatatttaaaaaaatttgggacccgaaagtgattgggataaagtgagatatgtcactttacctaacattatttaattttatattaatgtatgtaccactaaatttggcccttttctccccatcgactctttgtagttatttatacttttgtagtaccaataatagaagaatcaactataaaaatttcagctcaataaagaaaaacagaactatgaattaagtgagaaactcaaaagcctgcttctaaaacatgaatacgtccacgataattatcactaagttctagataatctaattttgcgggaccaaattgatgtatatgcgaactttttcatacttttttcaccaacaaatgtatatacttcccatcatgcatgctcccatggtatctcgccgagtgtcaatatatgtgaacttacataaccaaaaattgatttataaagataacaataataagggagacctaaaaatagagaaaagggtggtgtggactgtggagaaggtccctacttacagaacatagcttccatcaatcacacaaaaatccaaccactctgaacctttcacttcaggaccaacttcgttatccaatcatctcccaatatgccaatactttcacttatatatgaacgtgtatatataaacccttcacatttacttcacaaaaatatcttttaaaaaaagatcataatcacaactactaagctagaattttttagtaaatttactactacggtaattataaacaaattatataggtttcttaaatagtagaacttaaaatataatgcaaagttatgtacgaatactatcttttaattaaaaataacgataagaatgttaaaaaagaaaaaaaaaaaatcatgttgatgatatatatgttgaagtaaaatttagttattaggtttaggtatacgtcaatcattcatgatacatggatcccaaacccataatatatcatgcatcgatctctgaaaatcaccaaagcaaaaaaaacccatgtaacatgatatactatattatgcatcatttcgccaatgtaacttctctgatgccctgaacctatttcacatatgactcatgggaaagaccgacaaagggatcgtattacccaaatatggttacgataacatccactgaatatcactcaaaatgaattattgtctcttactagatatattacggctagttgatgatttgtttgaaaagtttaatcttacaaaattattaatagatttgatgctgctcaaagtggtctcttttatttgcaccgcaaaaagccagtatatatccccattagaaaagacgtgacaaagtgtttaatagatcctttatgttttcctcggacccatgcatatataagtgtatttaaatcttttataaggtttttatagccataaataaacaaatttagttcaaaataagaataattaagtaattggaatagcgagacacgttccttgagatgataacacgagcatatattcttcatcacttttgtttgcttcatatcatatacgctaacttatgtgtgtgtgtaatatatgatctcagaactaacaagtaagaagaagaagaatgtcggagagtttcaaagtgtgcttctgttgcagcagaagctttaaggagaaaacgaggcagccaccagtgagcatcaagagactcttcgaagcttactcaagaaacggcaagatgtctttcgatgagcttctaagatttgtgagtgaagtccaaggagaacggcacgcagggttggactacgtgcaagatatcttccacagcgttaaacaccacaacgtttttcatcaccatggacttgttcatctcaacgccttctatcgctacctcttcagcgataccaactctcctcttcccatgtctggccaggtatctaagtttggaaactttttatggatttatttcacaaatggttttgtaattgggtatattatatgttcttggttgggttaaggtgcatcatgacatgaaggcgccgttatcgcattactttgtgtacacgggacataactcttacttgactgggaaccaagtgaacagcagaagcagcgtagaaccgatcgtgcaggctctcagaaaaggcgtaaaagtgatcgagctcgacttatggcctaatccttcagggaacgctgctgaagttcgtcatggcaggttggtcccactaacgaagtcttataatcaacaaacagactccaaaaaatgtcacacactatatgtgttttggttctctcatcaggacgcttacttcgcatgaagatttgcagaaatgtctaaccgccattaaggataacgcgtttcatgtgtctgactatccagtcatcatcactctcgaagatcatttgccacccaagcttcaagcgcaagttgctaaggtaagttggttttgcagaaacagagtatatatttcgttctctgaaaaagagtgatttacaaatttgattgattctatgtttgtagatgttaactaaaacatacagagggatgctgtttcgtcgtgtctcagagagttttaagcattttccatcaccagaagaacttaaggggaagatcctgatctctacgaagcctccaaaggagtatcttgagagcaaaactgtacacaccacaagaactccaacggttaaagagacttcgtggaacagagtagcgaacaagattcttgaagaatataaagatatggagagtgaagctgtaggatatagagacttgatagcaatccacgctgcaaactgcaaagatccttcaaaggattgcttgagtgatgatccagagaagcctatacgggtcagcatggacgagcagtggctagacactatggttaggaccagaggaacggatcttgtcaggtaaaatatagagtgagaggagtcataatgttgaacctttttcgactcaagagttataagatgaacctgagtcagagtttgaaaaaaaacaaaaacaggtttacacagaggaatctggtgaggatatatccaaagggcacaagagtggactcgtcaaactacgatcctcatgttgggtggacacacggtgctcaaatggttgcttttaacatgcaagtaagtggaactggctcatcatcgtttgacttgttaaaaaatggttgaataatatttgtgttgaaaagggacatgggaagcaactatggataatgcaaggaatgttcagggggaatggtggatgtgggtacgttaaaaagcctcgcatcttgctagacgagcacacactcttcgacccttgcaaaaggtttcccattaagaccactcttaaggttaagatttacactggcgaaggatgggatttggatttccatcatacacactttgatcaatactctcctccagatttcttcgtcaaggtaaacaacaactactactcttcttttaaactagatttcttcgtaactgtgtgtgtgttgcatttgctgcatcagattggaatagcaggagtaccgagagacacggtctcatacagaacggaaacagctgtcgatcagtggtttcctatatggggcaacgacgagttcctgtttcagctgtctgttccagaactggcgcttctgtggttcaaagtccaagactacgacaatgacacccagaatgatttcgcaggacagacatgtcttcctctgccggaactgaagtccggagttagagccgtccggcttcacgatcgaacaggcaaggcctacaagaacacgaggcttctcgtcagcttcgccttggatcctccttatacgtttcgttgaatctcgttttctttccgaaataagccacacagtgtgtatctctgtttgcacgtttataaatttataatgtacaattatttgcgccctagctagaacgggataaagtgtgacaacatataaatactattaaagattcgatatttgatgactgtagccgcctgcctagaacggggtgccttgtttgacttgccaacttcaaccacatttctttttgtttacttgaaagttaaaaataaatactagagaggaagaaaaacagagctttctttctaagatcatcaacgcaccatggaagaagaaggcagcccagatatcatcatcgttggcgccggtatctccggcctttccaccgctgttggactacacaggtgtgtgtggcgtgccttttgagttgttattaagcagagtaagttaactaaagtggtgtgtgtcacaggcttgggatcagaagcatggtgctggaatcttcggagacactgagagcgacaggatttgcatttaccacttggttcaatgcttggaaggccatggaagctctcggcgtttctcagcatattcgcagtctccatgatcgccttgaagggtatcaaactaacactattattactattcatatataatcagctcagtaaaaaaggggactcatctttgattttgctgcagatgggtggttggaacaatttctgcaggaactcctcccacagagatgctgtttccagaatccgagtatgtttcttcttctctgcacagagcatatgaatgttaaaacaataaataagataacttcaataatattgttgaatgattttgtcagagaatatgagtctcgatgcgtacagaggaagctgttgttagaggctctagcaggtgagttgcctgaagagaccatcaggttttcgtctaaggttgttcatattgaattgtctggatgctacaagaaggttcatctctccgacgggaccattctcaaaaccaaggtaaataactacttgtcctctgtaaaccatgtgaggcctggtcttgctacggaattgtagggtttctaaacgaaatgcaggttttggtagggtgcgatggagtgtactcagtggttggtaagtggctaggcttcaaaaatcccgctacaactgcccggttagcaatccgagggctcacacattttccggaaggccatggatttgggaaaaggttcttccagttttatggagacggcgttcgttccggttttatcccatgtgaccacaacactgtctactggttcctaacccacacctccactgatataggtgaagatatgcaactttacctgatatctaatatctaactacaagcagcttcttgttcatatcatactactgtctttgactcttctccttgcgcttgttagatgaggagacaaattcggaaatcctcaaagagtttgtgctgaacaagatcaaagacttgcctgaaaacattaagaatgtggtggagaccactgatcttgatagcatggtgatgtctcaactgaagtaccgacctccatgggaactgctatggtcaaacatcacaaaagacaacgtgtgcgttgcaggagatgcacttcacccaatgactcctgatatcggacaaggaggttgctcagccatggaggatggagttatccttgctcgttgtctaggtgaagcgataaaggcaaagagtctgaaaggtgaaacagaagaaaatgaagaagagggttataagaggattgaagaaggtttgaagaagtatgcaggagaaaggaaatggagaagcattgatcttataacaacggcatatacagtaggattcatacagcagagcagagggaagtggatgaacatgttcagagacaggttcctgtcgtcttacctttctaggatgctgctgaaaaagtcccatttcgattgcggaagccttgtcccatgatgattctcaaacataagtcaaaagcttgtgattcttcttgtcatcaccaactgcagaacagttttcacctttggtttgcttcaaagactatctatctgtttagtgttatttcatataacaaactcagaattaataaagtaagtttgtgtagtgaacaagaagctcttttattttttacggcaatctaaagctctgatatcaacaagtgatgaatgagaaaagaaaatgactacttcaattgaaccatagcagaagttatgtttattacattataacgtatgcgagcctcgttcaaacaggaatggattcagaaagaaaaagaaaaggaacctgaaggctgaggagagatttgagtgttaggaaagagagaagaggcaaggtgacaaaagttcccactggatcgaatcgcatcagcggcaaccccggtggccggcgatggcgagcagcgatgaagacgcatgtgatcatctgggcggggctgggtttttaaggaatttctcctctatttgggcctttcttttttctattttaaggcccattttgtgactgcttatgggcccatttgaatacaggagaaaggtcgccactattgaccaagtcatggttgctgccacttgattgataaagaaaaacgaaaacaaacaattatgtgatttagatctgagtctgaccaatattgttatatctttaggaatttgtttgtttgtaataatttataagtcaatagtcaaatgaatggttatcgtagacttttccaattgccattttcttgtttataaaaatatccataatacacagacttaaaggggcctctgactccattatatctatcgaatcatatataccagtcgtagtatgacgcgttgaagaacagaaacgaaacgaaccaaaaagtcttctccggcaactttagatcctccagcagcaaggtactcactcttatgaattc

SEQ ID NO: 684 - DNA, 91938 bp, Arabidopsis thaliana
gaattcaagaactgagggtcattttgtcactcctaaagtgatggcaataccgaaagaaaaaagtgtggtgcaaaagccagggatagcccaaggattcgtgtgggatgcatggactgagagggttgaggcagccagagacttgagattttcttttgacgggaatgttgttgaggaagatgttgtctcgccagctgaaactggtgagtagaacaatacaactgaaacacatgacaatcttaggttgcttacactttgactgtacaggtggaaagtggtctggtgttgaatctgctgccgaacgtgatttcttgagaaccgagggggatcctggggccgcaggttacactatcaaagaagctattgctcttgcacgaagtgtggtatgtatgattgccacatattttaattttgatgctaattaatggttaaattcttttttccctccattttggctttagctgaacaaaacctgtaggctgagactgcgtttttttcgttatcactgctcattgatttgtatgtattattgatatatatatcagattcccgggcagagatgtcttgctttgcatctgcttgcatctgtactcgacaaagctttgaacaaactttgtcaaagcagaataggctacgcaagggaagaaaaagataaatccactgactgggaagccatctgggcttatgcccttggaccggaacctgagcttgtcttagcattgaggtaatttcctgatgggtgtaattttgagacttatttgtgaagttgtcactcataaatcataaattgtttgttcttatcaatataagtttcttttcttctttaggatggctcttgatgacaaccatgcctctgttgttatagcatgtgtaaaagtgattcagtgtctactgagctgttctcttaacgagaatttctttaatattctggaggtatagttgatttttctcactcctaagaagttatagtcctcatagaacgtgattatacatgttcaaactgataaaacccatttctatttccagaacatgggaccacacgggaaagatatcttcacggcctcggtgttcaggagtaagccggaaattgatcttggcttcctccgtggttgctactggaagtacagcgctaaaccctccaatattgttgcgttccgtgaagaaatcttggatgacgggacagaagatacggatactattcagaaagatgtttttgtagccggacaagatgttgctgctggtctcgtcagaatggatatccttccaagaatttatcaccttctggaggtgagatcactatctatgtgtaactcagcaagtaaaatcattctttttgtgtcgttgcttagttttctggtttttttttaatgttcatgatttcagacagaaccaacagcagcgcttgaggacagcataatctctgttactattgcgatagcaaggcattctccaaaatgcacaactgcaatcttgaagtatcccaaatttgtgcaaacaattgtgaaaagattccaattgaacaaaagaatggacgttctttcttctcagatcaactctgtccgcctcttaaaggtaatactggtccgctcatacaaaattatcttggggtcgttatattcattcgtctttgatgttttttttacagaacctgatgattcgagtttgttaagctatcaattctcagagctattgtaaccttcgttcttctttctctctttttaatttcactaaggtgttggcccggtatgatcaaagtacttgcatggaatttgtgaagaatgggactttcaatgcggtcacatggcatttgtttcagttcacctcatctcttgactcatgggtgaagctagggaagcagaactgcaagctttcatctaccttgatggttgaacagctccggttttggaaggtctgtatccatagtggctgttgcgtatctcgcttcccagagctattcccagctctgtgtctgtggttgagttgtccatcattcgaaaagctcagggagaaaaatctcatcagcgagtttacttctgtgtcaaacgaggcctacctggtccttgaggcttttgccgagacacttcctaatatgtactcacaaaacattccacggaatgaatctgggacatgggactggagctatgttagccctatgattgattcagcactgagttggataacattggccccgcaattactcaagtgggagaaaggaatcgaaagtgtctctgtatcaactactactctgttgtggttgtattcaggtgtcatgcgtacaatttccaaagtccttgagaaaatctctgcggagggagaggaagaacctctaccatggctaccggagtttgttccaaagattggccttgccattatcaagcacaagcttcttagtttttctgttgcagacgtaagtaggtttggaaaagactcttccaggtgttcctcttttatggagtatttgtgttttctaagagaacgatctcaagatgacgaactagcattagcttctgtgaattgtcttcatgggttaacacggactatcgtgtccatccaaaatctgatagaatctgctagatccaagatgaaagctccgcatcaggtaagtatttccactggagatgaatctgtgcttgcaaatgggatactggcagagtctctggctgagctaacatctgtgtcgtgctcttttagagattctgtttcatcagaatggcccatcgtgcaatcaattgagctacataaacgaggcggattggcccccggcgttggacttggttggggagctagcggtggtgggttttggtcaaccagagttctgttggcacaggctggtgccggtcttctgagtctctttcttaacatctctctgagcgactcgcagaatgatcagggatctgttggctttatggataaagtaaactccgctttagctatgtgtttgattgcaggtccaagggattatttactcgtggaaagagcctttgaatatgtccttagaccgcatgctttagaacacctggcctgctgtatcaagtcaaacaaaaaaaacatatcgtttgaatgggaatgcagcgaaggggactatcatcgtatgagcagtatgcttgcttctcacttcagacatagatggttacagcaaaagggaagatcgatagccgaggaaggggtcagtggggtaaggaagggcacagttggtctggagactattcatgaggacggtgaaatgtcaaatagttcaactcaggataaaaaatcagactcctcgaccatagagtgggctcaccagagaatgcccctacctccacactggtttctcagcgccatctcagcagtccacagtggtaaaacctcaacagggccaccagaatccacagagttgcttgaagttgcaaaagctggagttttctttcttgcaggacttgagtcatcgtctggttttggatcgcttccctctcctgttgtgagtgtaccgttggtttggaagtttcacgctttgtctaccgtattgcttgttggaatggacatcatcgaagacaagaacactaggaacttgtacaattatctgcaggagctttatgggcagtttcttgatgaagcgagactaaatcaccgtgacactgagcttctgaggttcaagtcagacattcatgagaactactctacttttctggagatggtggtggagcagtatgctgcggtgtcatatggtgatgtagtgtatggccggcaggtctcggtttacctgcatcaatgcgtggaacactctgttcggctttcggcatggacagtgctctccaatgcccgtgttctcgagcttctgccgagtctagacaagtgcttgggagaagcggatggttacctcgaacctgttgaggtaatttacaaaaataataaaatgttgatagtggtgaataatggcatcttgagcatccaactaagataaaatggtgaattgatattgcaggaaaatgaggccgtccttgaggcctacctgaagtcatggacttgtggggcattggacagagctgcgacgcgtggatcagtagcctatacgctggttgtgcatcacttttcatctttagtcttttgcaaccaagccaaggataaagtatccctgcggaataagattgtcaagactcttgtcagggatttatcaagaaagcggcatcgtgaggtaacttgaaatccctcatctcttgttcaatgtcattctggggactgaggatgataatgaaacgtggaaataatgtttcaggggatgatgttagatctcctgcggtataagaaagggtctgcgaacgccatggaagaagaagtgatagcagcggagacagagaaaagaatggaggtgttgaaagagggttgcgaagggaactccaccctcctcttggaactggagaagctgaaatcagccgctctctgtggaagaaggtgaacgagagaatgagaggaaagaaagtctgtgtgtttctttctctgttttgaggttctcttacagatgaaaagctgtgtaattaaaaatcgatgttcttcttctgttcttgtaagattttggatttttccaatttctgacaaagttcaattaaaaaacttgactgacattttgaaagcgacgtgtctgtcttagaaatcaatcatatattggcacttcctatcaagagagtttggctgaacccaattttactaaattatcattatctcaaacacaacaaggatagatcatcctcataggcgatgttgtttagtggttcagcgatcccattaagcagcttctgctctcttccggagaaaccccacactcttcctatgaaactctctcccgctgcaatccgatcttcatcctcatctgccccggggtcgttgaacttcgatctgaggacgtattggacgactctgatcaccgagatcaaccagaagctggatgaggccataccggtcaagcaccctgcggggatctacgaggctatgagatactctgtactcgcacaaggcgccaagcgtgcccctcctgtgatgtgtgtggcggcctgcgagctcttcggtggcgatcgcctcgccgctttccccaccgcctgtgccctagaaatggtgagatagattccactctctctcgccttgtaatctcaatttcgccgttagtgtttgatatgagtgagtaagaagaagaaatagaaagtctttgttgttgttgttgagagatgtgtgtgttgtatctaataatggaatgaatcaggtgcacgcggcttcgttgatacacgacgacctcccctgtatggacgacgatcctgtgcgcagaggaaagccatctaaccacactgtctacggctctggcatggccattctcgccggtgacgccctcttcccactcgccttccagcacattgtctcccacacgcctcctgaccttgttccccgagccaccatcctcagactcatcactgagattgcccgcactgtcggctccactggtatggctgcaggccagtacgtcgaccttgaaggaggtccctttcctctttcctttgttcaggagaagaaattcggagccatgggtgaatgctctgccgtgtgcggtggcctattgggcggtgccactgaggatgagctccagagtctccgaaggtacgggagagccgtcgggatgctgtatcaggtggtcgatgacatcaccgaggacaagaagaagagctatgatggtggagcagagaagggaatgatggaaatggcggaagagctcaaggagaaggcgaagaaggagcttcaagtgtttgacaacaagtatggaggaggagacacacttgttcctctctacaccttcgttgactacgctgctcatcgacattttcttcttcccctctgattttgggccctcttttacatttgggccttccttcgctatacgaaattaggccctgtaatggactgtgtatcgttcatttttagcccagagcttcttcgcttgaccattcatcttcgctaccacctgtcattatcattgttttttttttgtgtcggccatgtcaaaatcatttagttactacatgtacttttaaccaaatttatagcaatctactatgtatgtatttatttatttattttgaccaaaattcccaacttttagactagttgaattgtttagtgtttgaataagtgttttatcaccccccccccccccaaaaaaaaaaagacgtttcacaacatgcgagtacatttcctccaagataattgcgaatgcgacaattagtatagttctaaatgaagacctaagccaagtctatgcttttaacaactctttccactattaatcgttggccatcttatccaatatatctacatcatttgctatactatatacatatatccacgtttaatattttctttcaaacaagaaataaatatcttcagtctctttcattcggatttcggattataatcacacttaatttggctatcatacgaggattgaataatccgagtttgcgtacacaacatgtttattggactaaatgaattatatttgtgccaatccatatttgggttgcttactttttcatcatgatattatttctgaacttatctacctaatgtttgtataaactagctaatcccatattcccattctttatatcaacatgctgaataagtgaattatatcattgttttaagtgggactaatatatgcattatgcagagcacatctttgttactcttttgaacgaataagttgtttcaagtattttctgtacgtgttcaatcggatattttcgacaactaacatgttattttcgttcaccgcttcattaaatctaaagctttagttgaataagcagttgctagctgaattacatcaagtgatacctttatatgttttagaaattcaattaatgcagttgaaaatgtgtaggcttattacaactatattatcgggacaatatggacaccatcagaaattgatgtcccgattcaatgaattaacgtgtagacttacaactatatatcgggacaatggacaccatcgggaattgatgtcccgattcaatgaatctgttaaactcttttacacatttgtttaaattttcataatcaatcaatggatcgtgtaatcatactaattagtaaactacatatataattaagtctggctcatgcaagataatttataacaaacaaaaaacttatttaagtgtttctctaacattggccgtatccgttagcatgatccttgaccgacggtgtgtgtgtcattgggtcattagggtttatcatgtcaataataaaaccttgttaaaatatgggtattatttggtgataatattatcaaagtgatcatctgacattgcgtttagtggttgaatctttaatatatcttggtacttggaacggggaataaataaattaataaacacatgtaataacatagtatattgcttcatgatatgaatatgatacatataaataaacatggcacgcaaccatactatagaccagtacttgttaattgttgatgtaaataaactaggatgtattgaaatactgatttacgaaattagtgttttgtttttacgtggcattagtgatgtgaagaaatgaccgatgtgagaaagaagggagaaataaatataatgggagtgtcgatggatggattgcagcaaactttaacggcgacaactcgccgcttacctggccgtcccagtttgtgacctttggtgagagtaaaagggcaaaaatccacgtgggctaaaaaatggagccatgtgccgccacatcatcggtcaattgggaccaaatacctctctatactacttattagtaacttgactatatatcttatgtttttttttataatactaataaaattatgggcgaccgaatcaaagtggtttattcctttttctggctgccgcatctttactctccctctctggtcaactcctacccgagatctatatggagtaccattttattaaagaaagaaaaacaaaaacgaaagtcagttaatttatctctccaaaatatatatatatgaccaaattaaatcgcattgcattaggaatgactgcatgcttaacatatatcgtgatatgcatggggtgtgttaatcataaaaaaatgccatataatttacaatgtacgtgtatattgtgagattaatttacaatttgcgtgtatatctctagtttaagagtatgttacttggaatgattttaaatactaaggaatagagattgcgttagaacgcgcataagacatgtttattaataatatacacgagcagccatacctgcaccacgtgttaccccattatatatgttttaggtttatgataatctcttttctataattttggttgactagcgtgctataagtttagttaattatggtaatgtagtatacaaagttttgatatatatcacacacaacataagagtaaagaatcgtgaatcctccagagatgaggggagtgagatgcgagagagagagagagagacgtttctatagttgggccctaagtttgtttttccaatctttaatgtgtggggatactagtttttactaggtgccaagcaaagcagaacaaaattgaacaaaagggatagattagagggaaagtaagtagggggttggaaaaaggataagtaagaaaacaaagggaccagaatagtaaaacatacaggtggaacctgatccggataagtgagtggggtctttatgaaagggggccacttgtaagaaaacgttttaattttgatcaaaaagggcgtatctgttggagggacaaatggagaatgtgttggattttcttggggatttgatctctcttcattattactacggtttaatatttgattatagtaataataatcacgatttttaaagtggcattaattaaggattaatccagagaagcttcttttgtccacctgcaatgactttaatacccattttagacgttaaaggatcagtatcgccacggcggcatgactcatccgctccttccaatacgccgtcgttttatacccccacctcgaattgaaaaaaaaaaaaccccaacaacaaagataaaaacgtaaaacgaaaaaagcatatcaatctctgtgcctctctcaattctcaaattctgaattctgatcgtatcttcttctctttaagattatcatttgaatatcttcttcatcttcttctccaagcccctctctctctgtatcgatcaatcatcaataggaggagctagcgaggggattcaataaagagatcttcttcttcttcttcgattcactttcctttcttttccattttccctttcgtcgtcgtcgtcaatggtgatggaggacaacgagagttgcgctagtagagttattttcgacgccttacctacctcccaggccactatggaccgccgtgagcgcatcaaaatggaggtcttcgatgaggttctccgccgtctccgtcaatcggacattgaagacgcccatctccctggtttcgaagacgacctctggaatcacttcaatcgcctccctgccaggttccttccttgcttcttcttcttcttgcatgttgttgtgccccattcaatagacgactgattttgttaaattatggtttaggtatgctttggatgtgaatgtggagagggctgaagacgtcttgatgcacaagcgattgctgcattctgcttacgatccccagaatcggcctgctatcgaagttcatctcgtccaggtgagttccttccccactccacttttatctcttttcttctttgttcccttttactttgtataatcccagacgagtgagattcctccacattctcagcacctatgatgattgcttagcctgatctttcatcttttatgttttgcctcttttgtcaacttttggattcctgggctcacaggttctttcgtcactcctcttttcttaaggttcaacctgccgggatctctgctgacttggactctacttctaatgatgctggtcattcttctcctacccgaaaaaggtttgctttcgatacttatcctattcctcattctcttaacattttctatcaaacacaaagctaactttcaacttctcatcatttttcatccatcttcttctttccagcattcatccgccgcctgcctttggttcatcccctaatcttgaagcacttgcacttgcagctagtttatcccaagacgaggatgcagacaactctgttcataacaattcactctattcacggtactttttttcacctacaacacaagaactgatggtttctcctttgtttctggcatcaaatattgtcgcagttccaactcaccctgttgtttcaaatgcaggcccttgcatgagataaccttttccacagaagacaagcctaaactcctttttcaggtatttgattagtacttgttgcttggaagaattgggtttagcaacttgttctctcaagttattgccacatgacttacaacaactaatgattcttatctaaatttcaaaatctatgatttctcgcttcttgcatgataaaaacttcaaacttcaaattacctctttaacttgtttgcatgttttgtgatccctggttttcaacttatccattttaaatgcaagtacaagtcttccttctctttcaccagggtacacctcttgtcgggttattcgtatttcttgctcccaaatacagtctgcaaaattttacctttttatttatttatatatttctaagaaaaaatgtatggtttagtctgacgatgccatcaagtagaatatgtatgtgttctgcaattacaaaatttaaatatgaattcaattattactaagccagtgtaaatgatgcagttaactgccttgcttgctgagcttgggctgaacattcaagaggcacatgctttctctacaactgatggctactcactagatgtttttgttgttgatggctggccgtacgaggtactttttccttgttctgatccttatccttttatagttatactttatcgatgctctatagaacataagcgtgttggcatgtggctgtaatccatttcttttcaagaggtccatttatttatagaatccttggctttatgctttttcgaacttttagtgatctagtagctgaaacgcaactattttgatacgcatacgcaaaaggttccggattataattgtggccgtcatgctatcttcttaattattcaggaaacagagagacttaggatatcattggagaaagaagcagcaaagatcgaggtacttgtttccaattgcaaacttaattaacgtcatgcaaaagatattgaaatttatgattcattgacaaccttttcttcccaaagcaccagattctgagtgaaatggaattagatgctttatgtgaagtcttaaagtttttcatagtgacaccatctgacgcacaagtgttgtgataagttattaataattcgttttcatcacactcagttgcagagccaaagctggcctatgcagcaatccttctctccggaaaaggaaaatgggcaaacaggtgccagaacgcatgttccaatacccaatgacggaactgatgtttgggaaatcaaccttaaacacctaaaatttgggcataaaatagcgtctggttcttatggagatctgtaagttggctgtatctatcaaactcatgttttatactaaagtgttcagatgttaatctctctccttccttctgtttacctcttgttttatttcaggtataaaggtacatactgtagccaggaagttgctatcaaagtcctaaagccagagcgtctagactcagatctagagaaagagtttgcccaagaagtctttattatgaggtttgtgtgccttcttgtctgttcccttgtaatcttatatgcagataaacgataacagctgacgtaaagtatcattcaaaatctttcggttttcaggaaagttagacacaaaaatgttgttcagttcattggtgcttgcaccaagcctccacatctgtgtatcgttacaggtatgttgcagtgaccatgtttatccgtattattcagtttgatatcacgttctacgcttaccattttctttctcgcctgtctctttctcatttaatagaattcatgcccggtggaagtgtatatgactatctacacaagcaaaagggcgtctttaagcttccaactttgtttaaagtagctatagatatttgcaaagggatgagctacttacaccaaaataacataattcacagagatttgaaggctgccaacctcttaatggacgaaaatgaggtaatacttgcaacttattattatatatctttgtcatccatgtacactagtacgtttgtagttggaatgtacgaatctactatatactttggatgaaatactgctccatgttaatactcaaatagtcaaattacatgtttgtgctgcatcacatatgatatctccttgagcttgcgttatacaggattttaaccatcatattcttctcatttacgtggtgtccactacctagttagttcttgcttctgtggatagcaattcagttgcagattcatatatgtgtcttggtttattgttacaggtggttaaggttgcagactttggggtggctagagtgaaagcacaaactggagttatgacagctgaaactggaacatatcgctggatggctccagaggtacgtttttcatggtggttttatatatagtctgcattgacccgcttcccccataagacacttagtaaacctggttacctggtgacggttattagattgactagtatctcattctgagactatgcttttctgaaattcaggtgatagaacacaagccatatgatcacaaggctgacgtattcagctacgggattgtgctatgggagttgttgactgggaaggtacttgcgtgactctttagtctgaaaaacaaaatacatgacctaaaatggctgatagtgtctaactcatgggttgatgacttgatgtgatggcagcttccatatgaatacatgacgccgttgcaggcagcagtaggggttgtccaaaaggtaatcggtgtgaagaatgcattgtgattgtaaacgttttcaacatcatcttacaaaagagtgtgattggcagggattaaggccaacaataccaaagaacacgcatccgaaattggcagagctattggagagattgtgggagcatgattcgacgcagagaccagacttctcagagatcatagagcagcttcaagagatagccaaggaggtaagtaaaaggatttggataggatgaaatgaatatgtgtaaatggaagagtaaacagaattgagtgtgtgtgtgtgtgtgtaggtaggagaagagggagaggagaagaaaaagtcgtcaacaggactaggagggggtatatttgcagccctgaggagaagcaccacacatcattgaaaactgtaaagcagcaaattaatttgcagatgaatgataatgagcctctgtatttgtttgtgtgttgctccccttattcaattgattttgatttcctttgtaagttgctgcaccacactatctctatctcaaaaaaaaaaaagcttttaatgaaagaaaaaactcttcatttagcatcaaagcaaatgcacccaaaaatagaaaaaaaaaaaaaaggctcacgccgaagcaataaaaccaccacaaaaagtcaaaagccaaagtcaaaagagaggcttcgtgggccctaaaagggatacactttggttctctgtttctgttcttcttctctaataagtttttctctagtcgttcaatattacttaacgataaatcagactttttaaactcgatctggtggggacgatgagtggaaggccggcgaaaaggccgaggaccgaccattccgtcgtgaatgtctgggaaagggagctgggtctcttacccaatcgcagtttctcaaaccgtttttcagcatccgaggtctattgattcactctttttctttctttctttagggtttcgttgaatatattgcgttactttgctcctttgtttatgtttaacagccacccaatgcgttacgaacaatatgctactcaatgaacgtttttagattcttcttctcaattgtctttaattttactctaattgctttcagaagaatgtgtttgcaaatgataaaatctttattgtccaaatgtctagtgataggaaaccaaacaactatcttaattagatattgatgattttacaaaagcaggatctattgcggcgtcttggacttgacaagaagcttgataagcataagggatgtgtaaacacagtgagtttcaatgctgatggagatatcttgctttctggttctgatgacagacaagttattctttgggattggcagactgcttctgtcaaactctccttcgattccggccacttcaataatattttccaagccaaatttatgcctttctctgacgatcgtaccattgtcacatctgctgctgataagcaggtaccactctgcctctcctcttcatacctcctaccgcgaaccacacctcttgatagctcctcatgttacaactagcttatgttgatttttgtaacaggtccgctattccaagattcttgaatctggacaggtagagacttctttgttgggtaagcatcaaggacccgtccacaaattggctgttgagcctggaagtcctttctcattctatacttgtggtgaggatggggctgtcaagcatgtgagttgtatttttcattttgttttcttatcgtctgtttttatacctaggccgcctaaaacaacacgtattttcagtttgatcttaggactcgggtggctacaaatcttttcacttgtaaagaagcaaagttcaatttagttgtctacttgcatgcaattgcagttgatcctaggaaccctggtcttcttgccgtggctggaatggatgagtatgctcgtgtctatgatattcgtagctatcgctccgagggttggtataattttacccaacccatagaccacttttgtcctggccatttgattggagatgaccatgtaggaataacaggtctggctttctcggatcaaagtgagctccttgcttcgtatagtgacgagttcatctatcttttcacccctgatatggggcttggcccaaccccatatccatcttcaactaagactgaggagaggatgacgcctcaggtttataaagagcacacgaaccgtgaaacagtcaaaggtgtcaacttttttggacccaagtgtgagtatgtggtaagtggttctgactgcggccgaatattcatctggaggaagaaagacggagagcttctccgtgccatggaagcagacagacatgttgtcaattgtatagagtctcatcctcacatgccactgatgtgtagcagtggaatagatactgatatcaaaatatggactcctggaggaaccgagaaacctctgtcgccaggaaatgcgaaacaggtaatgccacatctattgctaacctcgtttgcttcttttatttttggtgtttgaagactcggaggatatgctttagttaacaagaatgtaactttggatacaatacatgtgactggaggctgaatttggttttggaaggcaaactaaatgtttgtatgtttgcttcttggaaacaggcttcgggttttggtaacccacgatggttcgacggatattatgtggatgacgatgatgattctgacgatgaatctagtgaagagagttcagatgatgatgatagttcggaagaggaggagaatggtgaagttgatgttgagattacgaaggatgatgataatgatcatggggatgatgatgatgatgatgatgaggatgatgatggggatggggatggggatgagggatgagatttgtatagacatgtatttatctaaacacaaaataaaacagcatatggtaacagtaccaaagaaaggattagttatagtttagttagatgtcatcatcgtggatacaaaatactattcaatagacattttcattcttaaccaaatggatcacatacataatcagcttctgtaatgtcagattgtcagtttcttcaatgaactagaatttccaacaatccaaattccaaagtaatttaaaatgtaaaagatgtcattggtaaaatgggtttataatccaggaaactttgagcccaaaaaaggcccatagatcatcgaaggcctttgatatctgcgacggcgagatcagcttcgtcttcctccaacgctcgatttagggaggatggtggtttctccggggctgctctcaactgtttcaggtcactattcgctccggttgcttcttctatatactttcccactgctttttgatattgtccttagtaatcatctagcttcgattttggttcataggcgtaatccgattggctccgtcacaccggattctaagacgcgatgggttcggacccatttgcttcaagttttctggggatttggtaatttacctttctttctattgcggcttaacagcttaagaagcttttcacttaagctctgtttgagtgtgtagagtatcaatgggagagtcagtcataaacatgtgcgtggaagtggcacggtgggatctgtaggttccgctcgtgaaagttggagctctcataagaagcttcccgaagaagagcccttatggctgagtcttcttagagacatggtctggtatgaaattctcccactgagtctagcttttaatatatatatctgctggaagagtctgaatgttgcattatattgaattgcatttttcttgtgagaaggagcacgagatctctcttgtctttcatggctgagcaaccaagtcagctgaaatacatagagtggccaacttttgcaagcacggtatgtcttgttgttgttgttacaacatatgagaaagaaagagatagtttgtgggtgtaactttgtttttttttgttttggtaacaaacagctaaagactgctacactgagtctgtgtctggtagctgtattcattgttgcgctatcatcggtggatgctgctctttgttacatattggcgttgatcttgaggaaagccccatgaggaaggcaactccattatcatttgtctcttgtagccttattgataggtgaatgtttttgatgtagatagaatgcaggaggatgtactcaaaatcaatgtgtttctaaaagttgaattgaaatgaaacctctctggtctagtatctctcacacattaagggaaatccaatcatatatgtcccaagcaaatcacaccataaataataaggaaggattcaacatgttgttggtttacaagtaagagaataagatgatgctaggtgctacttgagaacaacagcagcattgcgaatggagagatactggtggacttggtcggaagaaagtgatctcacagtctggaaaacatgagcattagcatagcggaggtttgttcttgggtccacataaggtgcctgcgagggattagagaagctcattgagttttgttgtttttgggtagtgaataaatttgtagaaaagaatcgatcactcaaaaacagaataaaacctcatatccagtaatatcgcaaagtctcttgcatggttgagtggaaggaggcgattcaatgttaacatctgcgaggcacaaagaagatttgatttttgattcaaacagagtcaaaaatccattcaaaatcagaaatcagagagagagaaaagagttacaagtggggaggtcgggaggaagatctgggaagttctcagcttgaagaatctgcttgaggtgtttccaccttctgctgcttgattgtgcttttgggtacttttcgtaggcttgcttcttcttaaagctcaatcgcgacgccaccactatatctgcctccatcaactctctctccatctctctctctctctctggaaaaaaaaaccttattaattccgacgaggagaacgacgacgacgaaggcttctttcttatacggtgtcctcttaaaaatcaaaccggtccggtacggtagtggaatgaacaatttagtaaaccgatagcagtgtttacattggaaaccgaattgaatgaagtgaagctgtttctttctagatcccccaaagcgagttcatcatcttcttcgcctggattcgatcaagactagcactttcatcagatttgattacaatctctcttatcttccaagttataatcataatatccgagcaatttgggatctgggtctttcctctacattcaatttcttaataaagctggcctctttcttccgagatggttcttgagcgatgatgagtgactctcagcgatcactttctgtgcgattgagccgccggggtgagagaagcaatcattactcacaatctaaaggtctcaacccaactctttttgaactaatgatcatcactttcttttaggtatagtggtttacacatgaaaatttgaagatgacccccgttatagtgttttgtttccactatagaagaatctaatgcgtaatgaatgattatgtcttcgtaatgaatccctaatggattctattactttgtctccaatgatgcagatgctgtggctggcttcttctctcccaccagattgcatgctgattacactttgaaaaaaatttggaaggcaggcttccttcgcttgcttcttgttggcggcattgtctggatgctactcattctatttgccctcttgtttcatgtttggtcctgtcaatcttccctttctttcttctcaggtttcctccaacttctttacacttgccattcttcactaaatctatcatttgtcatacactcaatagaagatgttgttattgtactagttactccaaccatcttctgcattcaccgcagattctatcacagtaacctcatgttctttgtaatttcgttgcagctatttgcaacaaagaaggcagactctatgtcatgttggacactattggatttgtacctaaaccccagcaccgtaagatttttatatcactctgtttagcttctgcttattctagagctacgcttagcaactcttcttttctaggatgccccattcccgttgattatgaccctgataaggtgctcctaccaagtgataaaaccgcagatacaattgtcagaaatttgacctacgtaacagaggatgaatcctctaagtctcagtttcctctatttggcggaaacataagctggtctgaacgagaagaaagcttcaaactgaaacctgagatgaaggtaaaagacttgttttaaggcaatggctaaacctcttctaccattcttcccacgaataatttctaaattatttatttcattacaacccaaaacgtttcaggtccattgcggattcatgccacgtggtggtgctgaaatgtcatctctggataaagaatacgtaaagaagtgcagatttgttgttgccacggggattttcgatgcatatgatgaaccccaccagccatcaaacataagcaagcgttctatgaatctcttctgtttccttatggtggtagatgaggtctctctcgatttcttaagaaaaaatactactgtgaggaaagatgttgaaggaggcatatgggttggcatttggcgtctgattctactgaaaactcctccatatgatgagcctaggaggaacggtaaagtcccgaaaatcttaactcacaggttattccctgaagcacagtacagcatttggattgatgggaaaatggagcttattgttgaccccttgcttattctagaaaggtatgaatacaaataaggatataagacccgtagaaaatggagcttattgttgcccttgcttattctagcagattatatacttctccacaatgtttattagcacagggactatcagtctccgtgttactaagaaaaggctaatagatgcatatttcgctttcatctcactttcaggtatttgtggcgtgggaaacatacttttgccattgcccaacacaaacaccaccgaaacatatatgaggaagctgatgcgtgcaagaggagaaagcgatacgcccgacctctggttgatcttcatatgaaaatatatcgatacgagggcttggaaccatggagcatcaagaagaacactgttagtggtaaagaccatagcaaaaacatcaatgtcatcgtgcaccttattgattactaagcatcttgtcttgcgttccacagatgttccagagggagctgtgataataagagagcacactgcaatgaacaatctgttcagctgcctgtggttcaatgaggtacacctgttaacaccgagggaccagctaagctttgggtatgtagtggacagactaaaaggagccttcaaggtgttcatgttccagaactgtgagtataactctctcttcgaactgcaccctcacattcgagagcattcctcgaagattgagtgggtcaagagtcttcaggaactcaaagggaagggagagagtttgaaggaaagccgaggcggctttgggctctggactccttaccctggtgaccttgattctgttgagctgccaaaagtagtaagaacttctaaagctggttgagacagtaaacattatacactagtttttaactttcgtttgatcgctgtcttcggttttccgaattttccaatttatcaaacatacacgtcttttgaattctatttgtagatcgaagaatcaaatgtaaaacccaaattgttataaaaaaagaagaagaagctgcattgacattcgtgacagtaataagacaaacaaatgtatgttgttctgaaccagtaatttggtaccccaaaaaaaagatgcaaaatctcataaattatacaagaatttcaatttctcttacaaaaagaataatcaacctggcttgctcagtttcgaagacaataataaagggtctagcgattgggaacaaacaccatttattgggacggacgactcagaggtgtgatccaaccgcagaagtaaaaaataaagatgcatttggacatatcatcacaccaaggcagtagaaactatgttcttcagttggtggtatcgcgactgtaaaactgatcaagggttttcgcgggtatacggtgaagtaactcacgggggaagattctgaggagagtccatgccaggtcgagtgactggaagatgtttcgggtatcataagctccctgagccacaaacttcctctcgaacttatccaagaactcaagatatagctgtttgcatcagataaaaaaagtgttaagaggaataaaacggaaagcatttagactgtggtaagaagaaaagaagagagaccagatcctcggaagaaagagcttcttctccaaccacggctttcatggcctgcacgtcctttccaatagcgtaattggcatacaactgaaatcacaaaaacataataacaagttaagctcaggctaaaaaagttgacaagtaaaacttacataaacaaagcttttctgcaatgctggtaatggacaagaaataaagtcttacttgattagaaacatcagagtggtccctgcgagtcataccctcaccaatggcactctgcaatacaaagtcattgttacgtttacaatcgatcatttggcttcatctattatttttgaatcccccacacttaccttcatgagacgagacagagatggcaagacattgatcggagggtagatctgtgaaacacaacgaaaattggtacaccagctattacataaaactagaaccaacgccttacacttacacacaaactaaagtgaaacaactttcaaaatttctgacatttcgggtattacagaatataaacacaacataataaatgtataagtactgttcacttataggcttctagcctttagcttgggcgtacatagattattattacattcaaatgtcagtgttttgaagtcatgaacaaaatgtttcagttttcaagaatatttctcttcatccacatgctctctatatctaaaaactaaagggggtgattctggatttaacagaataaatcaaaagtccaataataggattgttactaggtatataggtttctcatacaggttaatttttcacgttgtaataacatcgattatgataagaactttgaaccaactatcttctgaaagagtgtacctgtctattgtgaagttgtcggtcaatatagatttgcccctctgtaatgtatcctgtcagatctggtgtgggatgcgtgatatctggacagataaagggggcaaaaaaaaaaagacatttcgaacaaaattatccacctgaccaacaaaccttttatataggaccaacaaatattcctctgtaagaaggctttatgatcagattaactgcataggtgtactacactaacactagtatatcagccactcagtctgttagagtcccaaacagctagacctagatcgggcaacgacttattatagcatggtttgtctattcctctaagccagtttccgggtgagttctattccatgtttactttcaactatctcggtgtcggtcaaggtttcctatcacctattgtttacttcaaacaaaaatcattcgaattaaaggcaataatgctaaaacaaaacaccatgaaaatagcactaagaattaccatcgtttggcatggttaaaatgggaatttgagtgatggaacctttcctcccttcaattcgccctgctctctcgtatatggtagccaagtcggtgtacatgtaacctgggtaaccacgccttccaggcacttcttcacgggcagcagagacctaagggtattagtcaacgttaaacactatttcaggcttcctatcatctcaaagttcaagaattgtgaacagagcatgcaaatatcggttatcacctcacgaagagcatcggcgtaggaactcatgtctgtgagaatgacaaggacatgcttgccacattcatatgccaagtactcagcagttgtaagtgcgatacgaggagtgatgatacgctcaatagtggggtcgtttgcctgtgcggaaaacagaatgagaaaccttcagaaaaacattggaactaaaatttgcttcaagatgtctgtagtgtgattgcgagacttgccaagttaaggaaaagagtcactctctccatcgatccattctcctcgaaatcacgtttaaaaaattgtgcagtctccatgttcacacccattgctgcgaacacaatggcgaagttatcatcctcctgatgctgcaaattcacataaatggaccaatgtgatactgttttataatacattatggcattacacaactaccaactcattgtagattttaccaaatcaaaggagaaggacaaggggcgttaagtcacaaaaaagtaatactaacaaatctccccaagtaggatttggtcgacagagcgcatgcaatgctctcataaaaaaagaaagattcaagagagaatatcctagcttaacttaaccctcttaatttatcttgtaatgggtatgtctaactgtctaagggatcactgttataattgtaacaaaccaatttccaactgtagacacggaccagtaatgtataaatcgtgatacctcgagaagattatctgacttctctaaacgcttaaccaaaccagcctgacggcaaatctgagcagcaatttcattgtggggaagacctgcggcagaaaagaggggaatcttctgtcctctggcgatagagttcatgacatcaatggtggatatacccgtctgaatcatctcttcaggataggttctctcactgggattgatagaacttcctggagaaacaaaagtctagaattatatctgtgtgttttattatgagatagtaattatgtgacaagaggctaaagcagctcaccagaaatatccaagtacgcctcaggcaatataggtggaccgttgtcaatgggcttccctgaaccattgaagatgcgaccaagcatatccaaagaaacaggagttttcaaaacctatggaaaaaacattggaaaatgtgagtatattatagacactgatactttaaaacttggtagcaaaaacaaacctctcctgtaaattgcacagttgtgtacttgttgtcgattccagatgttccctcaaatacctggacaagcaaatcaaagaaatttacctcgcagtgtgttgaataataatgactatgcaagattacattgatttacaaatgcgttcaattaagcatcaaagtggagacaagaggagcagaaaactaaagaagagaggaagattcaagaaacctgaacaacagctttctctccatcaacttcgagaacttgaccacgtcgggtagttccatccccaagacggatattgacaatttcttggtatttaggcccctagagaggaaagcagtatcatcaggaaacccatgggacgagaacattataaaagagaaagatggaaacaccaataccttgactttttcaaggatgacgagaggtcccgcaacaccagaaacagttctatactctgcggtataagcaaaagggtgtcaaatagaaaaagaaaccaggcaatgcaatcactgaatgatcaaatgatgataactcataagatcccatagggtatatagcaaataaaggacgtcttacccatgccgatctccagggtaccctccatttcaaggttgttttcagcagcacccattttagatcttcagaaatcagagcaaacaaacgaacatgtcagcaacaaataaaagaatcagagactcaaaggaaagcgatggacgtgaatctacttaattcgttccattttacccaattttagagctctatcaatatgaatttctcgatcagatcaacgggattacttaccctcagagcataaaacctaacaacaaattcaaaacgaagataacaaatggatgggaataatcgacaagtagagaaatgggaaagacattgtttagagtgtacgtacctctttcttctgaatccaaagatctgtgtagaggaagaaaggagccacagcaagagagagatctatgttggtggactatacatacataccaccgatttcaattcaatcagtttcataactttcagctaattacatttatagccttttactttcccatattatcacattaatcattttctcatctttatactttaaaatttttgaagagaaaaaaaacatatccaacgttctacttaatttggtatgatttttttattttatttaaaacacctaagttataagaaaacctagtttggtaagatttattttgtcccgctatttttagattttacagaaaattatggtcttttagaaaatcataagtttactaattagtaattaatacaaaatagtatttatcaaaatttaataattttctttattttttttcaaaaaagaaaagaataaatcaagtattgattgatatatgtgttaaactctttgctatttgcatttccgagagatttaataatgagagaaaaaatctaaaaatttcattttaagaaaagttgaaaactctcaggcgagattatatgagagctgagacttattgattggttcagaacacaactgcataccaaaggccatgtgttttgtaaggccatggtctgagaataagctgagtttctctagtctgaatcagtaataccttaaaaagcaagcaatgaaaattaatgaagaagaagaagaattcttgtcacctttctttctccagtacacagctaacaaagggaacaaacaaaactaaccacttgattatgatatatcctttcccacttgatgatgatatatcctttcccagtcaatgataataataatcaaatatatatatttatatatagttacaggaaggatcttggaaagaattttaaggacaccgtaaaaattcaatagtcaggaggcgccagcagcagcagcttgagtgggcgtggtgcaaggcgccagggtgttgtgaggtagattcacacccgctcctctcactgacacggctggtcctctcaacatacttcctctgctcactaggtttgtatcaaagaagacaacaatcactgttatgtcatcgtggaaatgtctcctcactcctctgtctatctttttcaggtctgagtatctcatctctctcttctttgccgcttcttgtagcgctactttcaccagccgctttgctatcccctgccattaaagagtccttattattatgtgcattctttatatatagtctagtagtacaaacagagtggggtgtgtgttctcacgtttcgcggatgattctggactatgtctactgcttcttggttgctcatatgttcccacagtccatctgatgcacatataatgaactgatcgtgcggctccagtgtatgcaccgtgatcgccggctctgcactcagtaatggcttgctgaacggtgacctcagccggaattttgcatacagtggttccctgttgaactctgaccttttcaaatacacatcaccaatggatcttgaaacctgagtatagtcataaagccactcagaaagacaacaggaattgtaagacatacaaaaacagatttagtccaactctagtttattaaatacctgaatgatgccttttactcgccagacgttatgtttcagaaccacaatatctggatgatccggatgcagggcctgaagttcccgtctcactgactctatagatgcgttgtgctctgctgagagctgagtggcatgagcttcacctgttaccctcatgacttgtcccagaacggcccgtgagtcccctgcgttggccacgtatagcttcccatcgcagatgacacttacaagacagcatgatcccactgtggctatctgaggtctagtttgaaattgatttgtaactatggataagaagccttcttcagtggcttggaacgctttttttatcacctctgatgacatacactgttgctctgcagtaaaccctgtgcataacataaaagatgagagatcaaaactagaaccattttctggactagtgctgctattagagaaatgcttctatatttcctttctagattagctaatccaaacaagagttaaaagcataggttgagcgactcactcttgaggtggtggaacatatgatcattgatgaagcgagatgtctcaggcccaccgtggccgtcgtagacgccaacaaaggtgccaaagggaccagagtcgtgggagctaagagagccagactcgagctggctctggtcctctagcaagctgttggcttgaacgacggccatggagaagtcaccaaagacgtgctggccggagtctctgaaccagagcaaaccctcttggcggccaccagaatctgaggcagaacgagcctgctgatctgaccgtggccagagacaggcattcagaaaattcatcaacccagatagcatccctcatctcatccgccacaacatagaacttgtccgtttttaagatagcacaaatcacagctctctgaaatctgcaatgccaaaagtagttcttcacaggaacggcgcaagtttcacacagcttaaaagagtgctcttcttcaagacctgaatgaactcaaagacaatctaaagagcaaaaaagtgagaaaactcaattgttatgagtggcaatagaaatgaatctgtaggagattatagtgagactgattagtctagtgattgaacaatctaagaaacttgatgcaacattgaaaagttaacatctttaagtaaggaaaccatcggaagaaagcaaaattagtgatgcggcaagcaagaaaaaaaaacaaaaggatttatgcggcagattccaactggttcgtattcgctaccaaaaaaaaggaaactttaccttgcaagatgttggaagcaactcaagttgagcaagaaaatgaatgaagagaaggatctcaagaggacggaggagatgtgggcgtggaatttcagagcttgtagatctactacgactacggatggatcaaccaaacacaaaatttatacttttatataaaaatgaacaccgatttttattattattaaattaaatataagcgagcggatgaggaagaagaagaccaattgacaaaaaaaaaaactttttaagaagaaaaaaaaatggttatcccctcagaaactaatgatctttctttcaatgtctggaaacagtgaacaatgaaggtaaaagagagagagagagagaggtcaagtcgccgaacgagacatcctccttcgacgtttttatgtaaaaaaaagaaagaaagttggagttgttttttttatcttctctctttatctctctctatagtcttaagactaagagtgattcttaccagacaagacccataaaagaccaacgatggcgaggtcggagccagcacatcaaaggtcccagctttcgggctccacttccctctcgtccttttttgcctcattagatggacaacaccaaacagtggcaaagaataatattacagtttttttagggaagaaaataaaatagttgatattattgatataataattcattcaagtctcctctttattttaaaaatattcaactcttttactttagacattatcataaactggggtcaaacggaagatttttcttcaacgtttaataaaatctcttaacacaaatcaaagaagagtaaaaatatacggtttcgataaaatttggttatgtggcggtgttacatgactacgactgataaaactacacgagtacttttgtttttctgtcaccaagatttatttcttttacttactccatgtgtttttttctttcttcgttaaaactactcctcgtaaattataatcaagattttaagcagtgtgcatataaaataaaatacatgtacagtctagaaataatatatgtggattcatgaatctttcatttttaatttccccacacaatttgtatcaaacgtttaatgcccataaaagtggtggtccaggaccctgagattaaaattttaaaaaaatatatagagaagaggcttgggcttgaagaatgaaaaattgaataacaaatatttaaaaaaatttgggacccgaaagtgattgggataaagtgagatatgtcactttacctaacattatttaattttatattaatgtatgtaccactaaatttggcccttttctccccatcgactctttgtagttatttatacttttgtagtaccaataatagaagaatcaactataaaaatttcagctcaataaagaaaaacagaactatgaattaagtgagaaactcaaaagcctgcttctaaaacatgaatacgtccacgataattatcactaagttctagataatctaattttgcgggaccaaattgatgtatatgcgaactttttcatacttttttcaccaacaaatgtatatacttcccatcatgcatgctcccatggtatctcgccgagtgtcaatatatgtgaacttacataaccaaaaattgatttataaagataacaataataagggagacctaaaaatagagaaaagggtggtgtggactgtggagaaggtccctacttacagaacatagcttccatcaatcacacaaaaatccaaccactctgaacctttcacttcaggaccaacttcgttatccaatcatctcccaatatgccaatactttcacttatatatgaacgtgtatatataaacccttcacatttacttcacaaaaatatcttttaaaaaaagatcataatcacaactactaagctagaattttttagtaaatttactactacggtaattataaacaaattatataggtttcttaaatagtagaacttaaaatataatgcaaagttatgtacgaatactatcttttaattaaaaataacgataagaatgttaaaaaagaaaaaaaaaaaatcatgttgatgatatatatgttgaagtaaaatttagttattaggtttaggtatacgtcaatcattcatgatacatggatcccaaacccataatatatcatgcatcgatctctgaaaatcaccaaagcaaaaaaaacccatgtaacatgatatactatattatgcatcatttcgccaatgtaacttctctgatgccctgaacctatttcacatatgactcatgggaaagaccgacaaagggatcgtattacccaaatatggttacgataacatccactgaatatcactcaaaatgaattattgtctcttactagatatattacggctagttgatgatttgtttgaaaagtttaatcttacaaaattattaatagatttgatgctgctcaaagtggtctcttttatttgcaccgcaaaaagccagtatatatccccattagaaaagacgtgacaaagtgtttaatagatcctttatgttttcctcggacccatgcatatataagtgtatttaaatcttttataaggtttttatagccataaataaacaaatttagttcaaaataagaataattaagtaattggaatagcgagacacgttccttgagatgataacacgagcatatattcttcatcacttttgtttgcttcatatcatatacgctaacttatgtgtgtgtgtaatatatgatctcagaactaacaagtaagaagaagaagaatgtcggagagtttcaaagtgtgcttctgttgcagcagaagctttaaggagaaaacgaggcagccaccagtgagcatcaagagactcttcgaagcttactcaagaaacggcaagatgtctttcgatgagcttctaagatttgtgagtgaagtccaaggagaacggcacgcagggttggactacgtgcaagatatcttccacagcgttaaacaccacaacgtttttcatcaccatggacttgttcatctcaacgccttctatcgctacctcttcagcgataccaactctcctcttcccatgtctggccaggtatctaagtttggaaactttttatggatttatttcacaaatggttttgtaattgggtatattatatgttcttggttgggttaaggtgcatcatgacatgaaggcgccgttatcgcattactttgtgtacacgggacataactcttacttgactgggaaccaagtgaacagcagaagcagcgtagaaccgatcgtgcaggctctcagaaaaggcgtaaaagtgatcgagctcgacttatggcctaatccttcagggaacgctgctgaagttcgtcatggcaggttggtcccactaacgaagtcttataatcaacaaacagactccaaaaaatgtcacacactatatgtgttttggttctctcatcaggacgcttacttcgcatgaagatttgcagaaatgtctaaccgccattaaggataacgcgtttcatgtgtctgactatccagtcatcatcactctcgaagatcatttgccacccaagcttcaagcgcaagttgctaaggtaagttggttttgcagaaacagagtatatatttcgttctctgaaaaagagtgatttacaaatttgattgattctatgtttgtagatgttaactaaaacatacagagggatgctgtttcgtcgtgtctcagagagttttaagcattttccatcaccagaagaacttaaggggaagatcctgatctctacgaagcctccaaaggagtatcttgagagcaaaactgtacacaccacaagaactccaacggttaaagagacttcgtggaacagagtagcgaacaagattcttgaagaatataaagatatggagagtgaagctgtaggatatagagacttgatagcaatccacgctgcaaactgcaaagatccttcaaaggattgcttgagtgatgatccagagaagcctatacgggtcagcatggacgagcagtggctagacactatggttaggaccagaggaacggatcttgtcaggtaaaatatagagtgagaggagtcataatgttgaacctttttcgactcaagagttataagatgaacctgagtcagagtttgaaaaaaaacaaaaacaggtttacacagaggaatctggtgaggatatatccaaagggcacaagagtggactcgtcaaactacgatcctcatgttgggtggacacacggtgctcaaatggttgcttttaacatgcaagtaagtggaactggctcatcatcgtttgacttgttaaaaaatggttgaataatatttgtgttgaaaagggacatgggaagcaactatggataatgcaaggaatgttcagggggaatggtggatgtgggtacgttaaaaagcctcgcatcttgctagacgagcacacactcttcgacccttgcaaaaggtttcccattaagaccactcttaaggttaagatttacactggcgaaggatgggatttggatttccatcatacacactttgatcaatactctcctccagatttcttcgtcaaggtaaacaacaactactactcttcttttaaactagatttcttcgtaactgtgtgtgtgttgcatttgctgcatcagattggaatagcaggagtaccgagagacacggtctcatacagaacggaaacagctgtcgatcagtggtttcctatatggggcaacgacgagttcctgtttcagctgtctgttccagaactggcgcttctgtggttcaaagtccaagactacgacaatgacacccagaatgatttcgcaggacagacatgtcttcctctgccggaactgaagtccggagttagagccgtccggcttcacgatcgaacaggcaaggcctacaagaacacgaggcttctcgtcagcttcgccttggatcctccttatacgtttcgttgaatctcgttttctttccgaaataagccacacagtgtgtatctctgtttgcacgtttataaatttataatgtacaattatttgcgccctagctagaacgggataaagtgtgacaacatataaatactattaaagattcgatatttgatgactgtagccgcctgcctagaacggggtgccttgtttgacttgccaacttcaaccacatttctttttgtttacttgaaagttaaaaataaatactagagaggaagaaaaacagagctttctttctaagatcatcaacgcaccatggaagaagaaggcagcccagatatcatcatcgttggcgccggtatctccggcctttccaccgctgttggactacacaggtgtgtgtggcgtgccttttgagttgttattaagcagagtaagttaactaaagtggtgtgtgtcacaggcttgggatcagaagcatggtgctggaatcttcggagacactgagagcgacaggatttgcatttaccacttggttcaatgcttggaaggccatggaagctctcggcgtttctcagcatattcgcagtctccatgatcgccttgaagggtatcaaactaacactattattactattcatatataatcagctcagtaaaaaaggggactcatctttgattttgctgcagatgggtggttggaacaatttctgcaggaactcctcccacagagatgctgtttccagaatccgagtatgtttcttcttctctgcacagagcatatgaatgttaaaacaataaataagataacttcaataatattgttgaatgattttgtcagagaatatgagtctcgatgcgtacagaggaagctgttgttagaggctctagcaggtgagttgcctgaagagaccatcaggttttcgtctaaggttgttcatattgaattgtctggatgctacaagaaggttcatctctccgacgggaccattctcaaaaccaaggtaaataactacttgtcctctgtaaaccatgtgaggcctggtcttgctacggaattgtagggtttctaaacgaaatgcaggttttggtagggtgcgatggagtgtactcagtggttggtaagtggctaggcttcaaaaatcccgctacaactgcccggttagcaatccgagggctcacacattttccggaaggccatggatttgggaaaaggttcttccagttttatggagacggcgttcgttccggttttatcccatgtgaccacaacactgtctactggttcctaacccacacctccactgatataggtgaagatatgcaactttacctgatatctaatatctaactacaagcagcttcttgttcatatcatactactgtctttgactcttctccttgcgcttgttagatgaggagacaaattcggaaatcctcaaagagtttgtgctgaacaagatcaaagacttgcctgaaaacattaagaatgtggtggagaccactgatcttgatagcatggtgatgtctcaactgaagtaccgacctccatgggaactgctatggtcaaacatcacaaaagacaacgtgtgcgttgcaggagatgcacttcacccaatgactcctgatatcggacaaggaggttgctcagccatggaggatggagttatccttgctcgttgtctaggtgaagcgataaaggcaaagagtctgaaaggtgaaacagaagaaaatgaagaagagggttataagaggattgaagaaggtttgaagaagtatgcaggagaaaggaaatggagaagcattgatcttataacaacggcatatacagtaggattcatacagcagagcagagggaagtggatgaacatgttcagagacaggttcctgtcgtcttacctttctaggatgctgctgaaaaagtcccatttcgattgcggaagccttgtcccatgatgattctcaaacataagtcaaaagcttgtgattcttcttgtcatcaccaactgcagaacagttttcacctttggtttgcttcaaagactatctatctgtttagtgttatttcatataacaaactcagaattaataaagtaagtttgtgtagtgaacaagaagctcttttattttttacggcaatctaaagctctgatatcaacaagtgatgaatgagaaaagaaaatgactacttcaattgaaccatagcagaagttatgtttattacattataacgtatgcgagcctcgttcaaacaggaatggattcagaaagaaaaagaaaaggaacctgaaggctgaggagagatttgagtgttaggaaagagagaagaggcaaggtgacaaaagttcccactggatcgaatcgcatcagcggcaaccccggtggccggcgatggcgagcagcgatgaagacgcatgtgatcatctgggcggggctgggtttttaaggaatttctcctctatttgggcctttcttttttctattttaaggcccattttgtgactgcttatgggcccatttgaatacaggagaaaggtcgccactattgaccaagtcatggttgctgccacttgattgataaagaaaaacgaaaacaaacaattatgtgatttagatctgagtctgaccaatattgttatatctttaggaatttgtttgtttgtaataatttataagtcaatagtcaaatgaatggttatcgtagacttttccaattgccattttcttgtttataaaaatatccataatacacagacttaaaggggcctctgactccattatatctatcgaatcatatataccagtcgtagtatgacgcgttgaagaacagaaacgaaacgaaccaaaaagtcttctccggcaactttagatcctccagcagcaaggtactcactcttatgaattcctaacatatgtataattactatacaaccaaggtactaatttgcatgccttcttatgttccggtctaaccacagatcatttctcaatcccatcctttgcctcaacccaatatggacttcttcacttcaagcaaagctaagaaagatagcaaaaaatcatcaggtaactcccttttttgggaatctaagataatagccggaatgtttaactctcgctggggatggtgaaagactagactttctcaaactgatcctatttagtatttactatcatcatcctcttagcatatccaaactttctcttcaggactctttggcaagaaaactgtcagcaagagcactccgggcagccctgctcatccccccggcgctagatccccgcccccatcgtatctttcaaacaaaagagccgaaacagagtacgatttccccatgtccaatgaacaaagaccatactggaaacagcctgcctctgaacgcgtccccaactcccaccctaggcctcccgtgtatggatacggcacggtactcatctatcccctgtttcattccccaaaaccaattgagtttatttgaaacaaacgtagtatacgtatctaatactgtgtttgccttctcctcaattgcagcccgaccatcgtcgagaccacggtagagaaagaatggaggccatgagttatgagccagagaccaacgctccttccagcccatatcatccagctggaaaccgcacggtactttctgcttcttctgattcgagtcttctactgtctccaccgtttgtttcctgataccattctctctaaacctgcagcctgaacgtcctaggaaatcaaccgagtatcgtcgagaacaccaggatcgaatgtatgaagcagatacccgaagcaatgcgagcccatttcacccattcagaagcccttctccatctccattccacacggtactaataacctaaacttctgatgacctgcttcgtattcaaacccatcaatcactaaatagaatgcattgctttttaaatgcttgatttcagcctgatcgccgcagagaccactacgacatgtatgagcctgaggccaacaccatgctgcagaatagcgctccagggagcccattccatccagctggaagccgctctccaccaccatacagaacggtaagtcttgctcgtgattcttgagtacacgatgagccacatagatgacataaactctctctctctaattgcagcctgatcgtcgtagtaactatgataaagagcaatttgaggacctgtacgagcaagatggtgatgtcacaccgcgaaacagctctccaccgagcccgtttcatccagcagcatacaaaacggtcggtactcaaaaactcgatactggcttctttttggggataagtaaatcaaattctctttctagtgagtcacttagactgacaatagaatatgttcttgttatgctgcagtctgatcaacgtagtaaccatggtaaagagcaaattgaggacttttatgagcaagatgacgatgtaacaccacgaaacagctctccacctagcccattgcatccagcagcaagccattcaccaccaccaccacaaccatacagaacggtactcaaaaaatcttaagtctggctcattgtttttgtttcagcttcttcctagtgataaaaaacgtcctcttgacagtgagtcacatatattgaattttctctctaattgtgcagcctgaccatcgtagaagccaccaggataacgaggatttcgaggcaatgtatgagctagatggcgacttaatacaccagaagagcgctcctccgagtcccgttcatggaccatactattcatccagcgacgacgataatcactccacctacctctatccagaaatccgcagcccacttcgttccaggatcgtatccgagaacagcacggtgtgaatcctttcccaactctctctctctctctctcacagtcactaatgattctgaaatgcctaaaaaacaaagaaatgacaatgctttaaacctgcagcctgttcaccacaactaccagatagttgcggccgagacctatgagcaagacaagcagttcgagccgccggagctgcctgacgagtcacaaagcttcacaatgcaggagattaccaaaatgcgaggactcaagaactacgaaagcggcaaggaagagagtcaatcaatgatatccgaggcttacgtatccgtcgcgaattacagagtgaggcagagcgtgtcggaaaccctgcaggcgatcatcgacaagcacggcgacatcgcagcctcctcgaagctgcaagcaatggcaactcggtcttattacctggaatccctagccgctgtggtgatggagctgaaaaagacggttctgagggatttgacgaaaacgcgcgtggcggagatcgcggcggtggtgaaagacatggagtcggtgaaaatcaacgtgtcgtggctaaagacagcggtaacggaactggcggaggcggtggagtatttcgggcagtacgacacggcgaaggtggagaaagaggtgtgcgagagagatctgacggcgaaaaagggggagatggaggagatgacggcggagctggtgaagagggagaaggaaatcaaagaatgcagagagaaggtgacggtggtcgcagggaggctagggcagctggagatgaaaggttcgaaattgaacaagaatctcgacctcttccagtccaaagtccacaaattccaaggagaagccgtccttctccacctttagctccgtctccaatttcttccgttttggatctcattattcaattattttctattgacatgaaatgtttataaatttaaagtttggggccattagtgtaattcttaaaaagatttaaaaagcttttatgttgaatgttgagagtcaaggtcagctattgcagaagcgtagattgtttcagagtcaagcatctcaatacattgtaataatatgcatgcgtgtgtttcaagctatatatttatgtatgtgcattttactcttgtttatatcttctgtgatatcaaaacttgattgacttggtggtcaacacttgttatagcaaacaaacaaactatagcagtactctctcagtctcttgtatgcattgcaaagaaaaaacaaaacatccgtctcctttcagcctcagatttcaacaatttgttctttacttctgaaatttcctcatttcgtgaatccttcaagtcaattctgtgtcgtgttctcagacctattcattccatcacaatcatccatctcaatttccttccttcttcctctgaaaccttttgactctgtctttggttgtaaacttctttgcttttttcctgttagcgtaaaccctcacttttataacaacttctcactttcttcgtgtggaggatctttccagagagagagagaaagatatacgcttctctgttaattagtcaggttctaagttttgatctccaagtctctgagagggtagtggcatgtctggaatagtacatcatgattgtcctaactcaggaaatccctaccacgagtgccacgatcagtgtttcaagagaataagctccggagatgtccccaagaaggagaaaaaacggtttggtaagaagcttctcattttgtttgcatttcaagatgactgtacttgttatatagattaaagaaactgtggaactttgtctctttgtctaaggctttggtaaaccagcttgtagcaaggaaacgcctcttaccagtccggttcgtgttattgcgggaaacagatcaccacttccgagttattacggaaaaagaatggatgagtcagacgagtccccctccttctcttcctccgatgactctttcaatgcaaacttgcccacaccacgttccactttacatgggaacgaaactgccccgggaatcaattggctccccatgtcgccttctttcgctgtgtattgcaagaaagattgtttctcatcaagggtgagcatttattctcggtcagtgttatctatataaactttgttaagtgcacatcttttggatgtttattttggctcttgttttcgatgtgaagatcgatcaccgtgaaggtgaagctccaattcttgatgaaatgccatctaagactcggcttaagacacctctaagtcctgatactaggccaaggaaatcagaacacaggacaagaaaccaaggaccacgctcaaagactccagaacctagaggaagttaccttgaaccacccaggtctaggatcccacaaactcagccggtaccacacagatcccttgaaagtgctggtctcaaatcacctcagaaaggtgaaactcggcctcatatcccccaaactcagccaacatccttcaacatcggtggtaactatcattacgctgctcaagcatccaaatatcatgctaataaagcggattcagtgtacactaaagacagagacaaatgcgttatactttatcccgatattcttttgtcccctcaagaaaatctgacatcaagatccattacggtattggtctgtctctctgctttagcatctgtcatttatcttaattagtaccgcagaaacatgagtctgatcaacaagaataactttccactcttggatggctctatttatcaagaagagtattgctcaaataatcacaagaaattttccttcatctctcctgcagatgcttccccaaaaatcccgtacaccactagacaaacaatcgaaggagccattacagctgcctgtcgaatgccatagctttactccatctgagatcgaatgcatgaaagcgttaaagatttacgaaacaggagaggaaatgaagtcaatgatttcagagtcgtatgtctctgtaggaagctacaaggtcagagcgagcgtctcgtccactctgcagaaaatcctggacaagcatggagacatagcgtccggttccaaacttcagtcactgcgcacaaaatcttactcgcttgagactctagccgcggtggttcttgaactccaatcgacgcccctgaagaaattgaagcaggcacgcgtgttggaaatgctatcggttgttatagacgcagagtctgttaaaatcagagctggttggctcagggagatcctgaacgagattcttgaagcggcccaccactatgatggacacgagacaacggtggtggagaaggaagggcgtgaacgggatatgctgcttgaaagagaagaaatgaagaagatacaggaggaggtgagattgaaggagaaggaggcaaaggactttcgtaaaggagtcatggaaatggcagggcgtttgggagaactgaagatgaagcgagcgcgtttggagaaacgcttggcgtttctgagctccaaggtggaaaagtttgagggggaatctttgttagagaacgtcttttgatcaaccttatgcttttgttttggtttttctagctagcagagatggggttttatggttgcaatcaaaacatgatgtgctaaagaacttagaagacatgaaatttctgaaaatagtgaatggatttaaagacaagagtttatctacatactaaacaagatggatccgtatgtacagtgtcgtacacaacatgaaacaaaagagttaaacacgattcacgggcacataacgtcaaggcttcttatgctgtttctctatgtcatacaggacacaaacatctgcagccgttttcatctgacacacgcgaccacagaaaaaaagacacaataagaactagagatgcctagtctattagagggattgaatagttgtgaatcagacttacctgaatcacattgatgatctgcttgatggaccaaccaaatatgctcaaagccaagagtaaagagagcggtgaaatctgcatcaatgatttcactaccacctgaggtttgaaaacaattggaaccatgaataatgcagtaggaaaagctcaagagattaaaggggaaagagaatagaagagaagctcacgttcatcaagttttcggtttggttcgttgctatgagaagaaggattatataaagaacctgtagtcatttgactatttgagaaactctgtgtttacaatatctcccaatagaaatacattgaaaaaaagttaagtagctcagatatcaatgatccaattacctcgcaggaaacacagcaataacccatgaacatccggtttccataatagagtctaaagagccagctcgtgctatctttcacatccttatggctggtcttccctgataggaaggtactgcgaatcaagtattaaattcctggtttgctatgtacaagaacaatacatctaagaagttgaatgaagattttatgtagcaacaaagagtacctgtacatttgcagccagtgactagcgatatctaaagccagcaatgacaggaaaaccaagctaggcctgtttgtaattgtgaaagtccaagactacatgttaaacaaagattacgtagaaaaccagataagtccatgaaacggagatgtcagtgtaaagaagtagagaacactgacacctgtatatctgggagagaatcacgagaagacaggctgtgctgactctgtaaccatgcgcagaccccaaaatatatgacaaaaatgttaaatgagattaaaagaatgagcaagttgaaactcgggaatatgtagcggaagattcacctatctgtaaccatatccaaaacagctccaaatgtagagactgaaaggaaaagagttgtgtgttacgttcaatcgtttctgataatgtagaacaagaataaactgtgtatgggactaaaaatattgatcaatgagacaatgacatgaaatgtcatatttaatcaatgtcaggatcatagaggaagcataagtaatgagttagttgaagctaagaaaagagatggggagaatgaaaagagcaccttggttaaatttacgagcgcaccatccatccacagcatcacaacaaaaactggaaacaagattgggtaaagagtgactaacatatgaaagaagaagcaccaaacacacaagatcaaaaaaggagaagaacatgatgttggtaccacaaggataaagtcacctgaaaaagtacaagagggagaagagtgtcttgttggagaagcacacagagaaggcaatgcagttcaagagaactctcatgtaccctgccaattttgcatgtaacaacactaatctcatatggtttaaaaaaaatgaaatttttaaagacagaagaaaggaagtagcaaaaaaccgaccaacgatattgggaatgtagaggtagactgacaacgtcgccggtctctgtttagccataacagagagagagagacttcagtttgggcaatctgttccccaacgaagaaaacaaggatctcgccaatgaagggatacctacacgagattagaaagaaaaaaggaacaaactttgtgggaaaatgcgtacggacagaggaaccccaaatccggtaaatacgtgaacacacacacacaaacaaagtaggtcaatcgattttcagacgcaactggaaatatcaaatctcaaagtaagtatggggaaattaaatatttctcacctgcctaagagaaattgggaacgaagggatccgcaggatgagcctgcagactttgttggaagctctcacaagaatcagattcgcctctctctcaagcaaaaacgttttttcgtttaatattctcaaattcaatttgtgaaatacagtactaacatttgttaaattatttgtaaaacttttctcggtttcgccgcttcaacactgaaaatttgcatattttatttgcaaacaatacatacacgcatatatcgttaattttcttcttcttccacgcacactttatttactgctgaattcggattgtgtcattagtcattactcactcattactaatttccacaaacctttgtatcttcatcgcttaagactataattgatgatgggattttcggatatatgaacttgaatcccatgggggtccagatatccagatggttctacttgcaagtcttgcaaatctaaatggaattaaaactcggttgatttttgtcaaaaaatcgccaaaaatataaaatggtaagtaagtgggcctcagaaaaatccattagaaagcctagaccaaattttggagtgggcttcataaaataaacaaatctggtcatcaaggtcggtacgtcggtgtgactttgcgagtcatcatcgattatccaaaaacaataactcctctctttactttcttcccatgcaccaagaatatattttttttattattatttattaaacaaaaaaaaaagtaaagcagcagaaaatctaacgcacgactcttgtcccaagatcagtctcagtcatcatcaaaacagaaaattttattatccattgtaattttatttttttcttacaaattacaactcttttttttttcattcatggaattggaatgaagaaatgttttaagccaatccaaaaaagaaaccgaaaaaaaaaaactagaaattaggaaaccgttagcaagaagagaagaatcgagacggcgactaggaaactgctgggaccagaaaagaaaggtgacccatccatcattcacttaattagatacatactgtattacttattacaataatgcctatatatattctcccaattcatcatttacttctttacacctccactttcccttttgcccctcttttttacagatttcactctctgctctactactctctcctcctcctcctcctaaagaaagttcttaactctcctgggttcttcaggtttttccttttctggaataaaaagaagaagaaatgggtgttcttgatcatgtctctgaaatgtttgactgctctcatggtcacaagattaaaaagcgcaaacagttgcaggtactttccctcttccttttcttatcttagcagattcagctgataacttagatcttggtttgcaaaaaaacaaacataataattcgttgaaaagttatgatgaatgagtctagtagaaactagcttcgatggttactaggaaagtttgagtgttacttagtagatctcgtatattatagttccataaatagactgccattagcaagtttattattgtggttttggctggctaatttgtgttacctttcttacttcagatcttttttaatatctctgtgtttttttatctgaagaagtatatccaaattgttacatgatataagtgggattttatttgaagcagtttttgttttgagttaatgttccttcctaacgccgaccgaatagattcttttaatctgaaatataagttgatacagccatctgttagattttacaccgggatttgtattcttctcgctgtcaggaatactatataaaatcattaatttccggggaaaccaaccacgttaatttttctcactagtcatgatgatatggttaaagtctttcaattgtggacatttactattcttcttagatatttttaaagtaggctaattttgtcgttttgtgtcgactgcttgatgaggatagacggtggagattaaagtgaaaatggactgcgaaggttgcgagcggaaagtgcggcgttctgtcgaaggcatgaagggtgtgtcttctgtgacgttggagcccaaagcccataaagtcactgtagtcggctacgtcgatcccaacaaggtggtggctcgaatgtctcacaggaccggcaagaaagtcgagctctggccatatgtgccctacgacgtggtcgctcatccttacgctgccggtgtctacgacaagaaggcaccctccggttatgtccgaagagtcgacgaccccggagtgtcgcagctggctcgtgctagctccaccgaggtccgctacaccactgcatttagcgacgagaacccggcggcttgtgtggtcatgtgatgtcatatggactactactgtttcaatttgttatggcttaatttaatgtcttgttttgtacattaataccataacggtaggtttcttgttttggttttagttccttggtctgtattccttacactttatgattgcaatatgtgtttttccctttcttccaaagacttttaatgttaataaatatttctacccaaaattaaattattttcatttatggtttgtaattgtgaagaaagcttcaaatgcggatcaagttgtagttaagaaaaccattaaattaaaatagagagagtagttgaaacaagggttccgagcttccctctttaacctaggacatccttaaaacaagggaacaatataatacaagttgtaacatttatgtatcaaagtgtttatcgatgagcaaatcaagtagaattaggatgaagtcgagaacacgatacttgatagcgattctacttgtaatttcgctctgttccaaggcaagcagccatgatgatgagaaaaagaagaaaggagtaacatacgacggttctgagcggaacttcattgatcataaatggaaaaagagagcttcttttctctggttctgttcattaccctcgaagcacacctcacgtaagcacgtctactctgtttttattattacccaatcaaaaagatgatttcacttcatggatcggattctggttttgttgcagatgtggcccagtatcattgacaaagctagaattgggggacttaacaccatccaaacttatgttttctggaatgtccatgagcctgaacaaggcaaggtatcatcgacttcaattctctcttaagatcattccttcttttttctttttgggtgatttgatcatttgccttaaaatggttcagtatgatttcaaggggagatttgacttggtgaaattcatcaaactaatccacgagaaaggtctctatgtcactctcagactcggaccctttatccaagccgaatggaaccacgggtacgaaatattcaaaccataaaaattcatttataagagatgctaacctaattcatatttcagagggttgccgtactggctacgcgaggtcccagatgtttacttccgtacaaataatgaaccttttaaggaacatacagagagatatgtgaggaaaatacttgggatgatgaaggaagagaagctgttcgcttcacaaggaggtcccatcatcttgggacaggtacacatatactacacattcatcatccatcttgtgaaagcagaaacattgaaatctctaagattacataaataaatggcagatagagaatgagtacaacgcggttcagctagcctacaaggagaatggagagaagtatataaaatgggcagcaaatttggtggagtcaatgaatctgggaatcccctgggttatgtgcaaacaaaacgatgctcctggcaatctgattaatgcttgtaatggaaggcattgcggagatactttcccaggaccaaacagacacgataagccctccttatggaccgagaattggactactcagtacgctccacacatcaaactctcatgatcaacacaaactacaatcttacgttggtttcttttgttcttaggtttcgagtttttggggatcctccaacacagagaacagtcgaagatattgcattctcagtcgctagatacttctctaagaacggatcccatgtcaactactacatggtacttttaaatcatgttttttatatgcgtcatgtttacatagattgagctttgtttctgtacagtaccatggcggaacaaacttcggacgcacgtctgctcatttcgttaccactcgttactatgacgatgcgccacttgacgaatttggtacatccagaacccaaaagttaagccataccagctttgggtcgtaatcacaagttgacggttattttataggtttggagaaagctccaaaatacggtcacctaaaacatgtgcacagagcacttagattgtgcaagaaggcacttttttggggtcaacttcgcgcccagacacttggtcccgataccgaggtaacctaaaccaaaaattatgttatccggtttttgtaaaccggagcttaacgattcaatactggttttgcaggttaggtactacgagcagccagggacaaaagtgtgtgcggctttcttatcgaacaataacacaagagatactaatacgattaaattcaaaggtcaagattacgttttaccgtctcgttctatcagcatcttaccggattgtaaaacagtcgtttacaatactgcacaggtgagtagaaataaccggttcgatttggtttaaagaaaaccataatgtttgatttatccgcattgttctgaaacagattgtagcccaacacagttggagagattttgtcaagtcagagaagacaagcaaaggtctcaaatttgagatgtttagtgaaaatattccttccttacttgacggtgattctttgattccgggggagctttattacttaactaaagacaaaacagattatgcttggtataccacaaggtataacttccttcgcaagcaacattttgtttttggtcttttaagctttatagagaaactttgtaagttgattccattgctaacagcgtaaagattgacgaagatgactttccagaccaaaaaggtctgaagactatactgagagtagcgagtcttggtcacgcactgatcgtttacgttaacggagagtacgcaggtactttaacactaaaattaaggggatataagacacatagaggtttttaactttttgtttgctaattttttggtagggaaagcacatggacgccatgaaatgaagagtttcgagtttgcaaaaccagtgaactttaaaaccggagataatcgcatttcaattttgggtgtactaaccggattaccagtgagttaaacaatcaagatcgagattatatctgtcacaccaaacagagtaaaaattttagttataatgtttcaggacagtggatcatacatggaacacaggtttgctggtccacgtgctatttcaatcatcggtttaaagtcaggaacgcgagatttgaccgagaacaatgaatggggacacttggtatatatatgcatgcgaccaatataatagaccatttttctatcttggtttgggatataatgaagtttaatccggttaatgcaggccggtttggaaggtgaaaagaaagaggtgtacacagaggaaggatctaagaaggtgaaatgggagaaagatggtaaacgtaagcctcttacgtggtacaaggtaaacacataactcaataaaacgtttcttaatatataagatgtttacgcatttgtcttaatcaatggattcacagacctactttgagacaccagagggagtgaacgcggtcgcgattaggatgaaagcaatggggaagggattgatttgggttaatggaattggcgtagggagatattggatgtctttcctttctccactgggagagccaactcaaacggagtaggtttctatagatatgacttgcgggacaagaaactgattagagactaaacccctatatatatggtggacaggtaccatataccgagatctttcatgaagggggagaagaagaagaacatgctggtgattctcgaggaagaaccaggggtgaagttagagtctattgatttcgtgttggtgaatagagacacaatctgtagtaatgtcggggaggattacccagtatcggtgaaatcgtggaagagagaagggccaaagatagtttcgagaagcaaagatatgaggctaaaggcagtgatgaggtgtccaccggagaaacaaatggtggaagtacaatttgcaagcttcggagatccgacaggaacttgtggtaacttcacaatggggaagtgctctgcatctaagtcaaaggaggtggtcgagaaggtaatgtgtgatgattgaagcatcttagttattgagtcatttttatatatatagttgatagctttgtgttaatttatggaacaggagtgtttgggtaggaattattgttccatagtagtagcgagggagacttttggggacaaagggtgtccggagatagtgaagacattggcagtgcaagtcaagtgtgagaagaaagaaggaaaacaagatgagaagaagaagaaagaagataaagacgaagaggaagaggacgatgaagatgatgatgaagaagaagaagaagaagacaaagagaacaaagatacaaaggatatggagaacaaaaatcaagatatgtaaacaagactacttctcattattttgagtcttggagtttttaaactcttttttgttattagaaaaaaacaaatatttaattagtaatttatagcatgtggtttttgttatcttttgttcaattaattatagcttaatataaaccactaattatgtaatttgttttgctaaattccttttacagttaggattccttgttttgctttaagctcaaggattgtgagttagggtttcgtttaatctcgtaagcaaatcaacgaatagaagatggtgtttctctcgattcccaacgtgaagaccatgtcgattaatgtgaaccctagtgcaactaccatctctgccttcgaatcgaacaattggtccatcaacgcacgcatcttccccaacctctcctttgttactcgctctgtctccgaaaccctagtcttgattccgattctgccctggtgtcggatctaggttttggccctttctctacggtagttgttaatgtccctctaatcggtggagcggctccgcctcagccccgcttcaatttaatgcctccgtcaaactatgtcgctggtttgggtcgtggggctgcagggtttactacccgctccgatattggtcctgctcgtgctaatggcgatggaaacgctgacgtgaatcacaagtttgatgattttgaagggcatgatgccggattgttcgctaatgccgagagtgatgaccaagacaaagaggctgatgctatttgggacgcaattgataggaggatggattcgaggaggaaagacagaagagaagcgaagctcaagcaagaaatcgagaattacagagcctccaaccctaaagtttctgggcagtttgtggatttgacgagaaagttgcatactttgtctgaggatgaatgggatagtattccagagattgggaattactcgcatagattgtattaggtaggcgtctgatgaataaaacgaaatcacaattctgcaatatcataatatttatttatagcattaaattacacaagtagattaagacaaatatgtgacttgtgatgtaataagagagcttatataatgaagctaaactatatatgtaactcattgttaaacatattcaaagtgccgtccatattctagttttctgagacggatcgaacttgagtttccatagttttgaccgaccaaatgaaatgatcgatcttttacatagagggaatctaagaaacgaagaagaagaagaaaaaaaaaaaaaggaaggaaaagataagcctatcatctttctttatctacacaataatggcggcgccttctgcagagcctgcaaagacaaaatttacatcacaagtcacaaccctatatcccctccattacaaagtctccgggagaacaacagtagtcacctggattttggggtatcttcggctttgtcagatcataaaaacccaaaaaagcagagaaatcaaaaccagtcttccgatgtaatgtacaagagaggggaggaagaaacacagccatatgttgcttatgagaggtcgaacgatccttgcccttcgttgatggcgtagagcagtttcttgtacatgatttcctgtttcaataacatacaactcctcaggctcaccaacaaccacactaacatggactcaagaagaatagaagacatgactcacctttgtagaataaggagggagtttaaggtagtttgcgcaagtcatgacactgggcaaatcatcatctgctgtctccgaagcccctgctccgttggctgctgcacttgaggtcgatgagtgctgcaccagccaaagacacatgcaattttagaatcccatgcaaaaccaataattaacaacttcacgacagtaagacataattcatctgaataactcttgccaatgcaaacaaacaccacaatacgtgtctgctcttagaaaaaaagagcaaaagcccttgcccacacatagatgccttctaacatatccttggtggctaaattacaaaaatgacttgcaaatgatttaaagtttttttacctttctcacaatcgtaagctttgggttcagaacagctaagccaccaggaggaagcctaggagctccagttacaaattggcagaaagccctctgctgatctgctgtaagttctcccatgatctccagtaactacagggtggggtgaaaatcagaatcagaaagtaatcaacggttcagaaacaaaaggaaaggtaagaataaataaagatatgatatctaacaacttgatggataacatacgttaatgattgccggacttttggcattatacccatgatcaaatttgatatgttcagcaagagtctccacctgcaagaaaagaaagttttagaaatgatattttcttacatctaagggattcaagtctcttggttatggaaattgaaaagtgaaaaattcacctcccacaactctctacgaccacacagcaaatagtccagctcagaaggggtgaatatttgtagagatgttatgtcaaacacctgataattatgtgcagaaacagaaaggttttgtaagttaacaaatgaaggtaaaagtttaaggtccgccctaaaaagaaaaaatgcaagtctctaatctacagaattttctatattatgtttagaagccaaaggcaatagacaaagaaagagacagaaagtctgcgagactgttaacctgattgaatccagatctgaaggcttcgatctgccgagtgactcctctcttgacagtagcatcaacgacaagggatatatactcctcaagattagtaatatcaacctgtaacaaaacagcacgtcatcagcaatcatggacatgttctaaaagaatagtaagaggtggggtgtaagctaagacagtacaatttcatctcctgatctcaggatgtactcaggatagccaggtagcgtgaattccaaggagagatcttctattcggcatccacgtaaacataaatcagaaatcgtgctgctattgtcaccacctactccctccagatagtgcttgcgggcaacaacaacacgcagctcttgcaaggtcttgccaagttcagcgtcaaataatacaatatcatgcaaatcaagctcctgcttagtcaatgaaagaggacgaacttattagcaaaggccgacagaagtgaaaaagtagaaaccactatttcacttttaactaaacaaacactagtagtaaaaaaaaaactcacttgaccaagaataagtttataaaacgctgtactcaatgggacgtccaatagccgtccatcttgaagtgctttggccatcacacgccctaaaaggcggaaatattcaatgactttatgaaactgaccaccttcagatatgtcagctgttgagggccaaggccgaggaaacaatccaagtggtgccagaactatatctctgttagctgcagatggttttccgtcttcaatctcatctctaccaatttgcatagataccttgtcaccagaacttgatctccacatccctagggaagccttttgcagatcatggcttagaagtgtgtaaaactcaagggtagggcctagaccagtaccaacttcaccaaaatattctacttcaagcacagctttctggctagaatacatctccataacttttgcagcagaatctaatatcctatttcgggatacacggactttctggcgctgcaatctccctattctcatctctcgttcatttgtagacccactgccgtcagcaccttgctgctgctgcaaacgattcaatgcacgagacaacccaaaagcagtcgagtagaaatactgtctccgggtttgaaacggaaacaaaaatgggcatgctctagtcaactggtagcaccaagagggaagacttccactgcacaaagcaagcgcatcctggatttgtcgagccaatttgggtgtaagtttgctattgacaaattcatcaagaggaaccttagcagcagttgtactcagatcatctagacttgtaattttaccctctgcaaaacgatcggaaagagtttgggctcttaaacgagggcaaagctgatttaaaccctctaatacacgtaacagtgccagaacattatatgtagaattcgacttctcaaggtcgcatggaagctccccttgtaagatactatccaaaagagatgccctatgtgactgagattctacactggaattggtagtagcagatttcgtggattttgacggtgtggtagaacttgctccaccaacagacaacctattcacttggctgtctggcctctggtacatgatggtgtaaatatcattgaatctgcttccatcacttgagactagatcactgccaccaaacctgtcatcatcatcttcatctagcataagttgtcgctgtacagcctgataaatcgtcaaatgcctactaagttgttttcctgccgcagtaaatatcaacttagagggctcatctgaacttcgatttagggtacgtccatgcaagtccctacttcccctgatacctctaccactggcagctccaagcccagccatcgctgcagcagcaaaggagagtgcacctctagaaccataggaattcccaatgccagtatcaatagaatcagatgcccttgctgctgcggctccactagtgcctccagaagctggattcatttgtcggccgctggttgctagaccatcatcatccactgagtccgccaatttcacatcatggactttatcaggcgtgcacatgggaagactgtcatccaaaacctggacatgaaagtatatatgattgtgaaggtattgaaagaaaatcaagagcacatgtaaggtacaaagccaaagttattgatagcagcgagataaatatgagaaataggggcataagctagtaaatctacttggtctattctaaaaagaaaaggttccaagtgagttcggcttatcaacaaaacagactcaacaaggcaagataattcgaaaatatgaaagctgtcaagctttattgccaaatgcaatatctattacggtgttagcaaaaacaacaatcgcggagaagaaaaccaaaggacaacttacatcttcattatcatcatcttcatcatcagaaatgtcatcctcttcaatcaccaaggcatcatcaatgtcgactggggatatttccaattcctcatcctgcaaggcatacaagtaagattgtgttgagtaagtaaatcacaccacaagatcatgatgtaacgaagtaacgaagtaacgaagtaaaacatttatgttatcaaaaacttagcactgtaacatgcctcagaactggagtctccgctagctggtttcatttgagtatctttgtcaagaacagctctcttttgagcattgctccttgtttgaggccccttatccgcctgagccggtttcataacgcctttaccttttcctttcgatgagctggtacctttctcatgcacaggatctttctttgaagtatcaccgatgttaattgccgatcgagatctagaagaatgacgacgagtggttgaagctggagttgacgaagatggtgatgaaacaccagcaccgctaggtaacgtgcctggctctgtattgccaataggcgctgccggcttcagagcagattcactccgttgaactcggggccacagaaattcctccactgctgctaagcttgccaatggatctataagtacaatattggaggagtaatcacgtagtgttttctctccagatgctcggcataatcgcaactttaaaggatgtgccaaagcactcaaacccgaggagagccgagcacttccacttagtgaccttgagggatggctaaggacaacaggaaagcgctccagtgacgataaagcattttgaagtttctgaatcaaaactgtcataggagggacctttccctcattaccatcaaaaggaagagcgacttctagaaaagctttaaaccttctgagtccctcctggcgaagtttgggcaaattaagttcggagatcttctctttggaaaagtatccacaagaaaaatagttaagcaatgctgcaaccacaccactgccaataaactcaaaagttgagacaccatcccctttacttatctcgccaagtatctcagaaatgacaccaatcaagtactcttccttgctagcagagaaatcgccaaggaatggcccagaggctttagattttccctttcctttcactttatgatcatctataccagcagttagcttcgtgcaaagattcttcagatgtaaaagatcatctgtaactccaacatcaacatccccaccatcagacgggaagtacttgtctttgaatgctttggcgcaggaactaactgtttcccttagcatgaagctagctgtaggagtatcaagggaattatggtttgcccctatggtaagggacgcaggattcttaggctcttccgactggtttccatcggaattggcattactactgcgccgtctataacgcctagatcgtgcagatccgggtacacagtcattgtccttatcagtaggtgaggcatgggatggtttaccaaccaagacaagttgatctacagcatggactaccccttccctcacaaacactttcgagaatgtttcaggaagcttttccatcaaaatctctgcaacttgtagagcaggaaccaagacctgtgggtctttccatgccaagacaccagccaagaagctacataagaagaaaaaaatgtaagaagttgcacacactgtcgtgtcaaacttaatttatatcgtaaacagcatacctcgaaatatttgtgtcaccaattagagattgaatcatttctgaactgctgaaatacatcaactttccaatgactgagagacatttatggcgaatcgtaccattgacactagaaccatagatctgttgcaaaagaaaacaagaataattagacaaaacagcaggtagtatgagcattatcttgtagccaacgcagagaaaaattacctgcactaaaactggaagaagatccaatccaaactgctgcagaagttcaggttgatcaccaagtaatttttctcttggtgaaatttttagaatatcttcttgttttcctgaagtacttggactagatttcttttggcatgaacctttcacaagagcgtttgtgctagtaggaagagagataactccttctggcaatggagggaggagctcattcgctaggttgactatctcataaatctaatatataaagcaaaatttatagattccagaattagagaccatgagataaaaaacctagatctaacataagagcagaacaggcataagagtactccaacataagtacagattataagacctgtatatagactatgatcaatacactatacaaacacctaagtaaaacttggtaatacaaaaacaagtaggaaactatgcccgaaatagagaatgtaccctaaatttaagctattcttatttcagtcaggtattaaacagaaaaggtaattacctgatctgcaggccggctcagtgctggggatacagatgcattagcagagaccccagaacccaacagaatatccttaagaatgctactaataccaagaagaagtaatgtcctgaatccaagaggtgacccgctcgcacaggtagaaagtaatcggattaacccctgtgcacaatatggtgaaaatgtcatcttgtgtataaggataaataaaacacaataaagattttacgcttaccgtgtatgttgacacactaagagatgcttgcccacctcctgaattgctcgtggaaataagagacgcagcttgcgtcaccaggccatggttacataattcatctaatttctcgggatacggtgcaaatgcttcagcaattcgagtcagacagatagaagcatattccaaaacctaccatcatacgaacagattatggaggagactggggtaagagcggaactagatattagtaccatattataacagaaagcaggtcaattaccttcgaatcatgatactgaagtaggtttgtcagcaaaggtacagcttccataacataatcagatgcatcagaaggtagtttcttgcacatgttggcagcagtagatagtgctacgcgctacaagaagccaagtaacatgtgcattagatacacgagtaagtgtagcataaaagagaagttagaaatttacccacctgaacaccagtggagaagaaatccagatacgagagcacagccataagagcaccagctcgcaaacaggcagttgggtgctcctgagatatctttttgagagcttgcagagactgttttaaaacacatacataaatacgaatcaaatttcaagtgtgatccctgaagaatttttaaaaaagcagctggagcatcgaggattcaagtattggtatgatagccaacctgttccgccaagtccatgtattctatggttagcaatctggccaccaagcatgaaactgccccgtaatgtacaacagcagcacaagaagacggcaagacatcacatagatgggtaagagccctggcagcaagaagcataatgtcgggattgctttcatggttaagtagaccgacaagaactgggacgaaggaatcaacagagaaggtgctaagcgagtcttcggtcccaatggataacatctcacaaagctgggttaaagcctcgacctgttttccctcttctccttcagcgcgcaagccagagagaatcttcttcatccttccattcaagtgggaggaagaagcagagccgataccggaagaaggaagcaagtcatccaatccagcaccgagcttcctgagcaagccttgtaaagcactgctcgcagagctcatgttaggatgcatgaaaccgccgttgccatcctcactgtcattgtcgtcatcctcgtcagcgctcctagcagcggcggcggcagcatccatgttgagttgttctctggctcggtctctttctctttcacgctccctaatcctaacgtcatgttccttctccttacctttgtcagaattatcgttgttgtttcccctgttaccacgtccgcctcggcgaaatccagaagagtcggtggaggtgtccatgggagcagcggcggcggcagagcgagaagaacgagagcgggtggtggtggaggaagaaggaggagtgggggcaagtgaggaagaagaagaagaagaaagacgagcgcgtttgctgcgggtggtgggaccagaggcagagggaggaggaggaggagaagaagaagaagaagatggggcagctgaggtcgcctccgcccgcttgcggctccgagtttccatacaaaggaagaaaccccgagtttccgattcgctcgatcagaaagattctgatcggacactcgctcgcatctcactcagatcaattcactccagggatccaattgaaactcgcacgaaaccctaattagccaccggaattagtcgaaaacgccagagaagaagaacctctcaaatcgaacccagagagctattgagagagcatgatgcgaatcaaacgaattggaaatcaacaaagggattgagaagagagatggaagaagaaggaaggaggggatccaatttgggcagagacgatgaaaagagagattagaagaagaaaaccctaaatcgagagagtccgtcgactgatgaataaaatagaagaagacatataaatattatataaaaaaagaaaagagagagagagagaggcgaccggggacgaatacggtagcgttttgttctttccttaccacaacaagtgactgacacggcgatcgggctacgtgtgtttccttcactccatcgaacccatctcatacgatgtcgtttcgtatcatacccggtccttcctgcgtttttaagttttttcacatttggaaaaatatatcacacaaaacttgagggcctctttgtaattggaataaaacatattgttgtataaaggccgggcccgtccatctgttatagatcgtactctgcaaaggctttcatagagattttaaagcccattagttgtagagcgcttcactttcgttgtatatataaactactcaatgacatgtatatacgttaatatatatataaacaatttaaggtagagatttggtttttcatgtggttcggtagagatttggttgtcttttcttcttctactactttttttctaaaacaagacatctttgttaagtagattacatagatcatttatattacaaaaaataatggaaaatgcaattacctctttattttgtttggttggaatttatagtctgggacactaatttgattccaattccatacttaatgaaaaccagggacgacactagtgatcactattatgaattatgatttaccaaggccacacccactcatgaacgagtaattgttctttttcattttactgtcgtaagagtctcgtttgcaatttttttgtttttttggtatcaaaaagttacaatttcattccacttcaaacaaaaaactttaattaatatcaatcatataatctgcatacccgaagcttgcgttcgttccttatgactgtttttttgtcattgaaactatctgccagcggaaatatgtatttgcttcaaaaaaatttgttacatgtcgtgaaagaccatatatatttttgtttcttcttcctcaagtttcgtctttatattaaatatcaaagaaaaaggattttccaacacaaattatagtataagattgcgcggggaatctaatttcgaatctagtttattcgttaaactcaagatcattctcttagaaactttgtcatagttggttcggttaatttggcttatctttgttttcttttgataatttggcttatcgtattgttatatctctttttccacgatagtggtttgtatttaccaattaacaagaagaaagaaaaatgtaacaaacaagaaaaggctcggcaaagaaatgaaaaaatctcaacttaagaaataaaaatgtagacgcacaattaaataccttcacatttatatacattggtggatatggacctctctatccctattatattccactctttacaaatggtgtggtgtgacaagttatgtgtataattaatcatccaccgtcaccaaccatccaccttattttcacgtctcgtaagggaaacagatcatagtagcatcttactcttctgaaattaaagactctatcagtttatcacaactcaactattatggaaaacttaacttattctttggtcgtcaataaaatctaatctttaccttgagatcaaggtgatcttaattcttgtatctgaatacgcaaagttgaaattaaatatcaaacaaatgaatccattattaaaacaataataataaagtggaaggtgaaccaaatcccacgtcccaaccgcatacggacctaaataatatatagtttttttttgtttttggcagcaacctaaataatataattatcctactcttttttaatatcagtatatttacttaaagaaaatgccaaattaatcagtacattgtgatttcgcttctatattatatttgtgacacaagttttgcttttatattatagcacatcgctatttcctccacgtcatttacaatcccattagtagtactactaacaagtaataacatattattcctaaaacaaaaaaacaaaaaaaaacaacagagagaataattcacctggagaactattattctcccatgatgttaaaaaacgttttgcatgtagtgttgctgcatttggtttttcataaaacaatattacgaatttgtctcttacaatttagttgcaagaaaaaagaaagagcagtaaataagttaattgggtataaatagtgaatgtgaaaaactgactgattggggtttaattttgattcagatgtaaatggacgtaaacttttgttgatgaattgaagaatcttggcctttagctaagaacctaaccttctagaagagggccatcatcatgcatgaggtgagtgattttgtaccaatagattaaacaaattgaaattcaactactctctctctctctctctctctttttcggttttttcatctttttcaataaaccattattctttttcgtttcttctcacattttccacctaacttaccaaatttcacaattaagttcaactttttttgtttagcatacatggacagtacacagtagatactatagtttaattattctctcctatatactgttatgtgttctattcttcaactattctcctgacatacgaattactacatacgtatatgattagtgttgtcgatcgtattctaaaaatatagatacgattagtgctataataatattccgtccagttagagttcaacattattaaaaaaatatctcttaataagtcttgatttttcaagtctctaatatgaaagaaatagaagttggttagagaaaaccattctaagtcaaggttctagaaggcacattctttaattcaaatagtttatcatatatgtatatttctaatttatatgtatgtgtcatggtggttcttgttgtattgtttttatactgaaatattaaagaaacatgagcatcatcacaaatattttaaacatgaagtgcttgtcatttggtgagagtaatttgaaaaccatatataagttacaagttatcctgcccacacatataattagttatttgataatgctttgtttaattagcaagtgattgtattagggttaagttctagatatattattgattaaaaaaacaataactaatccagtgcagtctatatattagagaaaagactgttgaccagtacaacaaaaacctcataggctatatagttgacctgcacttgtccaaaaaacactcattaactttaccacctacctccactacttcattatatcttctcttcgttattgctaccaaattattcaagtttccccttcctttgttagacccaaatttttacttgtgacctataatatctggcgataaaagccattcacaaactttttgttttactgaattttaggttttctacattaattttcacccgcctaagttttactacaaacttaattcatacgataggtaagagactccaaaaaaataaaaataaattactgtttgtactaaatcggtcgaagttaaaagacgatttgtcaataaatgtacacagtcgaatactcgaattgtcatgtattgattaatttcttgacagagttggtttatattttgtactaaataaaacttgttgcaaagtaaaaaaagaaagaaaaaaaattaaagaagtagctaaataattttggtttatgtatatacgaacacgagaaatttctttgattacatatatatatatatatatatatttaagtgagaaatattaaatttgttgtcatgattattaaaaaaatgtcatagctttatcaaaagactatgatgccatatatgtcaagcttctcacttattgtaccaaaacgaaaggccaccatacactactcattcaaatccatcccaccaactcacatctagaagcaattataagttcaactctctttctctctccttttctatcatctagaagcatttgtgtatatatatatatgtgtgtatattcctctctagctttaagtcaaaaccctatataaactatacaccaaagctttgaaccttcaaccaaacccaaaatccaagtgccccaccaaatgcttcaatcctcttccactacacaaaaaaacaacttaatccctttatacccttttagccaaaaccctcgctaaaagccaatccctcaatataaaataacaagtagaattgatctgcctatatataagattttgagacgaaataagatctaaaccacaagaaagaaagtaaacataaaagtatgggaaggtcaccgtgctgtgagaaagctcacacaaacaaaggagcatggacgaaagaagaggacgagaggctcgtcgcctacattaaagctcatggagaaggctgctggagatctctccccaaagccgccggacttcttcgctgtggcaagagctgccgtctccggtggatcaactatctccggcctgaccttaagcgtggaaacttcaccgaggaagaagacgaactcatcatcaagctccatagccttcttggcaacaagtgagtactatactctctaaatatgggcttatttaactagctagtatcgtttatacccaaaaaaaaacaaaaaaaactagtatcgttttaatttatacaaaatgaaaatcttggagttttcaatctatctaaatgatgttattttttgttgatgatatatagatggtcgcttattgccgggagattaccgggaagaacagataacgagataaagaactattggaacacgcatatacgaagaaagcttataaacagagggattgatccaacgagtcatagaccaatccaagaatcatcagcttctcaagattctaaacctacacaactagaaccagttacgagtaataccattaatatctcattcacttctgctccaaaggtcgaaacgttccatgaaagtataagctttccgggaaaatcagagaaaatctcaatgcttacgttcaaagaagaaaaagatgagtgcccagttcaagaaaagttcccagatttgaatcttgagctcagaatcagtcttcctgatgatgttgatcgtcttcaagggcatggaaagtcaacaacgccacgttgtttcaagtgcagcttagggatgataaacggcatggagtgcagatgcggaagaatgagatgcgatgtagtcggaggtagcagcaaggggagtgacatgagcaatggatttgattttttagggttggcaaagaaagagaccacttctcttttgggctttcgaagcttggagatgaaataatattgtcaaattttaggcgtaactgtacaaaacttttgcctagataatttgaaagtatatcttcaacttgtatgagaaatttaactggtgaattataatatatagaatttgtttttttttctcttttacaaattaactccattggcataaatattaaataccggatctagacgatcggtgataaaaatatagatcattagatcgtatagctctattgtaattaatttgtatacgattaagattatcagtttatgaggtaagattaggttggttgcccaaataactcgttatccaatgttggagataagccaaataaggagaaaaaagattacgagtatggcaaagatacttgatcacataatacttagattgtactggtatagatgataccttgttaagatctataattaaagatctaggagaagaacgtgaaacagaagataaatcgaaaatgtttcatgacaagtggaaagtgaggtttgtagttaatttggcaggaatagaaaagttgtaagagaaggaggtaggagaaaacttaaatgtttttaagataaaaaaaggaaagaaagagatatgtgaaaaagaaaaagaaaataatgaaaaccataaatgaaggaaaggaagcaacaaccaatggaccctttcttctaccaaactctatttatttctcactacccatctccctaccaacctatataccaacctttcctcatcttttgtccacttgcaagcgatctacatctgcatacatacatacatacatacatacatacatacatattacacatgaatgcataacatacatatactgtatatccatataccacataatatatttatgcatgcatgcatataaaaattatgtataggagtttcattgaatgtagccacatggttgaatttagaaagagtagcgactcgtaaacttaaacattgttctatcgtaagatgcttggtaaaatcggtgttgtacatgttccttcgttgatatcctctcctcaacactacaaaaaccctctctagctactacattaattatcatctcaaatcccaatagagcagtatattatttcctcgtatatatttagatttagttttaaaattgatcaaatggttatatactccagttgtgtgtttgtttttttgttttggccaaaaattggtaagatctcaaaaactggtataatcacttgagaaattatatgatcaccaaatgacaagttgttgtcactagcactggggcttgatatatatcatattctgatgaagatacaaactcaacaataatggaatcaataagagttttctcaggttgcatcaactaatgaaacaaatttaaagttggaaaaaaaaacaaaatcagttgaagtctaaaataaagttgagaacgtttgattaatttcgaacatcgagatttaacagtggttgggtaaatattatgaaagtgaaggaataacaaaaaaaaacatgtagaagttgatagaggaggatgatattttggaaatgaaagagatgggagaggaggagtggtgagaactgaagataaggaaaaaggggaaaaggacaaaaggatgaccacacacacagacacaagtgaacaaagacagacgcacctgcctcctcttccttcttctttctaatattattcattttcatttgtaaagaaacgactttttcaaaaggtgttaggtagatgcaatagaagcttctatcagtttttcttctttctttttttttatgttatagtttgtgagtcttgtgactctttttgtctttccctttcttgctctaaaagggaacaaagaaatttcgtcactaataagtttccccaataaaaagtctttaacgatagtcatatttagcaattcaatttgtttgtgtagcatagtttacacgtacgtagatgatcaaaactacagctcgcatgtggcaattagcagacaaatacacatatcttgggataaatataaattaaataatgcaaatagattgcaattagcagactaataagcgcatataaaaattagattgcaaagaacaaaaaaacgagccaacagtagaacaaaggaattaagtacctaactgccacgtgggactttaattacttggagaaaaacataacttcgcagaaatgtgagcaaaatttaattaccaatgtagactttttgcactgtcgtaagaatatttcagatttgacacttgtgcaaggttcattacgaatttaggactcgctattctactgaattgatcgagagacctgtaacaaataggcttactttctaagagcccattgacataaagtccaataaaaattaagaaggaagctagtccttgactcgtacaataacaacattataaaaaggcgagagagagagaaaaaaacaaatttcacaaggcagagagattagttaaattcagttccaatctctatcaaaccaaagaaacaagaggaatttttattgagactctcagatccttcttcacttcttctcatcctcgccttttttgctactactctcttcctcctcggtacgctgtcattttaaccatatacatttatcagaatcttctttttcaaataacaaaaagatgtaatcataaacatcaacaaagacacacctttgactcgtctggcagagacgctagtagttctttaactgccggatcatttggatccaccccaggaagctgcgtgtacacaaagtcttagtaccaaagctaaccctactacttttctctttcattttgcttgtgaaaaaaactgactaaggtttatgtaggcttaccgatgagagaacagacgatatgaaggcttgatttcccaagaggttgtttccagcacctgtagcttcacttgactcttccccactcattgacatttgcagagctgcacatggagtataaaaaaatataagaaaaatgccaattttgattgccatggatatacttttaccacactgttctacttacctaaagccagatcctggtcctcatcagccgcttctgacatattcacatcaccaacagacatagcaattgcctgatctagcaacgcactgtcctcatcctgccacaaaaggttgtatgattaacaatctctccgcctgtgactatataagaatgctacactcaattttaagtaacaactaaccattggttcagcgttcttgtcagttgtcctagcaactgtctcctgtgaggcggaagctgtgtccccatctttgtctttctgacctgcctcatcggccgccttcttggcagcagcttcttgtcttgctctctcctcctccatggagacccgaagggcaagagcaagttctggatcgatatttgggtccacaccaaagtcgaagtccccacctgcggccgctgcagcagctgccgcagaaacatagccacttgcaccctcatcacccgtgaatacaggtgtgctggaagaaaatttaaaagttaaaacactatctatgattcaaatcactgtctaaatgttttgttgcagcattgataaaaagcaagactagagagctcaaaagacctaaacacacaaaaccacatgaagtgcacctaccaagccggatattgttgaaactgttccttttacaatctacataacctagaaaaaaagaagaaaagggatggtacctgagaagcacatctgagagagcattggctccagaaggaacatgaacaatgtggctaccgtcattgttattcacagctgtaaggagcgcctcgagtttctgaggcttttcctcatcatcatcctccccgaaattgacaatatcaagagagacactattcttcttcagcctttttccaactatctctagggccttcttctcgtacttgattggactaaaaagtagaagcagaagaaaaacatcagtataaaactatacaaaagttactcagcaaaaacaaagcaattcggtaccttccagcaaaaacaataatcctttggcgttgattcttgttttggcgatgcttaagagctagctgggcgatctggatagctgcggttaagttgatctctcctcccacatcaaggcctgaaaagatgacgcaagtagcaaattgatgtcaaactcaatgataaagagaaagaacagattttttctaattgctctaagtagacagctaataataaatagaaagattggagagagagatacataccgtgcatacaggccagaattttgccaagatcagaggtaggagtagtcaatactctaactcctttgccagccattgtcaaaatccccaccgtattctccggattcgactgcaattgcaaaaaagaaagatccctaaaaatcacaatctcacgcaaacccaaaaaccctaatcgaatcaagtgaaaaaacgtaaattattacctgggttttggctccgcaaagaagattaacagcttccgtttgcgcctgtaacctagacggagagtaatctccgtttcgcatccactcggagttgtcgatacatatcatagtcgcctacaacaagaaatcatcgatgagaaaaagcattcaacgtggatcatcaacgaagataagcacaagtaattggaaaatcacctcgagaaccatcgtgtcgataagcagagagaagcttcaaaaattctgtcgtagagagaaagtcaggaaggcaagatttagattttagtttagaccgataataataacattgttcttctttaaatatcccctttacttttttactttctccttttagaccctaatgttttacgtttatttcaatttagccccaatggttgtttttgataaaaagcaaaacaaagttgatttattaatgaataaaagaaacacagaccacattacagtaattcctataactaaagtctttcttttattcaacattgttaccccataactctacaaaacatcaatataaaccccaagaagacaaaccacagttcaccagagaggaatttacaacggtgctaacaaacaaaaaaagatacaacaagcagagacgttggatcatcttctgctatgcattaagagcatttgggatgagagaagatcttgtgcttctgctgataggcaagtgaacataaacctcgtgaacttcctgcttacatacatcccctttgtctctatcaatcgcgtaacagacatagattgtgtcaatcacatcgtcaagaacatgtacaaagaaagccaatatcacaatcagtaacacccacgccagtacagccaccacgtacgaatctatacccaggttgctcactcctctcagaacagcccatgtctgcttttgcgcatcatcaaaccccggaattagtcattatggcaattattaaatgcttggttggtgagacaagcagaagataatacttaccgcgactgcatatgcggctgacaggacaaagactattccggttaggattctggtggaaaccgtttcgacaaatacagctgacagtaggttgcgtcttaacagctcgtaagtcattttcgcagaggtgcaatacgcttcccctgttattgcagcaaagttgatggtgaacttgttgagatagtcaagggcaccaagtaaggcgtttgcacagcaacggagaaccatgttcactattccttgtgtgttctcttctcttgcattgtccacaattgcccggaccacacgaacaatgcatatgagaagtcctgatacacatatcgtaccaaaggattgaccaaatgcattcctgaagagacagatacaaaaaataataagattcacacatgctttgacataaaccaacaacagatttgaagactaatgcaaatttggatcctcaaagctataatctcctttcaaaaataccactgtctgttgtctcttttcacatttaaagtaccaaacaagttcagatgatggattccaatacaatatccaatctataaggccaagactatgaataccatgacctagaatcactgaatactccagaacgaagccaagcaagggatacttcgaatgaccatagattatattttatgaggaaacaaaactaagagaactcaaagcaaaaactcccgcgatcacacaaaacatatattagaactaagagcaccattgattgtaagagaaactgcacagcaaattcattgataacaagaataaaatagagaaagatgtggcagcgagtcacctcaaagaactccggatgcattttttagggattgagtcttccttggagaaataccactgagcaatagctccacttatcacatacacttgcatttccaccattacagcaagagaccagatcatcgttaaaatggcaagagcgtaatacgcaggaacccaagaatcttctttccactcacaaaagtactgaccatccaactctcgcggcacaaacttcccattaaaccttgcaaacaccaagaacaccacaatcggcgcatagtacaccactaacccgagagtcagcagcggcagcacaacaaaaagtttcaaatttttggacaaggcatcagatgcaacactgatgatttggatagtaagatcaattctgtgccaattagctactatgatccagacaatgatcccgatgatcaagaaaacaaagactaggacaagtattctgtaagctagagggagggcatcgctacaagaagagctaagagtacaggcgacaaaccaatagacattgaaaaagatgggaaaaaggacaaagagaggtaaacaagcataaacaatctgcttagtgtagtgtttgagcaaaagcaggacgctaaaacagaagggcacgcttaaaataagcgttacaacaagtgtccagatcaaatccttctcaaagactggatcagacgaagaaaccatgccgtacatgacactcgaagaagcccagtagtacccatccgaaattttcgtaaaggtagaatttttgacgcaggagctagaggtgaaatcgtaggtgaaggaagaggagttcccgtaatcgttatttctatgaaaaatggagaagattccaaaaccaaaggtggagagtacgagaagatcgaagagaagtaggaaagggatgtccttgaaagttcttgggccaaaattgtaggagatctgaagaaactgagttgggtcggattcgggatcacttcgacgcggagaatcgagagcggacgtggagggtttagagagaagagggtgtgacggagaggatgagtcgtagattgcagcgaatttagtggggtcgccgtcgtccgccgccatggtcgtccacagagagagaagaaagctccgcctctggagctaaatgatgaagaagcttaagcagaagcagaagacgacgaaactcaatttagcattttttcttaatcacaataattaattagtgacgatgccgacgaccaccgcccaagcggccaagcgaagatgatccaagatctcgccaccacaatgctcaaatttaattcgttgattagtcacgtatacaggtattataccgtccaaaggagtattattatcttcatgtgcattaaaatattagtatagtttcttttaccagtattaaaagaaaaattcacgaagacattgagacgggcttcgaagaaagtctgataagagaattctcaaagcccaactagccgtattaaagcccaaatcatcgcatgcaagagtaatagtcctaactcctaaggagcgtgtgactgcatcacaagggcagatacgtttgttaacttgggcccaattgtcacttgtaaagctaaatctttgaaatcttttgagagtttaaactttaaagatatgaaatttagctaaattcgtacaaatttatatccaaatgttgacaacaacgtaatctaaaaatgcatagacgacaatattggtttccctttgtatcaactaacaaaattaatttttaaaattttggtggttctttagttatggtaattggttccttttgtattgttttccaaatatttgagttctataaaataagaaattaaaaacattagtacaaaatcttgtaaatttaaatttcgaatcaaactaaatatgttaattcaaaatctctaacttttaattatatattttataataaagtaaaaaactatattcaatatttttattatcagatatatccatctcctatagaaaacaaatctggatcgtagcgtgagtttgcattttgcaggcgtgagagttttttgcacgcacacacacacaaacacaaaacaagcaaatggtaagatttaggtaagaaacttgtaaccaaagcatgcatcaacccgtggtactctaataggctagtatctatataaaagcacaacttcacatgacaaaaaaaaccacttcgcatataacaacatcatcacgtgaactcactcaataggttcagtgtttctgacatattgttccctctctgaatgaaactctcccaaatagagaatggcctaaccacctatccaaccgcatcaaggcacttggtttcatccccttgatttctctctttttttcttttcctatcgcaggattttgtgttcttgttttgaatatgaaatgttcgtcgatgtgttgtttgatcctcttggccctttctctcctcaccgccttcactcttgcttcttcgtcaaatggtacacacaagtatattatagcataccatagtatataacatacatgtatacagaattttagcttgatatatgatgtttttactcttcaggtatagatggacctttctacgactctactgcctacacagaggtttttaaagctttgagctattaattcaatttcacaagatatgtaattgcgcatagatagaaagtatatatacattatgtggtatgtgaaatgcaacagtgtagagccgaagcagagaagccactatacaatggaggaatgctgaaggaccaaaagccttccgtcccaggcaaagactctctcacaggcattggtgctcattacacaccaacttacatattgcacaatctcacacagaacaccatctattgcttctccagttaagcatttcatgctttcatctctagaatgttatatattcgttaacagatgaaatgaatgtgatgatctgactgatggacacagtatgggtgaagatagaggctggtgctgcatcagctcatgtaagagcaaggctgagagcagacaacgccacattaaactgcgtcggttctgtaactgccaaacatggttgctggtctttcctcaaaggaggattccttcttgattctccttgtaaacaatccatcctcttctttgaggtagattctatatatgctcaaaagtatctcattagcttagatgatcccaaagactgtaaattttctgataatgcagacatcagaggacgatggtaagatccaattacaagtgacgagtgcctctcttcagccattcacgcaggagcaatggaggaacaaccaagattacttcataaataccgtaatacacacactaatttctaacgttaaaatcgcaaactacattctttatgtggttcctccttaacacttattttcaggcgagaaaacgagcagtgacaattcacgtgtcaaaagaaaacggagagagcgttgaaggagcagaggtgacagtagagcagatctctaaagacttctccattggatctgccatctccaaaactatccttggaaacattccttaccaagtaaaagacactcgctaaagtctacactaaaacaacaatgtctttgcttcttcaaacggattctgttttgataggaatggttcgtcaagagattcgacgccacggtattcgagaacgagctgaaatggtacgcgacggagcccgatcaaggcaaactcaactacacattggctgataagatgatgaatttcgtcagagccaacagaatcatcgctcgcggtcacaacatattctgggaggatcccaaatacaatcccgattgggttcgtaatctaaccggcgaagatctccggtcggcggttaaccggcgaatcaagagtctgatgactcggtacagaggagagttcgtgcattgggacgtgagcaacgagatgcttcactttgacttctacgagactcgactggggaagaacgcgtcgtacggattcttcgccgcggctcgtgagattgactcattggcgactctgttcttcaatgatttcaacgtggtggagacttgcagcgacgagaagtcaacggttgacgaatacatcgcgagggtgagggaactccaacggtacgacggcgtaaggatggacggaataggtctcgagggtcacttcacgacgccaaacgtagcgctgatgagagccatcctcgataaactcgctacgctccagctcccaatctggctcaccgagattgatatcagcagcagcctcgaccaccgctctcaggttcacaagtctctgttttccggtttagttcagtttgcaatttgaatctggttttggttacaatttttagccggtttattaacggtttttcgaattgattttggctgaaatacggtatgtctgttaggatgataaaatctggttggagtacacattgattatacttgggtgcaagtaaccggaaatttgttacgttttcaggcgatttatttggagcaagtgttacgtgaaggattctcgcacccatcggtaaacggtataatgctatggaccgcacttcacccaaacggctgttaccaaatgtgcctcactgacgataaattccggaaccttccagccggagacgtggtggatcagaagcttctagaatggaagactggtgaagttaaggcgacgacagatgaccatggttcctttagcttcttcggctttttgggagagtatagagttggcatcatgtaccaaggtaagacggttaattcgtctttctcgttatctcaaggccctgagaccaaacatgtgaggcttcaaatctaacttaacggctctatgtttaagatatggtgtaaatcttactgaggtacaaatagagggaatatatctatttttcaatttgcaaatttcggccagtaacaaaattgaatgtactggtggggacaaaagtaagtgacaatgggtcaaaaggagagacgagactttgtggcgtgggcaaacttttttcataaattttttatgagatagtgtagaaacatcaaatcaaacatgaatccctgcaaaagtaactttaaaaagctaaagtggaatcattcacatcacacagccattaactgtgagccccagcttgcctctgtcgacattatcatacacttaaatgttactatactctctaagaataaagaaatacacctaccaacatccaaacacaataaatatgaaattaactctagtggcctaatcatcactttggtagatctaaagccacaaaagatctttctttaaatcacaaagcatatctcacaatttcgaacatgataaacaatcttcaatgacagatgatacaagcaaacacgcgcgtacacgacaaagctacaatgcaaaaccctaaaagcctaaaacccaaattgtcgcagtcttaagcgataatcatcgagtatcaacaaaaactaaacaaaggcaatgctaacaaaacgactaccaaatctaaagacgatgatgctacgagaaaataaacggaaaagtaaatgcagcaagcagcactgtcaatgaaacgccggctggtctgcttgcctctcccatggccaaaccagccatccatgatccgtcttgtaacatggtctcacccgtacccatctccgacccagtcccctgtgacccgtacacattaccttgacctggagtctgttgaccctgaccagcgtaaccagtatcagaaccaggcacaggatcggaaccttgtgaggtcgacgacgagtctgtcactggaggggagtagctagtcgatttttgactgtatatacacaaaatgattcaaacactaatcaaaatgactgcaatgtcaaatctttcaacttgcgttttcaaactagtttggtattttttgtcattcttgaaacaaaattgctacaaactttctcgattaaattactcgttattgacaaaacaaagagaatcttttgactctataaaatgatggtttatgaaaagaagataaacacaaactttggcttttccaacgacaaaaaacacaaacccaaaatcttaagattaattattacgaaacccattaacacatactaaaagtttcaatttttcaaagccaaagcaacgcagcaattgtggaacttaaaaaatggataatattataatcagtaagtatttacctaggggaagaagggcaaaacgtcaccgtataatctccaccggcgcaagtgaaagtgctcgtagcatcgtcgtaagcgtagctataggagcgaggacacgcggctttaaacatctccgaatacacggaaggccgacaactagaaggtgtagcatacgcgccgctgcaacagtattcaggactccgaaacgctaaacacgcgcttttgcaagcgtctccgtcgccgaaacgcagctcagcagggcactgaatgttaagatccgtagtgcatccggtagaagcgcactgcccagatccaccggcgacttcaactatcatcggaatgttgtaaccgtcgacgagactaacgtcgtagaaatcatcgccgccagtgcctagagtgaactccgcgagagttacaggcggtgcggcaccaagcccggcgcattcgacagcgttggagccgcagtcaccggttttgcatgtaccggagccagaactgtcgaacttgcaaccggtacgagcccagaatcgaccggaccaaccggtgggagcttggagagagcgagaggtgcctttagggagctcaaatccggtggtggagagagtaggtgagccagcattcgataggattccaggccatacggtgtagccgcaccgattagcgaatgtgaatgttgagccatacgaaccttttaacatccaaaagataaagaaacaaatcactaaaaaaaatgaaactttgaaacgagtgtaagtagatgtgatagactttgaagtaagtgagtgagagactcttcttcttcttctggttatacctgtggaagctaaaaggagaacagtgaagctcaatgtgagagtggaagaggcgcgacgagaagaaagattcatcatggttctttgtcgtactcagtgttcttggtctattctaaccagaagtaaaggtcttctttgatgttgggaagaagatgagagagattagtaaaactgtgaagctatttgagttgaaatggggttttgttatttttttccttgaatttgttattgagtgttactgggctctatgcctgaaacctgacaaaatttctcttgtgcacttattattgaatctttttaattgggttaaaataactacaaaaaagatttatgggtaggaagagataggaccaaatggttttcaatatcattattcattattatttcacttgtaaaaaaatataattgtattgttatgattttctgtgtatactagtactactatgtctaaattaattaaaattcattttcattttgtgtaaaattatgatgacaacgccgtatttattcgtatcaattggttgaggagctttgtctgtgtaaaaaaaaactatgttattagcccacactaattgggcttgaaagtcggcccatgtgaaggtggaaagtggacccgcgttcaaaacacaacaagaaaaagacaaagaaagatgagaagctttggggctaaaagggggacctaccgaaactatgttaaagcatattcatttctgtgattgtccacagtccacataactttaaacccaaatttctttgaaattcgagttttgaatcgtgataattgcttatttttcacaatccctgaaaactaactatccccaaaaataataacgagaaacataacttttggcacagagccaaacaaacaagattatgtaccaactaccaacttacaagtaaaataaaaagtaaaccaattactgccatatttttgacattccctttctttgtttttgttattagaaggattattttaagggtggagactgtggatttactgagactactagtatggtttgagccactaaccgttgatgatcaatgtatgaaaatgtgacgatgttagatcgtgacacatggaagaacacagctggaagaattagtggcgaaatacagaggatataactctcttctgtctttcgtcttttgaggaacaagagaaagcgagagagagagtcttatctcacccatgccactactaccattgagagctgggccctgaccgagtctttgactcctaaatcttttcaatatttttaacttcgcccaggtaactgacaaactacattttatttaaatgtcgatttttttcccaagaacttttgtaagtctacaaaagcctgatgtatatatattcccaaaaagcaaattacaattttctttattttttctgttactttgcaaattaacaatgctcaaaaaggcaaattcacattggagtaactaaattttggtacagaataataagctagcccaaaggagtataagtgtaaaacttaagaaattgaacgataaaggtagtagtaagccttggttttgcagacgagcgtgctgtgcaaatgggcttgtgggactaattttatcgacccctttatccgtttctggccaattattgctattttaaattactagacaaaatagatttctttcttccttatgtttgacaaagaaagagcagaggacagaaacaacaattcttggaacaatttcgaaagaagtaacaagtgtaaaacaagtaaagatttacacatgaatttttctatcaagtaaagaagtaattctaccttggtattaaccgtaatgacatttttctacacatgaattttctatctgcctgcaacaagaaagaggaaatgaaaacagtatagtaacctcaacagacaatgcgagtacccatgtaagacggacctgatgtaagaaggacttaagacatataataagaagatggctcagctgctgtgcggatgcggcaaatgaatcatgctcttgtttactagtggcagtgttgcaccatctttcctcgatcctaaaagcttctcgctgcaaaacaaaactcatagtcaacaacttactaagctcattacacctaagtacatttataacaatggagcacttcaatctatatttgtcgaactcaatccaactgttgctacccgcttttccaaccattaaaacaaaacccttttaatcaacactactttctcataccaaatgcttatagtagacctttacaatcatttataatcataccaaatgcttctagtagacactacaatcttaatcaaatgcttatagaagatgatcatatgatctaaaagactacaaatcataacgagtaactacgttagctaaagtccataataatcaacagtgtggctcagattagattcctgctcatatactaaataacaagaaacatccctagcatattccaaagcgaacagaggggcaaaacggtcaatatctcaccttgtatacggtggcggacagaagatgatgaagtaatcggctccggtggcgcaagtgtaagtgctcgtcttatcgtcataggcgtagctgtatgctcgtgggcacgcatgcttaaagaagagcgagtaaaccgaaggctgacacgtgtccggcgtggcgtacgcatcgctgcagcaataccttgggtctccgaatgcctcgcacgcgctacggcaagcaacaccgttcccattcccacgcgtcaccagctttaggtctctgggacacgcgccgttcaagtccacgagacacccggtggctccgcatcctccaatgacgattttcttgggcaagattagcatcgggagattgtaaccgtcgacgaggctaacgtcgtaaaaatctagtcctcctgtgccgttgagagtaaactcggcgagagttgctggaggtttagctccggagcctgaacattcgacttttcccgagccgcaatctccggttaagcagacgaaagaaccggaactccgatcttgtgaacacaaggttcgtgcccagagacgaccggaccacgactctggtattgcgacggttttagattttcctctagagagacgaaagccagttgtggggagcggcgctgagttagcaccagagagcaaaccgggccatatcgtgttccggcaacgattcgtgatcttgaacgaaattggctcaacttctgccatgtgaaaccaattcaatcaaaatcgtgtaaagattgttaaactcgatagtcaagcaataaagaagcaaggaattagacagcgattattgacctgaaagagatgagacaaaagccaggatcataaacaagaggatccgattcatcattgctgttacaggaggattcgatcggattctaaagttgaatgcttgaacgagtaaagcgagcaactttactttcgaacgatggaaaaagcggcggaagagagaatagaaagagagtgagagtagtcgatagaggagaagagcttctctgtttctttgaaacaataaaaccgaaaccggattattctagttccaaactgggttggtgaaccgaaaattaaccggttttacggttatccatttagcgatgcgcacgtggtattttggttgtggaccatgaaagttcaaacatgataaaagttgataatttatagagagcactccgatttccaaggtaacaacaacaacaacagatctaaaatcttcccatatctgcttttatttacttaatccaatccgaatcgtgtgagctacagtaaaatgccagtgtgatcatgatgaaacggtggaaagaagttgagaagattacattttctgaagatatacaaaagattgaaaatacaaacgacatcgaagataaaaagtctaataatgagaatgatggagactgcaattagtattcaattccttccagtccatggaacttaaatgccattaaatgcaaaacatgagcagatagattttgtatctatgggaatcgttacataatccataaataattcaaccataaaacgatgatctctcaagatttaagtatccagatcttacgattcattcagatgactgaaacaaaacccagaatatttgttcgcatattatgaacacttgaaacagagcaacaagtagagcatttcacccatatcacaagtaccataaataaaaccaaccataagtagcaaaaccaaaagaagagtcctaatccgaaaccatcaagaaaaaaccaactaacaaagatagagatccatcataataagcaaaaagtggataatagagagatagaaggcggcgggagaaagaaccgatcacttgtgagataaccaactcactcttctccaccgcgtaaccggcgttggttttaacgtccaccgctggtgcaatccctggcgaaatgtcccgactcgccacagctgtagcagcttcccccgccgccaccacctccacggccaccacctccgtaaccaccacctcctccgccgtatccgcctccacctccgtagccaccgccgcctcctccgtaacctccaccgccttcagaacagtctctcgccatgtgaccgggctcaccacacttgtagcagtcgctgcctcctcgaccaccacctcctcttcctccgtatccaccaccgccaccgccgtatccacctccagatccgcgtccacctcctcttcctccaccgaaaccgccgcgtccgccagatgaaccaccaccgctgtttccttggacgggagcgccgtcgggtccagaaacatcgatggccttgggacggttgttgttgtcgatctcaacctcgaactctacggcttcttcggcagcgaggctacggaaaccctcagatctgatggaggactggtgaacgaagagatcgtcgccaccgtcgtcaggagtgatgaagccgaaacccttctgggtatcaaaccacttgacggagcctttgcgcctctcaccaccgccgttgtctccgctcattttgattggaatctcttaataactcacttttttctctaaatctttaaaaaaaacgaaaccctagaaaatactctgaaatctctctctcctcgcagctgctgtttatatgcgtataggaagggtgtggcaagggtatgactgccacgtcacccaccccaattcattttttccttgtttccaagaggaaataaaataaatgtttttatttagatctctatttctatatatgtttgttcgatttttgtctatttttctaaattgccttcaaaaaaaacatctgcacattccgaattgtatattcgagcgtgatattaaaataaaaaatctcgcgattaagatacccagaaaattaaaaaaacataaatttcgttgatttcgaaaatgaatctgcaactaaaatattaaaagaaagaaaagtaagttaaaaaagaaaagaggagttagaaaatgggccagcatgtgataaggcttaaattgattaatccatttcgggaaagagaatggatcattggcccagcaagcagttgcatctggacggttggggtgtttttcacgagggatatcagccgtcagattctgattttagatctgaaaagctagctctctggggaatagagaaacaaagatcaattaatttatttttatttttttactttgtatgttgtattttattttttgttgcagtcaacaacaacattaaagaatgacatgcaacgtcagcaactggtcaatatactcttttcaaaattttctcaatcttgtggtcaaaataagcattaactgttgttccactttccacgtacattttatgaggcagattcacaaattttaccaaacagtatgataattgtatgaagtaatttgagaagactattgaccgcaaagagattgtcctttgttggatatcgatttttgagtatcgattacaaaactaaattaccaagtaattaatttataagagaaatagaaaatgagtaaaatttaaaaattattgagagatagaaaatagatccctttaaatttagcttataattcgaaaaatgtgcatgtttttatcttaatcacttaccgtgagaaagtataggagtaaaatgatgttatcgtaaagtgccaaacaacaaatcaaacttgtgcttagcaaaaaaaaaaaaaaaaaaaaaactggtatcatttgagaacatgacttaaaacgcagccgtttaaataaaaaaagttggtttctctgcatcccatgtctagagtctagaagagtggtctcgctgccgatctcagcagggagaataatttggctcggctcaatcactcttgtggatcaaatgctcttcttcttcttcttttgtgtttcaagtcttgagaagaaatctaatctcaaattattaggattttgcaccatgtttccatcatctcagtttatagatataatcaaataatgaaattatagagatgcattgtgtcattagctactgatatgaattctagcataactgattctattatctttttgttcttgaagatcacagtagtgtgtaataaaaaggggcattgctgcagaaatatagtcatctctcaggttagcagctctctttcacttgttaaaactagattttaccatcaactgtatacttcttccttctgttttgcctgtctatcaactacaacatctgcaaaagtatcagaaattaatagtaatgaagagtttggatatctcgcaattgtatcaggattcaaataagttgtaatgaattggaatatacactcgtaaatcacacacacatacaaatacacactcacatgttctcttatacacaagcaaccctaaaacacatcaaccatgttctgattcttttccttcaaaatagatacacaaagtctgtctccacacgctcattcctcaggccttaccttcagctctcgcaaaggtgagcccaacgcaagcatcaacaaattcattatctatgaaatcagttgagaatatctgcagtttatcagcacatcctctttttacacactctatgatgaataccttggcgtagcaatgtatcctcttagtcaccggttttacacacattattgggttatcgggctgcggcgtcactgtgttctccacccggtaaaagaatttccttgaagtagctggttgctgctggctcaaatgcttgatgttgctctcgaatttggtcgatggaagatctgtatcgatccaattgtctttaaggtaaccagcgctccaaagaggatcaccatgcttaggctgaggcgatttcctcggtttccaaacgcagatcactctcttgggaagcagctcagcgactgtcttggagaacacgtgatcgtcctggtgaatcagatgctctccaagctgttccacaagatacttatcaaactccggtgggtcttcgtgtccaaactctgttctgatctcaagaatgacaatctccgactctgtttcggatagaaaccgtttgagatcggccaagacaacgtcgacactataagtcttgaggataccgtggcatacacggcgatcttcttggacacgaatgtcaaggactcgagtacccgccacgagctggttatagatggagagagattggcacttagcaaagggacgagacacgaatcggataccgattttgttggtggcagagtcgtgcgtcccaggccagacgatcttgttgatgtgaagcttttcaggtccaacgccggccatccagtttttacgatcggaaggcatgtaatcacaccccggaaactcgcagccgcacgatttctcgagatcggtgagggctttcttctccgtggagatggcttttcgccgctcgagttgtttggaaaggtgagagcccattgctgaggattaaccctttccctttgctctctcttctctgatcactatattgaattctgttctctcttgtttataaaatgttccatgccttctttatcaataaacctttactcataagtcgttatgattgttttttatttacttattattggtttgaagaagttacgaattatacgttaatcttttaataattacgctactttctcaaaacaccgttgacatattcgcaaattagaagtaactttcaacttttaacttaacaaaaaccatagaaaaaaagtagtagcgtttaatatgtaagattaactgttacaatttttattgtgggaacattttagtgttataaatgtgaactgattgattagttgagatatattgaaagagtggttgagttgtaattgatgggagagtgggtttacaatgtatggtaggtccatttttgttgtatagctgtcttcactgtttgttatttgtcaatttctaatgcctggctattttccgacgtgaaagatatcaatacaacgtgatttttatttcttggaagacacatattcaaattttctatgaaataaaagtcgttcctaaaatttaaacaaggcatcgataattaatattttggataaaattcggataggatccgatggaaaaccaatcatatacactcacaggccctatcatgtcttttgtaagactatctcaaatatcacgatccacacaactaagatatgtaaaagagattactagtatagattttgggaattgagaagaaagattgcaacataattaatcaattttgatctcttgatcatgcaaaattcagttttgatctgaataattgatttagttggcctttttattgttttaatcggaacatatgaatcggttaataatgataaacagtagcatcatatcggagaacagcatcaccagtcttcatgtcaatcttatttgtttttactttgacaaaacctctcgccattctgaatttcccacggccaccaacaatcgcgatttctcgctctccgacctcttccgccaccggattcctcgagaagatactgatcgagcttccattaaacttccctgccgtgaaagccaaatcagcgtacatgacgatcgtgaatttgctcaagtctttgcacccggagacatacatcccttgaccattcccgatctctttcgagtgtttctccggcccgacggtgagcggatcgtctatcacaaacaggcttccaaaacctaccggcgaagctgagccaccggttagatttgcatgtgcgattctaacggcggtaggattttggccactgagagtatcatggagataaaatctgacacgtgtcactttctcctcattcagtttagccggtttggtgttgccatagtaggattcgtgacgcgccataacggccatgctcaaacagagtgtgaaaaatattattaatgtgctcttcataatttataaacttaaggaattgatatgaaagtttactatccaaatgaatctagaacatatatatatatatatagtttgatcacttgtaattttaggaatgtttacaggaaaaagattttctcctataaaaagagggtatatgtcattatttagaaaatctatttgatatttttctatataacaaaaagaaaatagtaaatgcatatgatccaggtattaactttgaaaattttctgtctgatattgatgatatgttcaaaattgtaatagtgtttgacaactttgaaaacatgtaaagagatttaattattttagaaaattatgattctaaaaagctttgagattctgccaaataactagcataaactttattcgaggtaaggatatgtaccacgcgcaccttaggagcgttgagcgcgtgttatcaaaatgggtaagctatatagtccagccaaaatgcctatttttgatcaattttaatatattcccagctctaaagcgcgtggtattatcatattccccgtcccactacattctgtgtgtttgtacaggttggatttattcctcaccacatatatcttaagtggactgcaccgatcaagaagattatagaatacgggccagatctgatactgggtcgggttaagttgggccaattgggctcttaataacaaacatcactctctctacgcaccattgatcactgatcaactaaacgctcccaaattcaaagacagatttaaaccaataatgaaattgtacaactcgtaaaaaataaaagacaccccaaaaccctaaaaattgcaacagagtatgtggtaaaaaaaagagacagagagatattataaaaaaaaagaccctaccaaaattttctctagagttcccccacacaacttaacttatccaaattaaacaacacaaattctcagaagctaaacttcaagaacccaaactatcacaatccacaaaaatgccttttgactctttagattttgtcctccgtctcttccttctttgcctcttctacagccggttcgccaccagtctcttccttcttagcctcttctacagcctgttcaccctcagtttcttccttcttagcctcttctacagccggtttgtcctcagtctcttccttctttgccccttctacagctggttcctcctcttgagcatcctcctcagaatgctccgtgcttcaatgttcaaagacaaaataatttaagagtaagaaacatgcttacaaaatttacaacttcccacaatactcaacaacactaactaaaaaacccattaccatcacgcagaaagagaaaaacagagctctctaaacatgggatgccagatcaaaaaaacaaaacagaaagagagatccaatctttcagcttcacttcaagacatcaacttccatgtatgaatgtagagaaaaactaataacaccaaatttaacatattaactactatactaatgcagtgatccataacacatgaatgatcatccaaaatctcactgtttatagcatatatatgaatccctatctcccacaatatacacaatttcttagacccatgtcaataatttccacagacagtaagagatcaatactttgcccgactaagatggtataatcagaaaacaagcaggcaaactaaagaaacgaatcaaccaagttttattatagtcaaagaagatatataccttttcctccaacttctttcaatacgttcctcgtctttacggccattgccaagaccaaagcccatcttccctgtagatttctcattaggcttctccatggctgcagcaatgtccttaagcttttcagcctcgagcttctcgtcaatctctttccaatcctggcctttctcagccagaacttcctctctaggtcttgcgttcccaaaaggattagcacctttaggtttctccacaatgaccaagaccggactctccggcttcacgacctccacaacggccacgggaagtgtacgtggctgtaacaccaatcttgggcgtgaaccaccgctcggtggtggcgagccattagcagcaccgctttcttctcttcttcttccccaggtatccgattcagaaccaccaccaccaccgtattgagaatcccggtttctagacaaggattcaaaacttccccttttctcaaatctgtcaccgccgccgccgttgctagaaacgaatctccggggctccgatggcttagtggagacccagctatcgacttcatcagccttggactgagactgagattcgaagaatcctccgccgctgcctctctctcttctctcgaatccgtttccgctaattggtttcttggcggcggcccagttatcatcctcatccgcacgcgacggacccgaatccctgctaggttccctatcccggttgaatccaccgcctctcctttccccatcctccgaaaccctagacgaaccccacctcgagctggacgactcatctccataacgaccaccaccatagctccggaaaccacctccaagcttagatctatcaagctcctcagcagagcgttcacgtggaccggtcggaagagcgaccagctcagcctgagtgagacgctccgtctgtggagccggctttgccttagcagtaccgtaggtagcgaattcagcaagagagatggtttggcccttcttcttcttcgttttggtggtcgctgcagcggctaaggaagggaaatcggaggaatcttcggcagaggatttctggttggtgggagagggttgttgtttgagctcagcttcatgttcctcggcttcaagagcccaagcaccaggctttgcccaaacagatgatacagcagccgccatgattggattcttcttctcttcttctcttcttctgcttcttcttcttcttcttctcttctcttcgtgtgaatcaaaaacaatgaatggctcaccgaatctcgatttcctttttatagttagatctttttgggttttgatcggacggttatgaattcatcatatcaatagggttttattatttagtatattttccattccttcacctacaaggagaaggaaacagtgttgttggatcaaaataataatagtcaatgttatatgatctatatatggtaacaaatctgtcctaagagctcaaaaagaaatgaatatgaacaaacagtggacaaatttgtatacaaaagactgttacaaaactatcaagtatatacagaaagctagtttacattcttttccccactaagagattaattagatgatcttctgattcggatcccaacatccttccgttcagcacaaggtttaaatctttgttaccttcctaatattcaggactgtacaaacttgtcaaatgttcttcgtcaaagctcttccctgaatcctgccatctcattcgtcgtggcgaagcttgttcctcttctctcgtggaatggagtataaccgttcctgtaagcactgtgatgaatccacaaatctcagaggctatgctgtctgtgttttgcccattccagtcctgttaagaaaaaggtgattcatttgacaatcttgaaacacgaggatcattactctttaatgtttgttgaaatctctctaccttgaacatgattgcactagcgacaattgtgagtgttgtgaacatcacataatagattggagaaacaattgctgcgttgaatgtgtccagcgcctgacaaaacaaaacatatgactactattaaccattggccaaagtgtgctcaacactacatcacacagacacatgcacaggttcttcttaccttgttgaggtaaatcatttgcataacaacacagattgctgcaaccatggcaaaaaaccaagtctctggataccagatctggtttatcccttcaaatgttaactttatggcaatccctacagccttgatgctcataacctatttgaaattaaaacctttagagaacaaaaaatgggaaaagatatagagctcagcactaaattccgagatgcttactgtgagagaacccatcaatgaacaaattccgatatacacaagaatgttggtttggccgcagagaggttcacagtagagaatcaaagcaaggactatcgacattgatatggctacgtaaattagaaaagctgtctcacacaaaaaagagaagggatatacgttattgtctatatcagtaacataaacacagagagagagagaggtagaaaaagcaaaacctggttgcattgctagtttccagatttcttctacagaattgggagtctgctcctgaggtgcgtgtatgacgatcataactgagcccacaatgcaacaaacacatccccaaactcccattttcctaagtttttcgtctaacaagaaatgtgccaaaacagcactaggagggagcaatcagggcaaaagatgaaaaggttagtcagagaaaaggtgaaataccactcaaaaagatgccaatacagtacaaacctgatgattatacttaatgcgccaagaggagtgactagtacagcaggtgcataaacgtaagccacaaagttagcaatttctccaaaagtcactgagttacaaaatctcacatttagaacgatggtttttaagatgggaagagtcatatggaaaataaaagatggtttttttgaactcacttgttaccaagcctacccaccaaagtggctctaacaaatatgtataacctccgaaacctgcaccattcatcaagcaagtcatactcccatttcttgacatgcaaatattctcaaacaaatgatagcagaaaggcacagaaccaaaaggtgaaacaaaacatagtggataagaaatctattgctgatggatcatctgctattaagaaaatgtgtcaacatggattcatttcaatgtctatagaaaatgaattc

SEQ ID NO: 685 - DNA, 88164 bp, Arabidopsis thaliana
aagcttctcacttattgtaccaaaacgaaaggccaccatacactactcattcaaatccatcccaccaactcacatctagaagcaattataagttcaactctctttctctctccttttctatcatctagaagcatttgtgtatatatatatatgtgtgtatattcctctctagctttaagtcaaaaccctatataaactatacaccaaagctttgaaccttcaaccaaacccaaaatccaagtgccccaccaaatgcttcaatcctcttccactacacaaaaaaacaacttaatccctttatacccttttagccaaaaccctcgctaaaagccaatccctcaatataaaataacaagtagaattgatctgcctatatataagattttgagacgaaataagatctaaaccacaagaaagaaagtaaacataaaagtatgggaaggtcaccgtgctgtgagaaagctcacacaaacaaaggagcatggacgaaagaagaggacgagaggctcgtcgcctacattaaagctcatggagaaggctgctggagatctctccccaaagccgccggacttcttcgctgtggcaagagctgccgtctccggtggatcaactatctccggcctgaccttaagcgtggaaacttcaccgaggaagaagacgaactcatcatcaagctccatagccttcttggcaacaagtgagtactatactctctaaatatgggcttatttaactagctagtatcgtttatacccaaaaaaaaacaaaaaaaactagtatcgttttaatttatacaaaatgaaaatcttggagttttcaatctatctaaatgatgttattttttgttgatgatatatagatggtcgcttattgccgggagattaccgggaagaacagataacgagataaagaactattggaacacgcatatacgaagaaagcttataaacagagggattgatccaacgagtcatagaccaatccaagaatcatcagcttctcaagattctaaacctacacaactagaaccagttacgagtaataccattaatatctcattcacttctgctccaaaggtcgaaacgttccatgaaagtataagctttccgggaaaatcagagaaaatctcaatgcttacgttcaaagaagaaaaagatgagtgcccagttcaagaaaagttcccagatttgaatcttgagctcagaatcagtcttcctgatgatgttgatcgtcttcaagggcatggaaagtcaacaacgccacgttgtttcaagtgcagcttagggatgataaacggcatggagtgcagatgcggaagaatgagatgcgatgtagtcggaggtagcagcaaggggagtgacatgagcaatggatttgattttttagggttggcaaagaaagagaccacttctcttttgggctttcgaagcttggagatgaaataatattgtcaaattttaggcgtaactgtacaaaacttttgcctagataatttgaaagtatatcttcaacttgtatgagaaatttaactggtgaattataatatatagaatttgtttttttttctcttttacaaattaactccattggcataaatattaaataccggatctagacgatcggtgataaaaatatagatcattagatcgtatagctctattgtaattaatttgtatacgattaagattatcagtttatgaggtaagattaggttggttgcccaaataactcgttatccaatgttggagataagccaaataaggagaaaaaagattacgagtatggcaaagatacttgatcacataatacttagattgtactggtatagatgataccttgttaagatctataattaaagatctaggagaagaacgtgaaacagaagataaatcgaaaatgtttcatgacaagtggaaagtgaggtttgtagttaatttggcaggaatagaaaagttgtaagagaaggaggtaggagaaaacttaaatgtttttaagataaaaaaaggaaagaaagagatatgtgaaaaagaaaaagaaaataatgaaaaccataaatgaaggaaaggaagcaacaaccaatggaccctttcttctaccaaactctatttatttctcactacccatctccctaccaacctatataccaacctttcctcatcttttgtccacttgcaagcgatctacatctgcatacatacatacatacatacatacatacatacatattacacatgaatgcataacatacatatactgtatatccatataccacataatatatttatgcatgcatgcatataaaaattatgtataggagtttcattgaatgtagccacatggttgaatttagaaagagtagcgactcgtaaacttaaacattgttctatcgtaagatgcttggtaaaatcggtgttgtacatgttccttcgttgatatcctctcctcaacactacaaaaaccctctctagctactacattaattatcatctcaaatcccaatagagcagtatattatttcctcgtatatatttagatttagttttaaaattgatcaaatggttatatactccagttgtgtgtttgtttttttgttttggccaaaaattggtaagatctcaaaaactggtataatcacttgagaaattatatgatcaccaaatgacaagttgttgtcactagcactggggcttgatatatatcatattctgatgaagatacaaactcaacaataatggaatcaataagagttttctcaggttgcatcaactaatgaaacaaatttaaagttggaaaaaaaaacaaaatcagttgaagtctaaaataaagttgagaacgtttgattaatttcgaacatcgagatttaacagtggttgggtaaatattatgaaagtgaaggaataacaaaaaaaaacatgtagaagttgatagaggaggatgatattttggaaatgaaagagatgggagaggaggagtggtgagaactgaagataaggaaaaaggggaaaaggacaaaaggatgaccacacacacagacacaagtgaacaaagacagacgcacctgcctcctcttccttcttctttctaatattattcattttcatttgtaaagaaacgactttttcaaaaggtgttaggtagatgcaatagaagcttctatcagtttttcttctttctttttttttatgttatagtttgtgagtcttgtgactctttttgtctttccctttcttgctctaaaagggaacaaagaaatttcgtcactaataagtttccccaataaaaagtctttaacgatagtcatatttagcaattcaatttgtttgtgtagcatagtttacacgtacgtagatgatcaaaactacagctcgcatgtggcaattagcagacaaatacacatatcttgggataaatataaattaaataatgcaaatagattgcaattagcagactaataagcgcatataaaaattagattgcaaagaacaaaaaaacgagccaacagtagaacaaaggaattaagtacctaactgccacgtgggactttaattacttggagaaaaacataacttcgcagaaatgtgagcaaaatttaattaccaatgtagactttttgcactgtcgtaagaatatttcagatttgacacttgtgcaaggttcattacgaatttaggactcgctattctactgaattgatcgagagacctgtaacaaataggcttactttctaagagcccattgacataaagtccaataaaaattaagaaggaagctagtccttgactcgtacaataacaacattataaaaaggcgagagagagagaaaaaaacaaatttcacaaggcagagagattagttaaattcagttccaatctctatcaaaccaaagaaacaagaggaatttttattgagactctcagatccttcttcacttcttctcatcctcgccttttttgctactactctcttcctcctcggtacgctgtcattttaaccatatacatttatcagaatcttctttttcaaataacaaaaagatgtaatcataaacatcaacaaagacacacctttgactcgtctggcagagacgctagtagttctttaactgccggatcatttggatccaccccaggaagctgcgtgtacacaaagtcttagtaccaaagctaaccctactacttttctctttcattttgcttgtgaaaaaaactgactaaggtttatgtaggcttaccgatgagagaacagacgatatgaaggcttgatttcccaagaggttgtttccagcacctgtagcttcacttgactcttccccactcattgacatttgcagagctgcacatggagtataaaaaaatataagaaaaatgccaattttgattgccatggatatacttttaccacactgttctacttacctaaagccagatcctggtcctcatcagccgcttctgacatattcacatcaccaacagacatagcaattgcctgatctagcaacgcactgtcctcatcctgccacaaaaggttgtatgattaacaatctctccgcctgtgactatataagaatgctacactcaattttaagtaacaactaaccattggttcagcgttcttgtcagttgtcctagcaactgtctcctgtgaggcggaagctgtgtccccatctttgtctttctgacctgcctcatcggccgccttcttggcagcagcttcttgtcttgctctctcctcctccatggagacccgaagggcaagagcaagttctggatcgatatttgggtccacaccaaagtcgaagtccccacctgcggccgctgcagcagctgccgcagaaacatagccacttgcaccctcatcacccgtgaatacaggtgtgctggaagaaaatttaaaagttaaaacactatctatgattcaaatcactgtctaaatgttttgttgcagcattgataaaaagcaagactagagagctcaaaagacctaaacacacaaaaccacatgaagtgcacctaccaagccggatattgttgaaactgttccttttacaatctacataacctagaaaaaaagaagaaaagggatggtacctgagaagcacatctgagagagcattggctccagaaggaacatgaacaatgtggctaccgtcattgttattcacagctgtaaggagcgcctcgagtttctgaggcttttcctcatcatcatcctccccgaaattgacaatatcaagagagacactattcttcttcagcctttttccaactatctctagggccttcttctcgtacttgattggactaaaaagtagaagcagaagaaaaacatcagtataaaactatacaaaagttactcagcaaaaacaaagcaattcggtaccttccagcaaaaacaataatcctttggcgttgattcttgttttggcgatgcttaagagctagctgggcgatctggatagctgcggttaagttgatctctcctcccacatcaaggcctgaaaagatgacgcaagtagcaaattgatgtcaaactcaatgataaagagaaagaacagattttttctaattgctctaagtagacagctaataataaatagaaagattggagagagagatacataccgtgcatacaggccagaattttgccaagatcagaggtaggagtagtcaatactctaactcctttgccagccattgtcaaaatccccaccgtattctccggattcgactgcaattgcaaaaaagaaagatccctaaaaatcacaatctcacgcaaacccaaaaaccctaatcgaatcaagtgaaaaaacgtaaattattacctgggttttggctccgcaaagaagattaacagcttccgtttgcgcctgtaacctagacggagagtaatctccgtttcgcatccactcggagttgtcgatacatatcatagtcgcctacaacaagaaatcatcgatgagaaaaagcattcaacgtggatcatcaacgaagataagcacaagtaattggaaaatcacctcgagaaccatcgtgtcgataagcagagagaagcttcaaaaattctgtcgtagagagaaagtcaggaaggcaagatttagattttagtttagaccgataataataacattgttcttctttaaatatcccctttacttttttactttctccttttagaccctaatgttttacgtttatttcaatttagccccaatggttgtttttgataaaaagcaaaacaaagttgatttattaatgaataaaagaaacacagaccacattacagtaattcctataactaaagtctttcttttattcaacattgttaccccataactctacaaaacatcaatataaaccccaagaagacaaaccacagttcaccagagaggaatttacaacggtgctaacaaacaaaaaaagatacaacaagcagagacgttggatcatcttctgctatgcattaagagcatttgggatgagagaagatcttgtgcttctgctgataggcaagtgaacataaacctcgtgaacttcctgcttacatacatcccctttgtctctatcaatcgcgtaacagacatagattgtgtcaatcacatcgtcaagaacatgtacaaagaaagccaatatcacaatcagtaacacccacgccagtacagccaccacgtacgaatctatacccaggttgctcactcctctcagaacagcccatgtctgcttttgcgcatcatcaaaccccggaattagtcattatggcaattattaaatgcttggttggtgagacaagcagaagataatacttaccgcgactgcatatgcggctgacaggacaaagactattccggttaggattctggtggaaaccgtttcgacaaatacagctgacagtaggttgcgtcttaacagctcgtaagtcattttcgcagaggtgcaatacgcttcccctgttattgcagcaaagttgatggtgaacttgttgagatagtcaagggcaccaagtaaggcgtttgcacagcaacggagaaccatgttcactattccttgtgtgttctcttctcttgcattgtccacaattgcccggaccacacgaacaatgcatatgagaagtcctgatacacatatcgtaccaaaggattgaccaaatgcattcctgaagagacagatacaaaaaataataagattcacacatgctttgacataaaccaacaacagatttgaagactaatgcaaatttggatcctcaaagctataatctcctttcaaaaataccactgtctgttgtctcttttcacatttaaagtaccaaacaagttcagatgatggattccaatacaatatccaatctataaggccaagactatgaataccatgacctagaatcactgaatactccagaacgaagccaagcaagggatacttcgaatgaccatagattatattttatgaggaaacaaaactaagagaactcaaagcaaaaactcccgcgatcacacaaaacatatattagaactaagagcaccattgattgtaagagaaactgcacagcaaattcattgataacaagaataaaatagagaaagatgtggcagcgagtcacctcaaagaactccggatgcattttttagggattgagtcttccttggagaaataccactgagcaatagctccacttatcacatacacttgcatttccaccattacagcaagagaccagatcatcgttaaaatggcaagagcgtaatacgcaggaacccaagaatcttctttccactcacaaaagtactgaccatccaactctcgcggcacaaacttcccattaaaccttgcaaacaccaagaacaccacaatcggcgcatagtacaccactaacccgagagtcagcagcggcagcacaacaaaaagtttcaaatttttggacaaggcatcagatgcaacactgatgatttggatagtaagatcaattctgtgccaattagctactatgatccagacaatgatcccgatgatcaagaaaacaaagactaggacaagtattctgtaagctagagggagggcatcgctacaagaagagctaagagtacaggcgacaaaccaatagacattgaaaaagatgggaaaaaggacaaagagaggtaaacaagcataaacaatctgcttagtgtagtgtttgagcaaaagcaggacgctaaaacagaagggcacgcttaaaataagcgttacaacaagtgtccagatcaaatccttctcaaagactggatcagacgaagaaaccatgccgtacatgacactcgaagaagcccagtagtacccatccgaaattttcgtaaaggtagaatttttgacgcaggagctagaggtgaaatcgtaggtgaaggaagaggagttcccgtaatcgttatttctatgaaaaatggagaagattccaaaaccaaaggtggagagtacgagaagatcgaagagaagtaggaaagggatgtccttgaaagttcttgggccaaaattgtaggagatctgaagaaactgagttgggtcggattcgggatcacttcgacgcggagaatcgagagcggacgtggagggtttagagagaagagggtgtgacggagaggatgagtcgtagattgcagcgaatttagtggggtcgccgtcgtccgccgccatggtcgtccacagagagagaagaaagctccgcctctggagctaaatgatgaagaagcttaagcagaagcagaagacgacgaaactcaatttagcattttttcttaatcacaataattaattagtgacgatgccgacgaccaccgcccaagcggccaagcgaagatgatccaagatctcgccaccacaatgctcaaatttaattcgttgattagtcacgtatacaggtattataccgtccaaaggagtattattatcttcatgtgcattaaaatattagtatagtttcttttaccagtattaaaagaaaaattcacgaagacattgagacgggcttcgaagaaagtctgataagagaattctcaaagcccaactagccgtattaaagcccaaatcatcgcatgcaagagtaatagtcctaactcctaaggagcgtgtgactgcatcacaagggcagatacgtttgttaacttgggcccaattgtcacttgtaaagctaaatctttgaaatcttttgagagtttaaactttaaagatatgaaatttagctaaattcgtacaaatttatatccaaatgttgacaacaacgtaatctaaaaatgcatagacgacaatattggtttccctttgtatcaactaacaaaattaatttttaaaattttggtggttctttagttatggtaattggttccttttgtattgttttccaaatatttgagttctataaaataagaaattaaaaacattagtacaaaatcttgtaaatttaaatttcgaatcaaactaaatatgttaattcaaaatctctaacttttaattatatattttataataaagtaaaaaactatattcaatatttttattatcagatatatccatctcctatagaaaacaaatctggatcgtagcgtgagtttgcattttgcaggcgtgagagttttttgcacgcacacacacacaaacacaaaacaagcaaatggtaagatttaggtaagaaacttgtaaccaaagcatgcatcaacccgtggtactctaataggctagtatctatataaaagcacaacttcacatgacaaaaaaaaccacttcgcatataacaacatcatcacgtgaactcactcaataggttcagtgtttctgacatattgttccctctctgaatgaaactctcccaaatagagaatggcctaaccacctatccaaccgcatcaaggcacttggtttcatccccttgatttctctctttttttcttttcctatcgcaggattttgtgttcttgttttgaatatgaaatgttcgtcgatgtgttgtttgatcctcttggccctttctctcctcaccgccttcactcttgcttcttcgtcaaatggtacacacaagtatattatagcataccatagtatataacatacatgtatacagaattttagcttgatatatgatgtttttactcttcaggtatagatggacctttctacgactctactgcctacacagaggtttttaaagctttgagctattaattcaatttcacaagatatgtaattgcgcatagatagaaagtatatatacattatgtggtatgtgaaatgcaacagtgtagagccgaagcagagaagccactatacaatggaggaatgctgaaggaccaaaagccttccgtcccaggcaaagactctctcacaggcattggtgctcattacacaccaacttacatattgcacaatctcacacagaacaccatctattgcttctccagttaagcatttcatgctttcatctctagaatgttatatattcgttaacagatgaaatgaatgtgatgatctgactgatggacacagtatgggtgaagatagaggctggtgctgcatcagctcatgtaagagcaaggctgagagcagacaacgccacattaaactgcgtcggttctgtaactgccaaacatggttgctggtctttcctcaaaggaggattccttcttgattctccttgtaaacaatccatcctcttctttgaggtagattctatatatgctcaaaagtatctcattagcttagatgatcccaaagactgtaaattttctgataatgcagacatcagaggacgatggtaagatccaattacaagtgacgagtgcctctcttcagccattcacgcaggagcaatggaggaacaaccaagattacttcataaataccgtaatacacacactaatttctaacgttaaaatcgcaaactacattctttatgtggttcctccttaacacttattttcaggcgagaaaacgagcagtgacaattcacgtgtcaaaagaaaacggagagagcgttgaaggagcagaggtgacagtagagcagatctctaaagacttctccattggatctgccatctccaaaactatccttggaaacattccttaccaagtaaaagacactcgctaaagtctacactaaaacaacaatgtctttgcttcttcaaacggattctgttttgataggaatggttcgtcaagagattcgacgccacggtattcgagaacgagctgaaatggtacgcgacggagcccgatcaaggcaaactcaactacacattggctgataagatgatgaatttcgtcagagccaacagaatcatcgctcgcggtcacaacatattctgggaggatcccaaatacaatcccgattgggttcgtaatctaaccggcgaagatctccggtcggcggttaaccggcgaatcaagagtctgatgactcggtacagaggagagttcgtgcattgggacgtgagcaacgagatgcttcactttgacttctacgagactcgactggggaagaacgcgtcgtacggattcttcgccgcggctcgtgagattgactcattggcgactctgttcttcaatgatttcaacgtggtggagacttgcagcgacgagaagtcaacggttgacgaatacatcgcgagggtgagggaactccaacggtacgacggcgtaaggatggacggaataggtctcgagggtcacttcacgacgccaaacgtagcgctgatgagagccatcctcgataaactcgctacgctccagctcccaatctggctcaccgagattgatatcagcagcagcctcgaccaccgctctcaggttcacaagtctctgttttccggtttagttcagtttgcaatttgaatctggttttggttacaatttttagccggtttattaacggtttttcgaattgattttggctgaaatacggtatgtctgttaggatgataaaatctggttggagtacacattgattatacttgggtgcaagtaaccggaaatttgttacgttttcaggcgatttatttggagcaagtgttacgtgaaggattctcgcacccatcggtaaacggtataatgctatggaccgcacttcacccaaacggctgttaccaaatgtgcctcactgacgataaattccggaaccttccagccggagacgtggtggatcagaagcttctagaatggaagactggtgaagttaaggcgacgacagatgaccatggttcctttagcttcttcggctttttgggagagtatagagttggcatcatgtaccaaggtaagacggttaattcgtctttctcgttatctcaaggccctgagaccaaacatgtgaggcttcaaatctaacttaacggctctatgtttaagatatggtgtaaatcttactgaggtacaaatagagggaatatatctatttttcaatttgcaaatttcggccagtaacaaaattgaatgtactggtggggacaaaagtaagtgacaatgggtcaaaaggagagacgagactttgtggcgtgggcaaacttttttcataaattttttatgagatagtgtagaaacatcaaatcaaacatgaatccctgcaaaagtaactttaaaaagctaaagtggaatcattcacatcacacagccattaactgtgagccccagcttgcctctgtcgacattatcatacacttaaatgttactatactctctaagaataaagaaatacacctaccaacatccaaacacaataaatatgaaattaactctagtggcctaatcatcactttggtagatctaaagccacaaaagatctttctttaaatcacaaagcatatctcacaatttcgaacatgataaacaatcttcaatgacagatgatacaagcaaacacgcgcgtacacgacaaagctacaatgcaaaaccctaaaagcctaaaacccaaattgtcgcagtcttaagcgataatcatcgagtatcaacaaaaactaaacaaaggcaatgctaacaaaacgactaccaaatctaaagacgatgatgctacgagaaaataaacggaaaagtaaatgcagcaagcagcactgtcaatgaaacgccggctggtctgcttgcctctcccatggccaaaccagccatccatgatccgtcttgtaacatggtctcacccgtacccatctccgacccagtcccctgtgacccgtacacattaccttgacctggagtctgttgaccctgaccagcgtaaccagtatcagaaccaggcacaggatcggaaccttgtgaggtcgacgacgagtctgtcactggaggggagtagctagtcgatttttgactgtatatacacaaaatgattcaaacactaatcaaaatgactgcaatgtcaaatctttcaacttgcgttttcaaactagtttggtattttttgtcattcttgaaacaaaattgctacaaactttctcgattaaattactcgttattgacaaaacaaagagaatcttttgactctataaaatgatggtttatgaaaagaagataaacacaaactttggcttttccaacgacaaaaaacacaaacccaaaatcttaagattaattattacgaaacccattaacacatactaaaagtttcaatttttcaaagccaaagcaacgcagcaattgtggaacttaaaaaatggataatattataatcagtaagtatttacctaggggaagaagggcaaaacgtcaccgtataatctccaccggcgcaagtgaaagtgctcgtagcatcgtcgtaagcgtagctataggagcgaggacacgcggctttaaacatctccgaatacacggaaggccgacaactagaaggtgtagcatacgcgccgctgcaacagtattcaggactccgaaacgctaaacacgcgcttttgcaagcgtctccgtcgccgaaacgcagctcagcagggcactgaatgttaagatccgtagtgcatccggtagaagcgcactgcccagatccaccggcgacttcaactatcatcggaatgttgtaaccgtcgacgagactaacgtcgtagaaatcatcgccgccagtgcctagagtgaactccgcgagagttacaggcggtgcggcaccaagcccggcgcattcgacagcgttggagccgcagtcaccggttttgcatgtaccggagccagaactgtcgaacttgcaaccggtacgagcccagaatcgaccggaccaaccggtgggagcttggagagagcgagaggtgcctttagggagctcaaatccggtggtggagagagtaggtgagccagcattcgataggattccaggccatacggtgtagccgcaccgattagcgaatgtgaatgttgagccatacgaaccttttaacatccaaaagataaagaaacaaatcactaaaaaaaatgaaactttgaaacgagtgtaagtagatgtgatagactttgaagtaagtgagtgagagactcttcttcttcttctggttatacctgtggaagctaaaaggagaacagtgaagctcaatgtgagagtggaagaggcgcgacgagaagaaagattcatcatggttctttgtcgtactcagtgttcttggtctattctaaccagaagtaaaggtcttctttgatgttgggaagaagatgagagagattagtaaaactgtgaagctatttgagttgaaatggggttttgttatttttttccttgaatttgttattgagtgttactgggctctatgcctgaaacctgacaaaatttctcttgtgcacttattattgaatctttttaattgggttaaaataactacaaaaaagatttatgggtaggaagagataggaccaaatggttttcaatatcattattcattattatttcacttgtaaaaaaatataattgtattgttatgattttctgtgtatactagtactactatgtctaaattaattaaaattcattttcattttgtgtaaaattatgatgacaacgccgtatttattcgtatcaattggttgaggagctttgtctgtgtaaaaaaaaactatgttattagcccacactaattgggcttgaaagtcggcccatgtgaaggtggaaagtggacccgcgttcaaaacacaacaagaaaaagacaaagaaagatgagaagctttggggctaaaagggggacctaccgaaactatgttaaagcatattcatttctgtgattgtccacagtccacataactttaaacccaaatttctttgaaattcgagttttgaatcgtgataattgcttatttttcacaatccctgaaaactaactatccccaaaaataataacgagaaacataacttttggcacagagccaaacaaacaagattatgtaccaactaccaacttacaagtaaaataaaaagtaaaccaattactgccatatttttgacattccctttctttgtttttgttattagaaggattattttaagggtggagactgtggatttactgagactactagtatggtttgagccactaaccgttgatgatcaatgtatgaaaatgtgacgatgttagatcgtgacacatggaagaacacagctggaagaattagtggcgaaatacagaggatataactctcttctgtctttcgtcttttgaggaacaagagaaagcgagagagagagtcttatctcacccatgccactactaccattgagagctgggccctgaccgagtctttgactcctaaatcttttcaatatttttaacttcgcccaggtaactgacaaactacattttatttaaatgtcgatttttttcccaagaacttttgtaagtctacaaaagcctgatgtatatatattcccaaaaagcaaattacaattttctttattttttctgttactttgcaaattaacaatgctcaaaaaggcaaattcacattggagtaactaaattttggtacagaataataagctagcccaaaggagtataagtgtaaaacttaagaaattgaacgataaaggtagtagtaagccttggttttgcagacgagcgtgctgtgcaaatgggcttgtgggactaattttatcgacccctttatccgtttctggccaattattgctattttaaattactagacaaaatagatttctttcttccttatgtttgacaaagaaagagcagaggacagaaacaacaattcttggaacaatttcgaaagaagtaacaagtgtaaaacaagtaaagatttacacatgaatttttctatcaagtaaagaagtaattctaccttggtattaaccgtaatgacatttttctacacatgaattttctatctgcctgcaacaagaaagaggaaatgaaaacagtatagtaacctcaacagacaatgcgagtacccatgtaagacggacctgatgtaagaaggacttaagacatataataagaagatggctcagctgctgtgcggatgcggcaaatgaatcatgctcttgtttactagtggcagtgttgcaccatctttcctcgatcctaaaagcttctcgctgcaaaacaaaactcatagtcaacaacttactaagctcattacacctaagtacatttataacaatggagcacttcaatctatatttgtcgaactcaatccaactgttgctacccgcttttccaaccattaaaacaaaacccttttaatcaacactactttctcataccaaatgcttatagtagacctttacaatcatttataatcataccaaatgcttctagtagacactacaatcttaatcaaatgcttatagaagatgatcatatgatctaaaagactacaaatcataacgagtaactacgttagctaaagtccataataatcaacagtgtggctcagattagattcctgctcatatactaaataacaagaaacatccctagcatattccaaagcgaacagaggggcaaaacggtcaatatctcaccttgtatacggtggcggacagaagatgatgaagtaatcggctccggtggcgcaagtgtaagtgctcgtcttatcgtcataggcgtagctgtatgctcgtgggcacgcatgcttaaagaagagcgagtaaaccgaaggctgacacgtgtccggcgtggcgtacgcatcgctgcagcaataccttgggtctccgaatgcctcgcacgcgctacggcaagcaacaccgttcccattcccacgcgtcaccagctttaggtctctgggacacgcgccgttcaagtccacgagacacccggtggctccgcatcctccaatgacgattttcttgggcaagattagcatcgggagattgtaaccgtcgacgaggctaacgtcgtaaaaatctagtcctcctgtgccgttgagagtaaactcggcgagagttgctggaggtttagctccggagcctgaacattcgacttttcccgagccgcaatctccggttaagcagacgaaagaaccggaactccgatcttgtgaacacaaggttcgtgcccagagacgaccggaccacgactctggtattgcgacggttttagattttcctctagagagacgaaagccagttgtggggagcggcgctgagttagcaccagagagcaaaccgggccatatcgtgttccggcaacgattcgtgatcttgaacgaaattggctcaacttctgccatgtgaaaccaattcaatcaaaatcgtgtaaagattgttaaactcgatagtcaagcaataaagaagcaaggaattagacagcgattattgacctgaaagagatgagacaaaagccaggatcataaacaagaggatccgattcatcattgctgttacaggaggattcgatcggattctaaagttgaatgcttgaacgagtaaagcgagcaactttactttcgaacgatggaaaaagcggcggaagagagaatagaaagagagtgagagtagtcgatagaggagaagagcttctctgtttctttgaaacaataaaaccgaaaccggattattctagttccaaactgggttggtgaaccgaaaattaaccggttttacggttatccatttagcgatgcgcacgtggtattttggttgtggaccatgaaagttcaaacatgataaaagttgataatttatagagagcactccgatttccaaggtaacaacaacaacaacagatctaaaatcttcccatatctgcttttatttacttaatccaatccgaatcgtgtgagctacagtaaaatgccagtgtgatcatgatgaaacggtggaaagaagttgagaagattacattttctgaagatatacaaaagattgaaaatacaaacgacatcgaagataaaaagtctaataatgagaatgatggagactgcaattagtattcaattccttccagtccatggaacttaaatgccattaaatgcaaaacatgagcagatagattttgtatctatgggaatcgttacataatccataaataattcaaccataaaacgatgatctctcaagatttaagtatccagatcttacgattcattcagatgactgaaacaaaacccagaatatttgttcgcatattatgaacacttgaaacagagcaacaagtagagcatttcacccatatcacaagtaccataaataaaaccaaccataagtagcaaaaccaaaagaagagtcctaatccgaaaccatcaagaaaaaaccaactaacaaagatagagatccatcataataagcaaaaagtggataatagagagatagaaggcggcgggagaaagaaccgatcacttgtgagataaccaactcactcttctccaccgcgtaaccggcgttggttttaacgtccaccgctggtgcaatccctggcgaaatgtcccgactcgccacagctgtagcagcttcccccgccgccaccacctccacggccaccacctccgtaaccaccacctcctccgccgtatccgcctccacctccgtagccaccgccgcctcctccgtaacctccaccgccttcagaacagtctctcgccatgtgaccgggctcaccacacttgtagcagtcgctgcctcctcgaccaccacctcctcttcctccgtatccaccaccgccaccgccgtatccacctccagatccgcgtccacctcctcttcctccaccgaaaccgccgcgtccgccagatgaaccaccaccgctgtttccttggacgggagcgccgtcgggtccagaaacatcgatggccttgggacggttgttgttgtcgatctcaacctcgaactctacggcttcttcggcagcgaggctacggaaaccctcagatctgatggaggactggtgaacgaagagatcgtcgccaccgtcgtcaggagtgatgaagccgaaacccttctgggtatcaaaccacttgacggagcctttgcgcctctcaccaccgccgttgtctccgctcattttgattggaatctcttaataactcacttttttctctaaatctttaaaaaaaacgaaaccctagaaaatactctgaaatctctctctcctcgcagctgctgtttatatgcgtataggaagggtgtggcaagggtatgactgccacgtcacccaccccaattcattttttccttgtttccaagaggaaataaaataaatgtttttatttagatctctatttctatatatgtttgttcgatttttgtctatttttctaaattgccttcaaaaaaaacatctgcacattccgaattgtatattcgagcgtgatattaaaataaaaaatctcgcgattaagatacccagaaaattaaaaaaacataaatttcgttgatttcgaaaatgaatctgcaactaaaatattaaaagaaagaaaagtaagttaaaaaagaaaagaggagttagaaaatgggccagcatgtgataaggcttaaattgattaatccatttcgggaaagagaatggatcattggcccagcaagcagttgcatctggacggttggggtgtttttcacgagggatatcagccgtcagattctgattttagatctgaaaagctagctctctggggaatagagaaacaaagatcaattaatttatttttatttttttactttgtatgttgtattttattttttgttgcagtcaacaacaacattaaagaatgacatgcaacgtcagcaactggtcaatatactcttttcaaaattttctcaatcttgtggtcaaaataagcattaactgttgttccactttccacgtacattttatgaggcagattcacaaattttaccaaacagtatgataattgtatgaagtaatttgagaagactattgaccgcaaagagattgtcctttgttggatatcgatttttgagtatcgattacaaaactaaattaccaagtaattaatttataagagaaatagaaaatgagtaaaatttaaaaattattgagagatagaaaatagatccctttaaatttagcttataattcgaaaaatgtgcatgtttttatcttaatcacttaccgtgagaaagtataggagtaaaatgatgttatcgtaaagtgccaaacaacaaatcaaacttgtgcttagcaaaaaaaaaaaaaaaaaaaaaactggtatcatttgagaacatgacttaaaacgcagccgtttaaataaaaaaagttggtttctctgcatcccatgtctagagtctagaagagtggtctcgctgccgatctcagcagggagaataatttggctcggctcaatcactcttgtggatcaaatgctcttcttcttcttcttttgtgtttcaagtcttgagaagaaatctaatctcaaattattaggattttgcaccatgtttccatcatctcagtttatagatataatcaaataatgaaattatagagatgcattgtgtcattagctactgatatgaattctagcataactgattctattatctttttgttcttgaagatcacagtagtgtgtaataaaaaggggcattgctgcagaaatatagtcatctctcaggttagcagctctctttcacttgttaaaactagattttaccatcaactgtatacttcttccttctgttttgcctgtctatcaactacaacatctgcaaaagtatcagaaattaatagtaatgaagagtttggatatctcgcaattgtatcaggattcaaataagttgtaatgaattggaatatacactcgtaaatcacacacacatacaaatacacactcacatgttctcttatacacaagcaaccctaaaacacatcaaccatgttctgattcttttccttcaaaatagatacacaaagtctgtctccacacgctcattcctcaggccttaccttcagctctcgcaaaggtgagcccaacgcaagcatcaacaaattcattatctatgaaatcagttgagaatatctgcagtttatcagcacatcctctttttacacactctatgatgaataccttggcgtagcaatgtatcctcttagtcaccggttttacacacattattgggttatcgggctgcggcgtcactgtgttctccacccggtaaaagaatttccttgaagtagctggttgctgctggctcaaatgcttgatgttgctctcgaatttggtcgatggaagatctgtatcgatccaattgtctttaaggtaaccagcgctccaaagaggatcaccatgcttaggctgaggcgatttcctcggtttccaaacgcagatcactctcttgggaagcagctcagcgactgtcttggagaacacgtgatcgtcctggtgaatcagatgctctccaagctgttccacaagatacttatcaaactccggtgggtcttcgtgtccaaactctgttctgatctcaagaatgacaatctccgactctgtttcggatagaaaccgtttgagatcggccaagacaacgtcgacactataagtcttgaggataccgtggcatacacggcgatcttcttggacacgaatgtcaaggactcgagtacccgccacgagctggttatagatggagagagattggcacttagcaaagggacgagacacgaatcggataccgattttgttggtggcagagtcgtgcgtcccaggccagacgatcttgttgatgtgaagcttttcaggtccaacgccggccatccagtttttacgatcggaaggcatgtaatcacaccccggaaactcgcagccgcacgatttctcgagatcggtgagggctttcttctccgtggagatggcttttcgccgctcgagttgtttggaaaggtgagagcccattgctgaggattaaccctttccctttgctctctcttctctgatcactatattgaattctgttctctcttgtttataaaatgttccatgccttctttatcaataaacctttactcataagtcgttatgattgttttttatttacttattattggtttgaagaagttacgaattatacgttaatcttttaataattacgctactttctcaaaacaccgttgacatattcgcaaattagaagtaactttcaacttttaacttaacaaaaaccatagaaaaaaagtagtagcgtttaatatgtaagattaactgttacaatttttattgtgggaacattttagtgttataaatgtgaactgattgattagttgagatatattgaaagagtggttgagttgtaattgatgggagagtgggtttacaatgtatggtaggtccatttttgttgtatagctgtcttcactgtttgttatttgtcaatttctaatgcctggctattttccgacgtgaaagatatcaatacaacgtgatttttatttcttggaagacacatattcaaattttctatgaaataaaagtcgttcctaaaatttaaacaaggcatcgataattaatattttggataaaattcggataggatccgatggaaaaccaatcatatacactcacaggccctatcatgtcttttgtaagactatctcaaatatcacgatccacacaactaagatatgtaaaagagattactagtatagattttgggaattgagaagaaagattgcaacataattaatcaattttgatctcttgatcatgcaaaattcagttttgatctgaataattgatttagttggcctttttattgttttaatcggaacatatgaatcggttaataatgataaacagtagcatcatatcggagaacagcatcaccagtcttcatgtcaatcttatttgtttttactttgacaaaacctctcgccattctgaatttcccacggccaccaacaatcgcgatttctcgctctccgacctcttccgccaccggattcctcgagaagatactgatcgagcttccattaaacttccctgccgtgaaagccaaatcagcgtacatgacgatcgtgaatttgctcaagtctttgcacccggagacatacatcccttgaccattcccgatctctttcgagtgtttctccggcccgacggtgagcggatcgtctatcacaaacaggcttccaaaacctaccggcgaagctgagccaccggttagatttgcatgtgcgattctaacggcggtaggattttggccactgagagtatcatggagataaaatctgacacgtgtcactttctcctcattcagtttagccggtttggtgttgccatagtaggattcgtgacgcgccataacggccatgctcaaacagagtgtgaaaaatattattaatgtgctcttcataatttataaacttaaggaattgatatgaaagtttactatccaaatgaatctagaacatatatatatatatatagtttgatcacttgtaattttaggaatgtttacaggaaaaagattttctcctataaaaagagggtatatgtcattatttagaaaatctatttgatatttttctatataacaaaaagaaaatagtaaatgcatatgatccaggtattaactttgaaaattttctgtctgatattgatgatatgttcaaaattgtaatagtgtttgacaactttgaaaacatgtaaagagatttaattattttagaaaattatgattctaaaaagctttgagattctgccaaataactagcataaactttattcgaggtaaggatatgtaccacgcgcaccttaggagcgttgagcgcgtgttatcaaaatgggtaagctatatagtccagccaaaatgcctatttttgatcaattttaatatattcccagctctaaagcgcgtggtattatcatattccccgtcccactacattctgtgtgtttgtacaggttggatttattcctcaccacatatatcttaagtggactgcaccgatcaagaagattatagaatacgggccagatctgatactgggtcgggttaagttgggccaattgggctcttaataacaaacatcactctctctacgcaccattgatcactgatcaactaaacgctcccaaattcaaagacagatttaaaccaataatgaaattgtacaactcgtaaaaaataaaagacaccccaaaaccctaaaaattgcaacagagtatgtggtaaaaaaaagagacagagagatattataaaaaaaaagaccctaccaaaattttctctagagttcccccacacaacttaacttatccaaattaaacaacacaaattctcagaagctaaacttcaagaacccaaactatcacaatccacaaaaatgccttttgactctttagattttgtcctccgtctcttccttctttgcctcttctacagccggttcgccaccagtctcttccttcttagcctcttctacagcctgttcaccctcagtttcttccttcttagcctcttctacagccggtttgtcctcagtctcttccttctttgccccttctacagctggttcctcctcttgagcatcctcctcagaatgctccgtgcttcaatgttcaaagacaaaataatttaagagtaagaaacatgcttacaaaatttacaacttcccacaatactcaacaacactaactaaaaaacccattaccatcacgcagaaagagaaaaacagagctctctaaacatgggatgccagatcaaaaaaacaaaacagaaagagagatccaatctttcagcttcacttcaagacatcaacttccatgtatgaatgtagagaaaaactaataacaccaaatttaacatattaactactatactaatgcagtgatccataacacatgaatgatcatccaaaatctcactgtttatagcatatatatgaatccctatctcccacaatatacacaatttcttagacccatgtcaataatttccacagacagtaagagatcaatactttgcccgactaagatggtataatcagaaaacaagcaggcaaactaaagaaacgaatcaaccaagttttattatagtcaaagaagatatataccttttcctccaacttctttcaatacgttcctcgtctttacggccattgccaagaccaaagcccatcttccctgtagatttctcattaggcttctccatggctgcagcaatgtccttaagcttttcagcctcgagcttctcgtcaatctctttccaatcctggcctttctcagccagaacttcctctctaggtcttgcgttcccaaaaggattagcacctttaggtttctccacaatgaccaagaccggactctccggcttcacgacctccacaacggccacgggaagtgtacgtggctgtaacaccaatcttgggcgtgaaccaccgctcggtggtggcgagccattagcagcaccgctttcttctcttcttcttccccaggtatccgattcagaaccaccaccaccaccgtattgagaatcccggtttctagacaaggattcaaaacttccccttttctcaaatctgtcaccgccgccgccgttgctagaaacgaatctccggggctccgatggcttagtggagacccagctatcgacttcatcagccttggactgagactgagattcgaagaatcctccgccgctgcctctctctcttctctcgaatccgtttccgctaattggtttcttggcggcggcccagttatcatcctcatccgcacgcgacggacccgaatccctgctaggttccctatcccggttgaatccaccgcctctcctttccccatcctccgaaaccctagacgaaccccacctcgagctggacgactcatctccataacgaccaccaccatagctccggaaaccacctccaagcttagatctatcaagctcctcagcagagcgttcacgtggaccggtcggaagagcgaccagctcagcctgagtgagacgctccgtctgtggagccggctttgccttagcagtaccgtaggtagcgaattcagcaagagagatggtttggcccttcttcttcttcgttttggtggtcgctgcagcggctaaggaagggaaatcggaggaatcttcggcagaggatttctggttggtgggagagggttgttgtttgagctcagcttcatgttcctcggcttcaagagcccaagcaccaggctttgcccaaacagatgatacagcagccgccatgattggattcttcttctcttcttctcttcttctgcttcttcttcttcttcttctcttctcttcgtgtgaatcaaaaacaatgaatggctcaccgaatctcgatttcctttttatagttagatctttttgggttttgatcggacggttatgaattcatcatatcaatagggttttattatttagtatattttccattccttcacctacaaggagaaggaaacagtgttgttggatcaaaataataatagtcaatgttatatgatctatatatggtaacaaatctgtcctaagagctcaaaaagaaatgaatatgaacaaacagtggacaaatttgtatacaaaagactgttacaaaactatcaagtatatacagaaagctagtttacattcttttccccactaagagattaattagatgatcttctgattcggatcccaacatccttccgttcagcacaaggtttaaatctttgttaccttcctaatattcaggactgtacaaacttgtcaaatgttcttcgtcaaagctcttccctgaatcctgccatctcattcgtcgtggcgaagcttgttcctcttctctcgtggaatggagtataaccgttcctgtaagcactgtgatgaatccacaaatctcagaggctatgctgtctgtgttttgcccattccagtcctgttaagaaaaaggtgattcatttgacaatcttgaaacacgaggatcattactctttaatgtttgttgaaatctctctaccttgaacatgattgcactagcgacaattgtgagtgttgtgaacatcacataatagattggagaaacaattgctgcgttgaatgtgtccagcgcctgacaaaacaaaacatatgactactattaaccattggccaaagtgtgctcaacactacatcacacagacacatgcacaggttcttcttaccttgttgaggtaaatcatttgcataacaacacagattgctgcaaccatggcaaaaaaccaagtctctggataccagatctggtttatcccttcaaatgttaactttatggcaatccctacagccttgatgctcataacctatttgaaattaaaacctttagagaacaaaaaatgggaaaagatatagagctcagcactaaattccgagatgcttactgtgagagaacccatcaatgaacaaattccgatatacacaagaatgttggtttggccgcagagaggttcacagtagagaatcaaagcaaggactatcgacattgatatggctacgtaaattagaaaagctgtctcacacaaaaaagagaagggatatacgttattgtctatatcagtaacataaacacagagagagagagaggtagaaaaagcaaaacctggttgcattgctagtttccagatttcttctacagaattgggagtctgctcctgaggtgcgtgtatgacgatcataactgagcccacaatgcaacaaacacatccccaaactcccattttcctaagtttttcgtctaacaagaaatgtgccaaaacagcactaggagggagcaatcagggcaaaagatgaaaaggttagtcagagaaaaggtgaaataccactcaaaaagatgccaatacagtacaaacctgatgattatacttaatgcgccaagaggagtgactagtacagcaggtgcataaacgtaagccacaaagttagcaatttctccaaaagtcactgagttacaaaatctcacatttagaacgatggtttttaagatgggaagagtcatatggaaaataaaagatggtttttttgaactcacttgttaccaagcctacccaccaaagtggctctaacaaatatgtataacctccgaaacctgcaccattcatcaagcaagtcatactcccatttcttgacatgcaaatattctcaaacaaatgatagcagaaaggcacagaaccaaaaggtgaaacaaaacatagtggataagaaatctattgctgatggatcatctgctattaagaaaatgtgtcaacatggattcatttcaatgtctatagaaaatgaattcttccaattcagacagctaaaccctgatcgagcagatgggttgttcaatatctatctaataattaaagcagaaagtaaatttaggagcatggaattggattctaaaaaaaaagcaagcggggaaacgaaccagcgcgggtgccattagcagcagcgcgcttgagacctttcttcttcaaaatgaagctggaacctatgaagacgctcgacgacacagctaataccagacccatctcattgtccgacaccatcgtttcctttgctatcttggtttgcagcaaacaaggtgttaaatcaaacagaggccccaaaagaagccctgaatcgtatcccaaaaggcaattaatcgtttggtagaagaaatctgattgtttttgatattgatgatcacaaaatccccgctacggaaacaggaagaaggaatgagaatcgcaggatttttggagtcgtggtgaaataattcaaatggggggagagagagagagagaaagagaaagcccccattcctcctctccagagacgacagctcatgagagatttcgtcgtcttttgtcggaaactattaaaatataatataaatctgctgcttcgcggaccaccttcttatattagccagtagccatccgtccgcttcttcatttctgttgttaatcaaatctttaatccttgtttatttatagttgtaagatgagttttttatattctacgaaaactgagtacacaaacgtgaaatcttccaaaaaatgaaatttgtgttagcaagcaaataaatcacagcagctatactattttcatttttggctttcacacgtattggcttccctcacaattattttattctgaaatcgtaattaaaggcatatgcgtccctgctggctgcatataaatatgagattcagtcttctctgaaacatttatttgatttggtaattggtatgtcatcaatcattcatcacagtctccagaaaaatcgtgtggattttaaaactggtttggggcctgatttgatgggccggccttcaggtggaaaattttcgttttcatataatagtgagtacgaaggcaattatatttgaaggcccactaaagttgatcttatcgacaaacccgtgatttaaacaaaaaaataggcccactggtattgtttattattattgccattaattgggttttctaatttgcttctctgcagaatcacgtgtgttacttttttagaccaagaccttgtggtggtgtagcccctctgcgtcaacgtggatcataacgtcgtccaccattaattagataggtgaacaaaaactcgaccaagtatttttatctgttccaacggaaatgcagataacaaagatgaaatttggtaacgtaaattagatatgataaaagagtgctcattccttatttctggtagttaatattaaaggggcaagtttatatatgttcccatgagaacacacaccaaacttatgactacaaattttaaaaagactccataacaaaagcaaaagcataaagagacaccacaatgacgacgatgatgctaaattaaggatgatgataggaagatcctaagagagctgaccacaatcggcaacaaccacaggcttcgtcggctttccagatgatgatccaaccttctcgatggcctttaccacgtctaagccttccacgacctgcccaaacaccacgtgcttcccatcaagccaatcggtcttcacggtgcagatgaagaactgagatccgttcgtgtttgcaccggcgttcgccatcgacaggatccccggtccggtgtgcttcctctcgaaattctcgtcctcgaacttgctcccgtagatcgactcaccgcctgttccgttcccggcggtgaaatctcctccctggcacatgaagttagggatcacacggtgaaacttagatcccttgaagtgaaggggttttccggtaccgccaacacctttctctccggtgcagagagctctgaaattctcggcagtcctgggagtcttatcggtgtacagctccatcacgatccttcccgcgggctggccgtcgatggtcatgtcgaagtataccttagggaacgccattcttgttgtttgaaacgtgagatctctatcagactgaagaagaggtttgttgtggatgatgaatagaggatttatcggtgaggttatcgatttatagccggccaaggggaagcggcgaatatctcacagataaacaagattattacatgtgggaaaatctcaacggctttaagatcttaaccgtggttaggttaagagtttgaccaccggttaagtaggggtcagtcagtcagtgcgttggagtatctcagacttggcatatgcccctcctggagcaacgtgccacacgtgtcccacaatttctaaacaacttgctaaaaacaacgtcttttaatcttaaaaattaattttatttactgtcagttcaaattcaaaaaaattgaaccgttaaactttagtagtaacgcatactatatgcatgactttcaattaacactatcaatgctttgcgcaatagtccacccctcataaatgttagctgtaatgagtggttttctttttagggttaaatttttcctcatagtaagtaaacgtgttcaagagtagagggaattcaaaaatcagaataatctagaataagtgattatcaaaagttagttgagtgagaattattcggaactgcactttctgcggcctagagtcagagagagaaccaatcaaaagaatttgttgagaggtaagcaatttaaaaaaatgaaagcaacgagcggcccaaaaggagtggacagcatgagccgaacatttttttaaagctatgatatgaaataaagagaataatactattatatgactaacatataccaatggtacaatagccggtttaatcactcatcaaggaaggaatctaatacatacgtaccacattcaagcatggtcctcatgtttgttttgtttctaaagtgatccaggatacagaaacgcagctattttcttcagtgaatctatggacggttctaagtaggtatgcacctcagcagctgatcgagacaaaacaaaagaagcagcaatgttacgaaaccgttttcactttttccttgcaactaaatcgtattttaaaaaaggcaccaaatcccaaaatagtcttgtcaatattactatggaagaaacacttgttacctttcactagttttttcaagtctttggagaagttatccacacgcccaaatacaggatggatcctgcaaacctgaactacacagagttccaagtataacgacatctctgtcgtttggatcagcataaggcacaacttctttacttcatctggaatctctttggatttgtaattatcacatagctcagcgactatcgccgtcgcttggtcctgcattttaatatacacattgtagtaccaagcaaagagaggatgattaaaaaaaaaaaaaaaaaaaaaaaaaaaaatagaaaccagtaaccgttcttggtctcgaattaacgtacctgtagaccatgtaaaatctccggctctggaagctcagggaaatgagcaatatcgacatatcccacttcctctgccctcgtaacaacaccctctgcttgtaagcacagaaatttcaacaatagagaagccactctatatatctgtatcgcaactgagtctgaaaattgcgattgaggaacagacccaggatgttctgttgtgtctcccctaacaactagagcagtcgagatagatactgcagtgatcttgggtttcccaacacaaactaaaggtgctagcgaaaaccatccgtgtttggtattgatgaaagacggtcttttgcaggaatcaaactcttctttcgctactggagggcataacagatgagatatgtggctctgagactctctaagccgttgagcgcctttgctgataaaggccaagagatgtattgtcatttctcttaatggagaatccatatccttcataattttaacccatgatctccaatggctagctaatgcacacagcagaaggagagtatgctcggttactctcagataagcaagggaagtccacgtccgttgacttcgtagcctcactttgtcacgatcatcagaagggaaatctggtgcagcgagatagtatgagatcatgtaacctttctccaagaaaaagtaagatatgacactctccacaatatcagcccctgcagaaacagatcctagagaatgaaccatggcagtaaccacagccaaaccgattccccagatatgctgagttttttctgtcttttctagcagcgagcccttttcattgtcagataccaaagtagacattccatccggaaactccattaacaaagctcttaaagtcgagaaaaatccagaatttagaagcatctgagcaccgccatgaacttgagcaatagttaagaaaaattttagtattgctgaaacggatgttgtggatttcttatcctgaagctgtagaataacatgctgcaagcggagttgactctgtataatagggaaccatgtctctggcgtcaaaaaattcctgagaatcaagtctactgtggtcaggcagagagtcaagtactcgggattccccatgaagttgcagagaaggggtaataatccaattgtagcatcagatatttctgcaaaatctttggctagcaccatatgtcccatcccactcgagtttgagttgtctgaaccaaaacccacaaccaggagcagcacctcaagcaggaggtttatcgtcttcttcaatatagcatttgaatgcctcaaactaccaaggatcttgaggccaggcccaacatttctcaggacaagtgcacatacagataatgaaagatttttctttgcggatttcaataggcgggatagcaagtctgcctgtgctgtaagaatatcaaacacaatcttgggtgcatcccagagagaggcaagtgaatcaaccgtggtgcaaaattttcggcatactttatcaatgcttaaaagagtgactcgagaagggattttcctttccgcagctgcactttcttcaagagactgcacataaggtgtagcatttagatgtaccgaaatcttaaattaagatcccaaaagtgggacatacaacatttctaccgtctatattggagtacataggccagtttagattaattctatttgttcggtttagtattggttagatcttataccacacttgtatataacagagtaattgtacagtgtaatcattagaactttctcattcatcttaatgattacactgtacaattactctgttatatacaagtgtggtataagatctaaccaatactaaaccgaacaaatagaattaatctaaaccggcctatgtactccaatagtctagtatgtttgagtcagctattagctaaaacgttaaatgaggaaaaacaatctagcccataaatgtattatgatgggataaactcagaaaagctaattaaaacagagaaacttacattatcctcataaagtatcaagacggaaatcaatgcatgcaaaacagagagctgcgaagttgagagtaaaaccatcgagtttgctctctgcatgtagttcaacatttcctctgccgttgttttagatgtcttccactcagagaaatcccaaatatcaatacctaattcagtctgtatttgctgagtgtcaaacaaacagtcccccaaagccatatttacatccttattagttttctgtttatatttctcccaaaagctcgtctccactagaaactggaaaagctctttgaaaggaccagttgggatatcacgaccctcaagttttccttgaagatgacagtatagatcgctgaaaatcataggcatcaactcctttcctccactagaaatagaacccaatagattgtaagcaaaatgtgaaacagtggtaaaccttttgaataacatgagaacgaataattaaagattaaggagaagcactgccgactgtagatttaagaaagataaatgtgctactgaatttgaaaattagcaaagaaatgctggaaaagcaaaaatgtaagaaataatggtcttacctataaccaagttttgaatattgcgccaacaactcagaaaaagcaggttgagcacaaagctgtcagcatattgttaaacaagcaacagattcagatatgacaaggccttgaaaggtgtattgaaaagaccaaagatatagatcgatccaaaagagaggaacttacagtttctgatatgagtttgatcttctcaactaaaaccatagacaatgctcctgcgccagatgtttccagtttcacaatcaaatgcacaataagtaaaacggcagcaacctatcaatgcagaaaatgagaaacatttaaaacttctaattactatttctgaaatatggaggcacctaagcaaaaggtgtaaagcgtggtgaaactctactgattgtgctttataagtactacaaatgaacgccacataaatctcaatgaacatagttcaataagaagtccagttcaaagaaatacgtgcctttgcttggaagtttatttcactttcaccatctaaggaagaaactgactggataatgccatccaaaacagatatgtcacaccattttgaaaagatatccttgggatctgaatcagctgtccaagttaatttgggtggagatactccattacttgctgtctttttagtctccacacatggctttttaagtgactccgcaaacagcaacttcttgtacaaaaacatgttgcaagccataatttccaaaacagaagcctgacactgatatttcactaacaatttcgagatttcttccttgcctaaacttccaaccgtcgaatcttttatcttagaagcctgtgatataatgtcggaaaattcctgccacaacttttttgacgccttaaacggttccagcatatttgcgtattggccagcctcttgccaaagggttttcaggaaatcaagtaaacccagtaatatatctgtgtgtctggaaaagatgaaaccatcacgtaaatattacaggccatctagaagatctcatacagaaattcagtgtaattagaagacagatcgaaacaaaattagccttcgaagtacctatcgacaaaatcggttgctctctctacatattgcaggatagtgtgcagtaagcgagatttacaagcccagtcaggaattgaggaggcatctttgcgcgactgttttacgttgctagaatctgagtcttcgtctgaatcaaatatggccactaaaagagcaggctgaagaaaaaagataataatgaaacaacttttcagtatgatgaaactggagaatctaaatgatttcaagaagaaaaattgcgtagcacaaaaagcaatttaaataaccctgaaagcctgtgacaagaaaatcaaagaatgggaagcaacctgaaatcttgccgcaacagttagtagtttcaaggtggcaacgactagatgctcattttgtcccgatagatcaagtacgatctgggtaaccgaatttcttaaatctgtaatctaaatagaaaactatcattgatccttacatatagacagcagaatatactacatgaacataatagataacggataagaaagatatcatactaacctgtttattgtctagaccaaagcctgcattgcttattatatagagttgtgatgattctgccaaggcaaataactttgacagcacttgagcagcacaaacctgtatagtctgcaggaaatatttgatttttagacatgtgattggtcaaagcatcaacttctacgaatttggatgaaagtccatacaggattgcggaagtaagaaatcagtgatgtgatagctgcaacaactgagattggttttgttgtagatgacagcatggcttgatgaaacacaggaagaccagaatgtgtactctgcaacaacttatagcaaactatcaaattccagaatgcctggaaggaaatcgtgtatgaccacccacatatttaagtgagagaaaaaagtgttcaaaaaatcgctagccaaagcaatattcgatgtgtgtttgcattttgtatgcaaaatttaagagattaatcaattattttgaaaaacaattcaatgggaaatagtgatcattgtgatgtatcatgtacttgcaaaagctttcaagaaggtcagaggtaagacaacgcttttacctcagaaaattgggagagtatgacgttcaaaacatccaaaacagagactatagcaagttgccatccttcaatctctgctggttcaataaaacggctcgaacaaaggttcttttacaatgaaacatatcagtaaatcaattaaagcacatcagacccataggaaagtagaagaactattccagtatatatacaaacctctaaattttgcgtagtcgtacaaattattctgaaaagagcactgtgaacagaggcatcgttcagtaaaatatcaaggagaacatccctcagctttgtggagaatttactgaatctgagacacgttttcatcaactcgatgacctgcaggaacggaggaaaagaacaaaaaagacatattaaaaaaaagcaagacacatccaacgcatattttcgaacagaaaaaggtatagctaataattaagacatacttttagtgtcactttccaacgcatatttccatgattgtatttccaatactcatggctagcaagaatatactgcaacgagaaaacaactagagcaaaaactacatcattctctagtcccccctccacaagttgcatggtaaattccagaactgcaagggataaaacaaatcacattatacaatatatagagagtcaagacatatccaagaactgtgagcccacagttgatttagatttcgcactaaacagaattctgccgcagacttgcctgatatgaccaatgggcagctggtatcattcttctcgcagtcaatcaagatcatctttgcaagtttcccagagagagaccaagaaccgctttttaaaaaaaaaacagcggaaagagtaaaaaaaaggtcagatgcagccagagaatgcacaaaacgatgaagtaaaataaatgagaattttaagaagccttgttaaagccttgttactaaaaagagatattcctcaaaataaaagctaagaaaacactaaaacagtactttcgacaatgtgcctcattacaaacaatagaatggttcctagtaattaataggatttgtcgatgatctacgaagcattcttgtgagagtttgtctttttgggagaagcatatcaagtgttggcaatgtgttagagattacttccttatggataaccgatgattctaaataagaagaaaaactaaaatcttctaggcgtggtaaacttcaatgagtatattatataattatgggtaggatatatttgaaaatgaacaaacttaaaaaagagccaacctcaatgaaatattatagccactgtcagggacgtctgaacatgaagtcatgtcaaatatatttgactttaagaccatgggagcaacacttgacggggaactgctcaaagagtaaaataaaattagctatcaatgttccagagagaagtgataccgaattccaaactataccatataacaagacattgcacatgacatgtaatattatgacacgcatttgctagaaaagaaatactgaagaaaaaattgataaccaagacagcaaaagaataagcattacaacaaaaattaccatcgcagtagtttagctaagatatcaatagccattgccatcacagcggcaccgccagagtcaaaagtcaggcttctgactgaattacaaattatatcaaccaccctggaacaaaaaaatccctgttcaagtactccggaagagagcatgtaagaaagaaataaaaatgcaaatacttcacctcacatcactttccatcttcccattcacataagattcttgaacataaaagaagtggctgatattcagtaaggagaaacatacggcctgaaatcaaattacagaacctggtcagagaagtaaaaatacggatgcatagccttcattcaaattttgagaacggtcagagaagaattgattcaaaggcagaaaagccatagactacttcatggtgtacaaatactaaagcaatccctacttcataacctggataaaaatgaaaatggagcaatgcagttaccttgttaaatgtcaccatccgacgaagtagctccagagtcacaaaagcttcacgattgttaccaatgtagagtttattggccaaacggatgatcaacacaattatgccggatagcgaatacttggaaaggaaaatgtatttcatgaatcagtaagaccataaaaaatataacattggaggagtctatgaataaggttttcaaagaatgatgagatcacttacctcccaccgtacaaggacagtattttcactgattactctcagaattcgcccacgagtattactgggaataactaaaccttcgagacctggaatatgcaacggccgggaagtttcaacaagttgagaggcatcatccgctggagagtcactagtaatatcaaataaggttgataccccgactgatttatccagaaagttgtatctgcacaaaaaaaaagaacagcagattgcaggagggtgatggtttgaaaccagtaaataagaaattctgtactgagacaagaaaagaagcttagattgatgaatgcaaaacattgctctcgtctacatagaaaagttccatataaaagtacataaacgcagatagtatattgtccagttcatacttacacacattcagcaggccaacttccttcactcagggacgacaagaggcgaatgaattcagcacttctgaatggaaattcactctccagatcaaagaggagacaccggatagggccatcaacaaaactttttcgatcccaaaactgacaacagagggactcctgaataattaagcacacaatgagcatttatggatgtctaacatagaggaaaaagctagggacaacatgcatatatgatttttacctctccttgataaaccttagagaggatgtccagtatcaactcgagggtgccatcttccagctaccaaaaatgtaaagatgactaagacttttaaacacttcataattatataatttatcatctctagataatagagttttacctgaagattgatctcataagatgcaataaatgctgaaataaaagtcctcacgacactacgatgaccagaaattggtccctgggaaagtgaaaagtaatgatagaatcagcatagggaaggataccatgaataaaatttgcagaggattggtgaaatagatctcacaccattatttgatagaaaaataagtgccaatctcaagaaaacagacaaagttaagcacggtatctagaattttaatctcgtaacttacatcgaaatcattcaatagattactttgaaggatttcaaggaaatagctcaaggatgctgcctcaaaggcttgatgaacatagctcacgtgatcaatatcctggtaatcaagtaagagtaaatacatatatatgaacaatgtgtcctctgactaggtaatggaagtattctcactttcataccatcaggaaaggactttcctccttcccaggaagagatgaaataagacacaggaatactgcccatgccaggacgagaggtcctgcttcgtttacttcagaagtgttaaggcttgaaattgttgcatccatctcttgaacgtcaacaatggaaaagacacaagtgccagaccttataagaaatatagaacctttagacaacatcgacagatattcaggagaaagtaggataagacaaattgctggttttgtatcctatttgaagaaagtttgagactatttgtgcagtgtcctcgctaattagttaaacaaacctgaaaggtactccgtcgtgaaccatttgtaacagattctccatatccaatgtttctataagaatcatcagcaactgaatttgaacacgacatgcagaatgttgtgcttcaactgacacagccagcttgctaaaattatatgaacctgaaagaatcccctgcaacacagcacttataagtaaataaggttggttacagaaaaaacggaaccagtctcaggcatgtggctagtgactcgagataccttgtagaaagaacacagttttctccatctttctccattacaagagcaatatgattcattgtaaataaggaaaagaatatccaaaatcaaattatcttcaattagcgtctcctccgcccacaaagtgaatagattgacatcctatcaaaaacaaaactagagaaaatcaaatttggaccgaaacttagtgtctcctcctcagtgccttaacatcagtataatttaagatcctacatagaataagatcaaatgagatgttaagaagggctagaactcagagcacataccatattctttggaaaacaagaggacaaaaggtcctcaagaacggatgattgtcgtctttcaagcccatctgagatcagctttacagcttcttccttaattgaactttcctctcttggcgcatatactgaacaaattctacaatcagttgaaaaacgagacaaaaatggacaaaagtgtgggtggaattttagaagcgtaaccccaccatcggaaaataagcttttgttttcattaacagcaactatttgttaagacatcagaaactagaagagactaggaaaatagggaacaacaaaataacgacttacatgcatgtatgagaatacgctttgtacactttagtaggcactggcgctgtatgtaatactgaagcagtatcttcaagaataacattagaatagaaggacagcaaaagtgttagcaagaaagctgaagagaaaagggttgaaaactgcttacataataaagtcattggcaaatatatacgtaggacaggagctacagagcttacactataatgagctatagaacttactatagagaatcaaaagtagataaagctggtccttttatgttattgatatggccatgatagcgaaaagctccataatacataagtaacaaattacagaaaaagaatgatagcatactgaaagagtatttcttgagttctttctaagaatttatatcatgaacaacaatcggaatattcaaaagaaatcttctaaccaaaaaacaggaaacaaatatatttaaaaaaacttgtgaattctaactcatagatcatcaccttcacaagattctacccatacaacaaaacattgatttatatgcaagaatgaagactgaaaattccaaaaagaagctgagacacgtaagctactaaccatgtcaatgaattcttgagttagttcttgagctaccgagtcagttgttccatattcctgctccatagatctttccacgaggatgtatgattggatttcatctagattctggccaagatttcaaaaattcagaaaaaaaattcagaaccatgtcagtttttttctccacatccattctacttatataatcattttcagaaaacaaattcagaaatccacatccattctacttatataatcattttcactaatacagcatatatatgaagcctacatgcttgattgaagactattttgaaatagatgataaagttttctttcgagttcaattgaaaattgaagagtggaaaagaagctaaccagatgagagctgattcgaagcgctttatctttcaattggggctttatcaccaactggtgctccttaattttgactagatccgaattcaaagcttcttttgatttctcactcggtggcttgaacatcgacagagttccaacgaaccacgcgtgattctcctccaacttcttcgcctgaaattgaaagagcagaccaaaatagcaccagtatcccccacgaaaacacccaaatcgcatacgtatatgaagaggaagaggaagaaagatattacgatgggttgaggaaggtcatcggagagagatgcattctcgaggtcggtgagaagagagtcaaacggatcccaccagagcgacgaatcgacagaattagggttcgccattgaaagaagttagtgagacagacaccagtgagagagagagagagagagagagagagagagagagagagagagagagagagagagatgaaattggagctttttggatttttttgttttttcgcgcttttgagtaaattatttcttcaggaaaataaaataccaattagtaattcatattgggccctgaattcttctctctttttgggtttaatgggccctgaattttatcctatcagtttatcactaaagggcctaaaaacccatctacgttttcccactattgtagccgacatgtaaaatatttttctgtatgtatttttcatattgtttagaagattgaatttattcgtcagatatattattagtctcagtggactgtcgacaacgtatggataggtgattgattcaccagtagggagcaaataaaactaggcttatgcgaatatcttatgaaagatctgcctttcttttaccatctcccattttttcaccttttttacaaaaaatgtacgtatatattaatctcccatatgttgtcgcttagtgacaaaaatatggtcaaaaacgtttatgcgcgcgaaaacgcaagcaagttttttctcccgaggactctttaacgcaaaattcttgttgatcatctcatgataaaagagaaacgtatcattaccatattattgttggaagattgcgggaatataaacaaccagtctacacaaagagaactcaaagccaacaaaagaaacaagatataaaacatatgcaaagataaaatattaaaaaaaggcaaacacgttgattatacatgagtatacgtatatctatatatacgtatttaatgtttctcaagggtgtggaggcaacggaggccatttcccgaacttggggtggtgaatgtatttaggaggaagaggtggaaactttggaagtggtgggagctgtggaagtggcggacatggcttctttggaatcaccactaccggtggtttgtatactggtaccggcggagggcatggcttcttggggatcacaaccggtggtttgtatattggtaccggcggaggacacggcttcttcacaattggtggtatgtagattggtggatgctctatcttcggcggcggcttgtaaaccggaactggaggtgggtgctctatcttcggcggtggaatgactatctttggcggcggcttgtggactggaaccggcggtggatcaactttcttaggcggacaaggcttcttcgttggtggtttgtggactggcaccggcggtggatcaactttcttaggcggacatggcttcttcggtagcttgtgtaccggaacgggaggtgggtgctctatctttggcgggggcttgtaaaccggaaccggaggtggcttctctatctttggcggtggcttgtaaaccggaaccggaggtgggtgctctatcttcggcggtttaggtggacaaggcttcttaggaataggcggtggaagctccacctttggtggtggcttgtaaactgggacaggtggtggaacctctttcttaggcggtggatcgtaaaccggaaccggcgggggaatctctttctttggcggcggctcgtaaactggtaccgggggtggaacctccacaggaggactgtatttaggtggacatggcttcttgagaaacggtggaagttccaaaggtggaggtaaagggaaaggatgatcaaagcccttaaaaggaggcaacttaggcataggccagaagaatttggaaacgcaaatctccggtgaaaatttcagattttgtttgagacccaaaatgtgtttatccccggatttggataaaaacacgatcttggtggactcaaggccgtcgtgagccggacaaggtgttcccgccgcgctgtgaagctgagcgtaacactcctcctttaacgctccgttgtcggagacaatgtcatgaggaatattaagaccaaactttcctttgtcgtcaatgtttcccgaaccttttgtaacaaaatggcctttattcaccttacagtcgatcgtcactcgaagtcctataacaaataatatcacacattgatcaaatatatattcacaaaaaaataaactatatagtacataagatattaatgtaagttatgagatacctgaaaatgcatggggggttttgatcttgctctcggcgtaaccgacaacttcgacgacacgagcgagtgagagagtcgctgataagagaaccgacacaagaaggagaagacacggaaccgaacctcgaggttcgggtaagatcctcattgggattctcaccctctgagatttctgacacacttccctttcgtttgctgaaaatataaagattataagaagaacaaaaacaaactatagagtattagtggggaaggtgatgatatgattatagtgagacttcttctcgtttatataatggtcttatcaaagatttttctgaagattgatcgtaataattacttccgaattaattaacgtttagttttttttttttttaccaacaataattggattcggcggttcctattattttgtattgtgtatcatttatttaatgtcgtcatggtccatcttctcgttgttactttcgtctatgcggcactttatgatatttttcatgcagggtggttgaaacacattgacttttttttccttaatacgacaacggcattcaaattttattttttgtttccctcatcaacgttattgcacgagacatatgcgtacaacttttgacacacgaaacttttgatccgcaaatatggttaattttattgttatagagattgcaggatgagcatgcatatactttttttttgtttcacacacacgctatggttgaaaaaagaaactgaattaatcagtgcgtgtatacggctccaccaacccaaaattgaagcggatcacattatggttagaagagaaacttaaatgtttttatggaaaaaatatagtcagtcacactacttgtcggcttatatttcttgtccactccgtatatatttaagtaattattttaccggaaatccattacaatgctaacaaatattcttaacatttgcagttatgcacgccatgatatctactgttttaaccgtatatacataacaataaaataaagtagctagtagtaataaactaacgaaatttgtcagagaagaggactgatatgatttattggcatttggttagatggagatagaagttaatatctatcatcaatctacttcgtctctgaagttaattggcaaggcccttcaataaaagcagccagctcaaaagcctactagtatttgttcctttttcttttttttttctggacaagctaagctaactactatttgttcattttaatttgatgaaaagtgtatacgtaaacgtttgattactaaatctcgttttgttcgaaatgaatagaagagttaaagaacacttatggaatatgagaacgtatcaacttgataacaaataagaacgcatagcacttttacaaattcaactttatatatagtacaagaattcagctacatatgtatcgccgtaattttctctgaaaactattatatattgtttttacacaaatgaccgatatcaaatgttgaaattcaaaactttcacccactcttcattgctagttgctactaaatccttacacgttcttatgcaaaattagcaatattatctgatgtcgcaaaattgacatgatgcatatatatatgggtgcatgcaatgcaatagctagtccgactttcgaatcgagagacgacctgattagatatataaaaagataaactacagtcctgactgcgttctaggtgttagaaacttacaacgcgaactagaaatacagaattgaggattatatgtgaacgatatcataatgttggttgccatattaaaagctacacctactcatccacgcccattaatacggtggctttggacagttgtacaataagaggttcaagtttaaagttattattgtatattcattttctggtatacagaagaaatatatactttcataatgtacacataatcgctaataaggcccattcttaaatgtacgtaaaaacatgtattcaatagcctaattgtgtagatggtgagtgtatatagtcgatcggggtataacctatagcgactatctatgcttcctttataaaaataaatatatgatcgctaatttaagcaaaaacagatgtgtcttatggaaaattctttttccaatagatatctaattatatagagcttaactttttttttttatattgcattttgctttatgtatactattatgatgtataataacatagttaaatatgctatttataatgaaaacacaaccttatcgtgtgttttagcaaaacaaatcacaaattgtctgtacacaaaaaatgtttttttttcaaaacattcagagttaaaattacagtatgtgataaaacacttgaaagttatgtgcgtataaaacaatcaatgtataatatatatggattttacagccctatgtataagaaagataaaccctatatatattaggtagcaaactagcaataataaatgaagtgagaaagaaaaaaagtagcaagaaaataaaaagatctaatttttgggcaaccaaggatatagtcccacatggtgtgagttttgcgatattagttttgttaggtgacatgcgataaatatgtgaactgtatatggttccccacattgattaaatcgaaaattgttttatgtatgtatgaaaatttgttttttttctctccatatgtatgaggcgtacgtaaaaatatcccgacgaatgcagatctggatgttgacatattctctgaatatacagttacattgtttataaaaactcacatagatatattgaatgtaaaggacaaaaggacccagagatttttactacttgtagaagtaaaacacaaaggttggtgtccagaattgtacggatggattgaaaatgtgcgaaataatatataaatgctacttatctaacaaaagtaaaacaatgttgatacatcttatatctgacaatgtcaccatgggtgcaatgaattcgaattcatacccaactcgaagctatatgtaccaaaacaaaatcgactgaggttattcaagtcattttttatttaatcatgtaactcaatttgttggaaagttaatattaatttttgaatagagacaaatcttttcagtctaatcattaacaatttgcaaactcaatatacaccatacatccaaaaaagtcttaagcaaaagagtcatcacgatcgaggtcaccatcctcctccattttgctgaactggaggaaatgagtgggtcgatggacttggtgatagtattccttgggggttccgagtgtcaagctgtagtttatgctcaccgtgtgattcgctcccatgaagttgtagttccagggtccgttctcaggaacctatcattcaacaatgtctcattatttcagtgctatataataaaataatatctatcaatcaagggcaaacacacaaaaatcaaggggttactgtgtgttctcaccatgtagaacccgaagaaacggtcactcaagagcatttggaccttctcgtagtgggtgggaaggtaaccgtggggattgctgcctgtgtctttgttcagccgtccccattcatatccggcttgcgtcagcttatatgacgtcaaagagcatgagcccggagtgaaactacatgtcaggatgatgcatttttctgcgtcccattgcttgttgttctccagaacacgagtgtgaaaagtcacatcctacagcagcacaaaaaaaacccagttattacgtgtaaaagttcgtaagaaagtataaatatatatgcatacctgtggtgacaactgaggaagctcgttaggctgtgtgtgtatccatcccaggggctctaaatcatccaagaactgatgttccggaagagacgacggcagttgaacttgctggtgatttccgcattgtggcaccatcacaacacaacggatttccttcacttgaggattatccggcggacttatcccatataaatatccagcaatttgagttcgaagatccgctatgcatataaacttcttcaatatgttctttggcatgatgtaggtgtatccagtttcctgtgaacaacaaacaaataagttttagggactttacttattaatttgaataagcaagtctgagcgaattacctttatgtcatctgagttcacgtagatgtggttgaccctgaggtagaggttagtagctgaaattgcgcgcacacgccagtctgttttggatccgaatgcagattgctcgtacggactaatggtggtgctaatcaattcatcaccatgaacatttgtggttcttgttgtgactgcagtaagctggctcgcttcctttgcctgcaggaggaaacatattctttttagagtaaccaaaataaatctaatttctgaatgtccctgtttcaagaacccttgagagaagtgacagttacaagtacctgtttctcaatctcagctatctgttgcctctgctgagacggtggagtaatctccgctccaagtattatatctcttatctctgattgtgtcagagctgatgtatttactttgttcttcttcgcgtagtcggaaaggatgagatctctaagagcaacctccacctgaatgtaacaatgaatcatctgatgtgagtaaggaaggaggataacaacttcactaaacaaagaaaagagttacttgatttttattcaaaaataagtagaaactgcagatgaaaagaccaagcggtctaatcagaaaatacaacggaacactacttgaaaggtggcgcaagggttaccttcatccattggtcgtcagtgagagaaggccaaatgtgatttggctcagtgacaacagacatgtcaggcttcaataacatctttgccttctcattgtttacgtgaagagcacgaaggatcaggatgagtctttgaaaggcagtgtacgaagaaacagtcatcaaccaatcatcatagatattgaagagggccatctgcggctctgtggccttcaaaatcagatcaccaaatttttctatcttaagacaagcctggaacggaagctggagttcacttccctttataacaatgtttgggaaatccagcagatgaacctcaaggggatccaacattcctttacgagtcacaataacttgttttggctgttcttcaacagggagagaccgcacaagtgcagcgacctcttcagcagttttccattttgcaagctgaccaaggcgcttctgcccagcccaaacgcttgtatgaatgatctagtgagacaaagatccccaatgggtgttattatagttttttcagataaaacagcggctacgtattacaatacatttacatgttactagtggaatttatgggagagaaaattaccttaaggaatagttgccctgttcttgggttgaaaataaaaatcacaccattgattggctttgttgttagatttccttcaaatgtcttgtggattgtgacacggtatacattggtatcatcaacaaaccatatgatctgattgctgaatatttcaccatagttttgagatgacagatatggctctgtaggctcagatgagtacaactgcaaacctttccttatcctctctctcaacacgtatagagcgggatttgactgtaacatttaaagtttacacaataagagtcacatatgtaaaagccaaataaaaataagcacaccacgaatagaagttctagtaccttcatgatcttgttcattgcttgagcaagcagaggtttggaaccagggaaccaattaccaaaggcggaatgcaagttgtaggccaaatcaagcccaataattacacctgcgatgatttcatcaggatatgagacttactgcagaaaaaaataaattgacaaactgaaaaaggctattaagtacccgttggagatggatagatagacatgttgtccgttgtgtaatccatgaatttggccttagtatagcgttcaatatcatgggagtcataatctccccatcgaagttgcacatctatccagtacttgttactcgctttctgatcaaacacatccttggactcagcgattagactaggcttagacattggccatttatgggcagcaaacagaagaacatcagcacaagagctattcattttgtaactcttccgtggatgaattgtctctttctgcacagtttctatctccaaaggttccaactcttgatccagtacttggcaaaggtccataacaacactctcatggattttttgccacaaatgagcacggaatatctgaatcaaagatattttaagagtaggaatctttccgtgcatatatattcctgtcaaatccaactgcacttggaaacccacatacacattcgctcgattaattgttggcgaccaccagagcgtgaatcttctattcggaatctggttcagaccagacctctgtgcatttgtcagtttcttatatttcatagactcctcaaaaccagatgccttctcccaaaaaagaccctcccaagttggaaagctggattcatgtaaagaaaattattttagcaaaattgatacggaaagctgtgagcaacaaaacatcaaatgtcaatgtgaaagaaagaacataataaattgagcacgaacgaaaagcaagactcactatgttcctttaaataaggtgtgctcaagaataccctcaacacctccaagagcttggatgacatcagttcggtaattgttcaagttccacaatttaccatcatgcctctggtgtgtccaccagaaaggattttgtttcagggcttggtactgtttgaagtcggtccggaccctccaacctttatcatatgctaaagtgtgcctatccttctggaacagcgtatttatacgcggaattcccctatcccaagagtcctgtcaaatattttttaacatgagttattatactctaaaaattaaacatcaagacttcccaatcaaacttttattctaccttgtcgatctccaaaagagaacaaggcaacacttagatatcctctaaaaatccctacatcaagtagttgacacacacaaaaagctacttaaagaccagcaaaagaggataaagctagcaaactgatatcttctcagaactataaactacgtaaagaggcaacaaaatcacgagtaaaatacttacttccagatcctccagcgtcagacgtctattttgggcctgagcttcctgcctcttcaaagcatactctgcccacacccgctgtgaatcaataaattcgctttcccatggttgtatgtaacggtaaagattaggaatcagttgatcctcctcgtggctcattccactcctgaaatggcttacaccaacatctgtctggttgctgtaccgaaggtcactttgtgggatcaaaatatgacccatagacaacatcccaagcccgccaatttctttcggagtgtagaagataacaggaggaaatctaccaaggaaaagatgaacaatcaggtttaaaaaacataacatacaactatgatacgtcaaacacaatatagtaagatagcatttgctcaccgactaggcatctttgagtttagcccaatcttaaccctcgtttggattttattttcacatttaacaagcagatccaagagctcttgcgtatgcacagtggcttcacggaagtaagtcatgaggcctgtataaaacaaataaacgtgctcagcttcatgctagccaaacattattaaacgtaatcagtactgccaaaagaaaggcgtactacaggatatacctatcagagctgtattccatttattgacgattttggtaaatgtggttgaccctgacgacataagaatctgcctcacacgattctcaaacaccttcatgtgttcatcatcagcccgcagaaaagcaactgcagtcctctctttagtttgttcattctgcagattccagacaccatcccttgtgctgctaaaagcttcttgacccatcctgatttttggaagcacgcggacttcaaatccacacctgcaggcaagaatgcaaaccccagtcactatttaagctgcactatcaaacaatgacaaaaacaaaggcctagcactaatgtacaagagccactagaaaactgagacaaaacgcatacatgctgaaaagcaagtttggattatccttgctgtacacggagacgaagccattctcccactccaaggttgtgatgctccgtggaagacgattcttcatatcccagaagacacttctaccaagattgactgcaagataaataaataatgagacaacatctggtgcataatgatagtctatctaaatataaaaaggagcataccatcatgtttcattaacctcatccttgcatctcttggccagcattttttattgttatatcccaccatgttttcattgttgggatcaggacgctcggtgagatgacgttgaataagatccctagcctcttcatgggtaaatttaaacattatatgcactttgtctatataccgagaatacagtcttatgggatggcgtgtctcaacttttgtatcccagtaggtcataaactcattaggcctctgcggtggcccggcaatttcacttgctcgagtcaaaccaaggagcaaaagatctaacactagtccataaaactgaacaacaaacgatgcgaactgcagtcccctaatgagtccatacgtattagtatagctcatatccttgtaagacagcaccacgttattcttgccagtcacatagtttgcaagcttgggatcaagaaccaaacgaagaaggctgaaagaaacaacaaaaaagacgtgttactacagaaagtctaagttctatgtctgtaatcacataagcatttcacagagagatacctgttcaacactgtcaaatcaatcttctcaaagagtttttcaaacttcgtctggagcatcactacacactgaccatcactagtgtcccatatgccttgcaaattattgataccttgacaccatttgtaaaccaggagcggtggcggctctgagtctgcaggcttaatccaattgggaaacaagtggcgcttgtcaccctcataccacaaatactgatcaagataagcatcagtaattttctccaggggatcaatttgatagactggaatcaaatggctatatagatccataaactctatgccaacctgcagaaaaaaataatgtattcaccatcagaataacatagtaaccttgagatctatatgttcagaaaactgctccagaataggtgcattatcaacttacttctttgaagctatgctgagtgagaagatgacgctttattcgcatcagagcttcatgaggattgtcataagcttgttcaattaaaccaagctcttctctctgctgttgattcaacttcacagctgcactatatgattctttcagtctctcaagggccaagataagcaactttgtgtcatgtttatatgataatggagggaatgggattgctgaaaattttctagattccagccaatttacagtggtgctataaattgcaattccttcatccgctgtgacatatggaccatctttctgaaaattatgttgtcgttcctgcaacaattttacaaggaaaatgtattacagaactgggcaatcgagaataaaaggaactaaattcaatcagacaaaaaaatgaagcctcttcgtaaccatctttgtcaaacaacaatgattttgattttacgagttgtgacaaggtacagacctgttctgccttgagccaaagacgggtcaaccgtccaagattctttctacaaactgtcttatcaacagtagcccctcttctgatacgttcacgattgtagtgagcaacatttgtccaccaatcagctttagacttgacatatcggaggatcatattctcaattgccacaggtaatccagggaccttccatggtatattagctttccaacaccgccatgcctcactaaggtgctgcaatatcgtccgcgccttattttgcttaataccctctgcacattagaagacagtataaaccaacaaggaagagataaaattaaaggaaatcgaccttgagaaaaacaaatcagttatagacgcaagaagcgaacctggcattgcatcaacaacatcatgcatgacagcagctcgaagctccaaatcaaaatggctttcaactctctgttttgtgactgttttggccactccctttgagtgacgcccctcaaattgacgtgcaagcagattccctaaccatcgttctagaagaggaactattccgcgaaggaaaaacaaccataccctccacattggagcccaaaatccacaccctggtcctttacccacaggaccagtattgaaacggtaatagatcaagtgtttcaaatccttgcacatcctgatttgtctcataagcctgtacttataacgatacatacctgtcaattgcccaacatgggagaaaatatattgcaggccatcagccaattgaaaggcatcaacattaccaagtcggaactggacatttgcatcaactacaagttttgtcagccggaggatctcacggcagagatggaaagcatttccaaaacgcgacttctttcgttccttggttgtcagagttttcacaggcttgaggttgaagttataatcaaggtgcaggtagttcaaattcttcctgtgaatcaacaggttcagcatattatacccctgccggcagacttgcagacccacttcaacccaatccagttcggtgctctgaaaaaactttgtagctgcaagagatcgaaacaaatgcttcttcttctgagccttagggggtctatggtgcagctcattcagtagataacatttcaaaagcttctggtaactaacccgaactttgacaggatatgctggaggactgcagaaaatgagataactaagaagttaatacaatgtctagtaaatttcaaaaggggaaagagaaccacagtagcatcagaaaaattagcttaccagtgctccttaaaccactctgcaacaaggggtatatcttcagcccgccgagtcctcccagacctcatattgaaaggccgaggggcaaacaacaatgaaatgccaggagctgtagtgtcagtgtagagtggcgagttatttagcaaaggttccagtccttctggtaacacaaagtcatccccatcatcatcataaccattacttttgcgctgttctttattagtgttattagagttacttatggggtgaattaatggatcataataaaaggcaggaaggtcaggatcctcagtctttatgtacataaccataggagtgtgatagacacagagttttactttcctgggcctattattgtacagatgtgggaaagctactttgtactcagttcgcagaggggatcgaattataagcttgttgatgtcattaaattcattccagtcttcatctcctttctccatatcacgatgcaaaggctcaaacttaggaccgcctgaaaaagagtaccaaattgaatcagggaaagagaacagaaggacaacaactgtgaaaacgaagatatcagaacaggagaacatagagtatagcgttacctggtatgcacatgttcagtgcctttgcagtaaagaatgatggcatgtcaaacaagtagaagtagttgcgatcaaccaaatcagacaacaactgggctgcaagcctgtgaagggttgacataattggaagtgagagattccacgtctggtaacttggaccattgatcatttttgtttttacaagtggcttgtggtcgtaaaaccaagagtacacagcagaatcttcttcttcatctagctccaactgaattgcctctagaggatcaacgtccaacaggttatcagcatagtctagagggggctcctcatcatcaaatggtggaaaccgcattctcttgaaatgacgacgatccctcttctcccttctcatcattatccacatagaaccccactgcaaacgaaagaatcatcactagaaaacatgtctcacaaattcacaaatgcacagacacaaaagaagagagagggagattattcacccacctgagccatgtaaataggttccacaacccatcgtacttcgttcacaaatgtaatagctccagtgatgtggtacaagaccttcacgtcccggacctggaaaatatctgagttcaaaattttgagcagagcaggagaacaactaaagcgagatatagatcactaagtgaataattacctgttcccagggcataggcatattctccaggagcttgaaaactgcgtgaggaacgaacttaagtgctccaagatatacacgtttatcaagtcgatgtttctttgatgacatatcaccatgatccctgaatcaaaacgcagagtcagtttcaatctaacttaacccaaacctaataatacaaagaaattggaccagattcgtttcccagtcaactggatttcgaaatcgaaattgaaaaattagaaactcgcctgatgattttcctaacgtgctcaggtggcatgtcctccttctgagtttccacgaacccaaacttcctcttgtcgccgtaccgtttggaatttagctgcatccatgttctcgccttcttctcaagcttcgcctctgcatcctcgggagtaggaaccgtcggagtattccgattagaaggcgccgtgtaagaaggatgatcagcgggatgtgaaggtgtctgcatcctcgaaccgtcggtaccaggaggagctaaggacgtaccatcaatgttccacatagcttcagatttcaaatccaaaggcccagcaaaatcgccgaggagcaaaaccctaaaacctcagtgcgagccttgacgaacacgaaaatccctaaaatcaccgtcgtcgggtgaggttggtaagaaagacgattaaccgaacgaacatatatatacgaaggcattcatgggccttttagaaaaacaatagatacgattatgggcctaatttatggattcagtcacggctcatttagtatttaagagtaagagatgtgtggaaggggtgatttggtaatttacattcaagtcaaccaaaaccagactttttaatctctctcgatcagaagttacctttttcacttttgccgagaaaatcagagacagaagaagaagaaaagcgaaaaaaagcaaaacatgaaggcgacgacgaagactccgatccacgtggtgtggtcatgggttaggagacaacctccgaaggtgaaggcttttctcgccgtggtcactggcatggcggctttggttcttctcagattcattgttcacgatcacgacaatctcttcgttgccgctgaggctgttcattccatcgggatctgtgtgctcatctacaaactcatgaaggagaagacctgtgccggtactattctatgtgtcttgtctttatcacatccatttttagggtttttcaactcagtcctgccttatcagcttctgatcgtatgtattcctctgttcttagcaaaattacttttcaacgtcacaacttttttgtttttcctcataatcgcgtccaaattttcgagctttgatcaggatttcattggtttaccactattatctgctcccggaagcagcctttagccgtaattcgtagaatcatcatctttataatcaaggattcaattggcaatttagggtttaagatgcattctatggttctttttttaaatcgaaagtgtttaccttcgatgtgtttatataactttgtgaatgattttgcaggattgtcactgaaatctcaggagcttacggcgatatttttagctgttaggctgtattgtagcattgtaatggaatatgatatacataccattcttgacttggctactttgggaacaactctctgggttatatttatgattcgtttcaagttaagagctagttacatggaggacaaagacaactttcctctctattatgtggtaagtcaatctggttttgatcctcgagttgtttgttatcatttacagtgacaatgatctgatttcaatttttgcagcttgcgccctgtgttgcattagctgtgttcatccatccatcgacctctcataacataataaacagaatttcatgggctttatgtgtataccttgaagctgtttcagtactacctcagctacgagtgatgcagaacacaaaggtcactactttatttcacaatgtcaagtagagaactacatttgttttactctctaatccgcgtctatttggttttcagattgttgaaccgttcacggctcattatgtttttgcacttggagtagcaaggttcctcagctgtgcccactgggttttacaggttagttttgatcttcaagagtggatagaggttataccaatagtggtgattcctatactcgattggattagtaccttaaaagtcgattttgaatagctgaatacattgtctaatgtgctgaaaataggttgtggacacgcggggacggttgcttgtagcattgggttatggattgtggccatcaatggttctgatctcagaaattgttcaaactttcatcttggcagatttctgttactactacgtcaaaaggtacgcattagtccttcacttcaacagtttagctatttagctctttgtatatatctcaaaagtttcaacatttttctttacagcgttttcggaggccagcttgttctccggctaccgtctggagtagtataagttcaaaagatagaaataccccaacgatgtcctgcgatgagcttgacggaaattctaattgggaaagatagctcaatttttctttacctctgatttcatcgtttatgtgtcttgaggtttcaccaagtgtctcggttacgaattaattttacagtgttgtatattttgcctatcaagggatttaacgtctttcaggtcgataagttatctttgaaattgtttctttaccaaaatttaagcaacactagggagagaacgtcttataacttgaaatttattaacgagaaatatgatcactggaaatcagtgaaactgcaacaagcacgttgaacgcattttaaaaaatcactctccataaaaaaggaagagaacagaagttaaaggtccgaaaggtttctcccattgatgaagttgatcactttagtagcagttccctctaatgcagcggtcacaactgtcaagttctgcaagaactcttctgctgtaggtttatctccgtccactagatcggtcacggctttgaggaacacgactggtattttcagaagatcagccacatacgccacggcagcaccctgaagaatccagagccaaaagagtttcaaaacaacagtttcattgattttctggttagattcagtaataagaattgttaacattacactacctccatgtcctttagcgtagcatcattggcaatgatcaatgtttcatcttgcgtggacatatccaacgagtcaccagtagataacctgccaatctgaaccaccccaattttgtcaaaattgaaatagttaaaagagtaagtagcatcttgagtctattaaataccttcaaattgagttccttgaggagattgggtgtcgagaatgcctgacggagaccaactccatacagatcaaacatctagagagataaacaaacattgctcaggaacttgcaagatgaactggcaaaaagggaatcatcactaaagatggaaaaaagaaagaaaggaagatgaacctaccggaattggtattcttctatcatgaaacacaacatcagatacaaggaatacatcgcctatgttggctcctttgacctgcaaatgttcagccaatcagcactttcattacatgaaaataaaccaactttcacaacataaaaatagagatatggagagagagagagatcttttatgatgcaactcaaatctcagagttgagtaaacgagcagtaacaaaatcaaacccaaaccacaagtaaagaaagaagagaggacgtggttcttagcaaggatgctggaagtcaagacagagcacacgagaagtaaaagaactgtaccttgaagccaccgcaggttccggcattgattatgatgtcaggttttaatgcttggatggaagcaaaagttatgagagaagctggaacagttccaacactatcgatccctggagagaaatctcagttagtagcataaaaaaagtgcattcattttccctcataccaaacaatgcagcgacttgagaaaccaaagctactatactaaaatgctgagagattcacaggctaattatcatatctttgagagcattgagtgcaaagcttacctaaagctgcatctcttccggggcaaactacattgattcgaagatctttatgcacgccgtgatacagaacccagggcaatcctttaccaagcctgcaaaaaagtaaactttgaagtgagagattcatggagatcaaatccaaacaagcaaaatcgaaaaaaggagagctcttaacggcgaatcagtagtttcagagagtccgaacttgttgaccaaaggaagagcctccgcttgcatagctgcagctccgtcagaaacacacaaaaagtaagtaagaagacgaagaagaaatcgatcgaatcggaaacttcataaatcataaagtaccgatgacgaagacgactgaggagatcggtcgaagaatctccgattgagcatcgacctcaggttcttcgatgtcacttaatccatctccatgaggagccataaccttatccctctcttccgattctcggcgatgcgtttgattcccaggaaaaatccgagaatcggaaagaaacggctggaaactccggcgaatgagagatacagtttattcgtttttggaccttttggtcctcttttgtgtttccacttaccaataataatataataaaaacaaattatttttttgtgctaatgaccgtaattaattaaatttagctaagtttttgtactaatctggtctccttgtagttttagccaagctcttgtaatcaaattttcaaattcttcaattaacttcagaatatttatttcacacttttaaagataactcaaatgtttcatcatagccattcaagcatcataaacgtaaacaaattttaacgaaattaaaaaacagagtaaacattgcatcccatggtcattagaaaaaaaaaaaaaaaggcatgagtagaatcaccacaccaacaagaggaaaccccaaactttcaattttatacatctgaaagtaaagacggttttcctcattaatctaaaacttttgggggtaaacactcaaaagtcaaaaccatataacatttgttgctgctagtgctgcttattcccttctatgattagtttgaaggctcctctgtatcagtcgaagttgacggcagaaaggtagccgaggtgagcggctcgtgaaccaccgagttagaggaaaccgatatgggactaccctcgagctgcaacattatactccccaatatctctgccattgttttcttaaactcttcttccttcaccacatttccatcatctccattcaccatcttcaacgcttccattatcatattatccatcttataaacaaaaacaaacttaactaatcaatgccgttcaaaaaataaaaataaaaattcactaataatttttgattaaaacactaattctggtttcatttgtttaacaaataattgtaacatgtaaattcaaaggcaaaataaacaatttaaaagacaaaataatttagacggggcattatttacctgggacacagcgcctattggtggtaaagtggccgatggtgcaacagtgtcaagcacagctcgtagatatcctttagacaccttaccctgacggtcttttggaatcgtctccatggcaacgtttagtgcctgcgaccaaaccgttccggatcatcatcactcgttaccatcatttaaaaagttttcctttagcataaaagctagataacatatatatgtatggtagtttaccttatcgaattcgaatttattggacaagagcctcctgataccgctcccatcaaaggtgttttcgctgtgagcaacgatcacgggctgttcattgagacgctgagccacactctccacgactctcttgaatgcttccaagaatctctcctgagacgcgcttttctctcttttatcttcttcatcaagacaagagtcaacaattggttctacgatgttgctcatcacctgttacaaggactttgctttttaggcaaaactcagttgtctctagcaacatatataacatcaaatacgaacttggatacatattacgtatcatatgtactcccaccatgtaagtatcgttctgatattttgtacaacaaaaaaaaaacacccgaaaagtatttttacggttttggtaaaaatacaaaaacaaacggttcttaatattatatgctttattttatcaatcatataaatttagatttgaagttaaattaggaaaatccatagcttaacagaaatatataaaaataaaataaataggtacccatgggtcgttggaaggaggcattccatgatcaacagaaagagactggagagctttgacgatacaatcacggagcgatgcgtccttgctactggagagctctgagaaaacagaaatgctctcgatttcatatccagggccgtggacaaactccgagagatcctcaccgtccatcctgaggatgacgataggatcacgtttcagaccagcagccatacccaacaaaatgtccgacaacacttctttgaactctgtcttgctcactttctcttgactcccatgagtgaattcgtttaggacctgtatatagtttattataacgttacaaacgatgaaaaataaatgtacggataagacagctagagggttattggtttaatctcgttgtctcttctttaaatacaccaaaagctaaacctaacgataagtaattggatactgatttgtatccactaagagagagattcgtattcagatttactacttcttcttggatatctttgcagctaataactacaaatctacaatcaatgtcctcttgatctaattaattaatccacgtgattcatgcgaaacacgacgtaatttggggtttccatgtcgataaaaaaatattactattgtacttgtaacttgtttttggtccactaaatagtttttgtgatactcatactcgtacgtttttttgttggatattcgtaaaataggaaacggcgtttgatttcgtcacagattatgtcataaataagaggattgaaaaatgtgatatgggatattgtttttaaaaaatgtcaagaaagtcttgaacgaaaatgaaaccttacgcagaccgaatgcttaaaaagataaaagctttaattgataaaatattaattatttgaaaaagaaaccttttttccgtcaagaaaggacaagcattatactggaaattgttgagttcacctaaattgtatgagtttagccaaactaaataaatagagaaaaatagtcatacataagtaaataacgaataaataaacaaaatactataacagtctttatacagtaactagtaaaataataactaggtgatgatttataaagcgatgtttcaacactgaaacgacaggagaagagcgacacgaggggctagtttgagatatgatagaggataaggtcaccgaccaaagctattatcatttctttaaaacaactaactgattctattattttttgacctagtttactgtaaagaaaaacacattttaatattagaaaaaaaaaaatatataggatgaatccaccagaccaccacgtaagtatcaagaagataacttaaacaactatggtaaaatggttgaggttttctatatataattttatatgatttacgacttagtatgacctttcgaagatcctaaaaatctatgcacaaaatggcgagagttaaacaacctgtgtccctcggtatgagaggttcgactccatctcacagactagtgacaaagttaaagaatttgcaaagggcatatatagaccccaagaagaattgttaacagttaaatgaatactgaaatcaaataaaaataaagatgtaacacaaaaattagatgcgaacatttctagttagtagttagtacgccggccaatttgaaaacatttcttactagcattaaaatatacggtaatcggaaaaaatcaaagatcacatgataaccaacaattgaaagatcaataatacaggaaaagtgattaagaaattaaaatgctaacatatgtatatgcaaattagtcggactggaccatagatcacgaatataaaaggtattaagaaagaagaaaaggaaattacctcggagtagatgtgatcggaatcaggagaagttccttgagcaggcaaaccaagagcagcgccgatatcagcaacggcgggttgtaactcagtcacggagagcttaccatcttcatcttggtctaactgttgaaacttttgttccacaaacttgtcgaacactttctcgttttccaccagctcaactatgtccgagccatcaagtacttgttgctgttgctggtggttgttgcttttcaagtccatttatggaatctttgcttcttctttctttatctttacctttcttgagtcgcgagagccttgtgagatatctcgtgatggaagcacgagaaaaggaagaacagaaacttgacacacccaaaagaagaaggaaaactcctttttttctttaaatccaagtgtgtgtgtgtatgagtattttgttctgatttggttcggacttgcctgttctttatatgtgtatagaagtcaggaaaatattagttgttaattaaaaatgattaaaacagaatttataaatttcttgctatttatgactaaatttatatatattgagtttccgacaaaaaaaaatatatatatatatatatattgagttcattttatatttgtggactcgccaccaccaaacgtatattaaccatatatccttagctagactataacttcgaaagcatcttgtgtttttttccccacctaagattacctaaactaatctgtcataaaagtctaatttaatattcatgaacttctttatccaaaaaaaatcattgaatttccgttcgcgtttttgtcattttttgtaacatgattacatgaccgtatcttttcttttacataaacttttcacacaatctggattacttactcatggggcgtgttaggttcgctatttaacttcagtaaccgacaagaaaatcataaagaacacgatgtttagtcataatgactgtgtctttttagccaatggtcggttcctttttaatatctttttccgactaatgtttggctgtatcatttttttgaacttatattccgactacttgtaattaataatattagttgacatgtaattaaatacacgatcatgacgtattataaatagagaccgacgaactaagcaaactccagaaaacataaatggaacatcgaacaatcttgaccacttaagctactatgtggatgtggtccgtatgacacgggcaataacacttgtgtgcatacatgccagtccacggataaaaatataaaatcagtaaccgagtcgtgtgaattaattatattttccacataactgacggagctaaagatttctgacaagagcaatttaccctcttgatttgtgatgacgtgtcaatcgttgatgaaaaatcgtggggacacttgttgctaattaatccttctgtgttcgtccttcattggtcggcgcctctgagctggcgtcaaacacttcaaccaaagtcaaagccggccggctctagtgcggctatctatggattaagcagattttctaaatcacggcaattaaattattagattttttttttaattgacgtgattttttaattattaataaaacggagagaataattccaaaattaagatttgacattattttggatttcacaaaagaaaaagaagaaaaaccaaaaacatatatatatatatatatatatatattttgaataatagataggttaaatttcgaattactttctatgttcttttgtagatgtagatataaacctaatgccgacaaaaaaatgaagaagatataaacctaataattagaagtggaggggttgttaccatacacattcttcaacgtaggatagattcataataattttaacaagaaaacaaaatgtaaaaggacagaatccctaacatttcccttttctggtacaagctacaaaaggcgactatgccatctttacaaaacaagaggaaatgagatatgagagaccagattctacaactttgttccactccaagtagctttcactagattgtaataccttttcgttttatatttttgctaaaaccccttttgttttgttaaatacctaccgaaatacatactttcgatccaacttttcttatacgggactggaaatggtttacgcgggccgggatccatacaaaaaatgttataagtttatattgtatcactgagaattgggcttcgttctgataaattttgaattaaggcccaatcacacaagtagaaacgcgctatcggcgataagctgtcgatctcgcaattttccccattcgcttatttcttcttcgaactacagaggggatccttgaacgccatgcagtttttctgcgaaagagagaaacatcgtgttatttagttggttgcaactagtaacgggatcgctaatcccataaagcgccacacagttaaggtgcagagagaagaacgacgtgttgttttaagcgtgaaaaaacggcgggccctctgtcttttctatttctctcttctcaacacttgcaggacagtgccctcacggataatatggagggttagtcagatggataatggattatcaattatgtgtagccacttggctacttgactcagtgacttagacttttcaggtgctgtgtaggtatataacataaaggtcccacgtacatcatctacataccattccaaagagatgtatatgtgccatcgacaatttcatgtgaagtgcgctcgaagttgttgttagtcttctagtgtcatgaattcttttcagatataatccatattcaattatcagtttataacatgcaagacagagccatgtgaattcttcttatgcatgtcccactcttgtataagaagcccacggtttctatcacatgaacgaaattggttgtatatatatattgcattgttttcatatcgtgagcataacaacttcttcatctaatctgataagctaaaggagacttctaagctgaatctttttccaggatccatcagagcagaacaaaaaaatgggagtgttccgaggtcttatgggcgcaaagaagatctttcaaggtcgatcaatggcagcttcgacaccaaaagggtttcttgcagtgtacgttggagaaagccagatgaaaagatacatagtgccagtctcatatttgaaccagccttcatttcaagctttgttgagtaaatctgaacaagagtttgggtttgatcatccaatgggcggcttgaccatcccttgccctgtagatacatttatcaccgtcacttctcagcttcattagatccaattcacaaggatcacatatatgtaacaatttttgaggtcattaattagatgtagaagatatttagaacccagctgtgtaattacttacatagaagataacatttatcgtctgatatttgccccatcttttctccttcaacattatatactataatttaggggaactctgacaacatgctgattaacaagtagtttttatttgctgacaagaaacagaacaagttgtgcattacaacataaaactatactcgccatccgctccatgacattgacacgagcgtctaaaatcgataaacaaactcataattctatgaattattgtcgaattttcaaaacagcctagcttacaataaacaaacgtttcaaagatgaacagagtcaaaggtcaacgcctaatggcgtgttaaatcccgttctaacaatttagacaatgatcaacagaaataactcagatgttgtctcttcttcttcctctgatctcactcttattccaaatccaatgcttcaccgttaagtcgcaaccggttccgttaaaccaaatatgctcaaacgtcacaggcaacttcaccgttaacaccccttacgccgtcaacctcgaccgcctcatctcctctttatcatctctccgacgtaacgttaacggattttacaacatctcagtgggagactccgatgaaaaagtcaattcaatctcacagtgtagaggcgatgtcaaacttgaagtttgcatcaactgcatcgcaatggctggaaaaagacttgtcacgctgtgtccggttcagaaagaggcgattatttggtatgacaaatgtacgtttagatactcaaaccggacaatcttcaatagattggagatttcccctcacacaagtataacgggaacaagaaacttcaccggagatcgtgatagttgggagaaatctttaaggggtttactcgaagggcttaaaaacagagcctctgttattggtcggagcaagaagaattttgttgtaggcgaaacgagcgggccttcatttcagacattgttcggtctggttcagtgcacaccggatatttcggaagaggattgttcgtattgtttgtctcagggtattgcaaagatcccaagctgttgtgatatgaaaatgggtagttatgtgatgtctcctagctgtatgttggcttatgctccctggagattctatgatccagtggacactgatgatccaagctcagtgcctgcaacgccatcacggccgccaaagaatgagacaagaagtgtcacacaaggtagggttgctacttcttatggatttgaaagttttgaactctaggattcaaatcagactgtagagatttttttatttcccaatgttacagacttacagtattaaacattttaagtgtgttttggtttttgttcaggggataaaaacagaggtgtacctaaagctttgatctttgcttctgcttcagttgctattgttgtcttatttatagtactcttagtcgttttcctaaagctgagaaggaaggagaacatcagaaattcagaaaacaaacatgaaagtaagctatcaaaatcggatatgaaaggagatttttcgtgtgttctgttttacatgttttttttccttctgtttcctctgtttcaatgatcctttgatatttgccgtgatttctaactccattttatcaatgcatggtttatctcatttctttacttacagatgaaaatattagcacggattccatgaaatttgatttcagtgtattacaagatgcaacaagtcatttttcactagaaaataaacttggagaaggtggattcggagcagtttataaggtactctttcaaacttaagaagaatcagttgttataacgatttatcataacattcttgtatattatcattagggtgtgctttctgatggacaaaaaatagcggtgaaaaggttgtcgaaaaatgcacaacaaggtgaaaccgaattcaagaacgagttcttgttggtggctaagcttcagcatcgcaatctcgtgaagctcttaggttactcaatagaaggaactgaaaggcttcttgtctatgagttcctcccacacactagtctcgacaagttcatcttcggtacaactttcttcacattacaacgtcttcttggaaaccattcaactgttttttgtgtgtatgatgttctcaagtgtttgtatagatccgatccaaggtaatgaattggagtgggaaatacgatacaaaatcattggaggtgtagctcgaggacttctttatcttcatcaagattctcgtctgcggattatacaccgtgatcttaaagctagtaacatattattagacgaggaaatgaccccaaaaatcgcagatttcggaatggctaggcttttcgatatcgaccacacgactcaacgctacacgaataggatcgttgggactttgtaagtagcaaaaactaacattcatcttttactcatcaacctcgattgtgatcagtcatttggtttacacagtggatacatggctccagagtatgtaatgcacggacagttctcgttcaagacagatgtttacagtttcggagttttagttcttgagatcatcagtggtaagaaaaacagtggtttcagcagtgaggacagcatgggagatctcatcagcttcgtaagtatattacatgcaaaagcattgagatttgatcaataactgttaattcacttcactgagttctgatgttttggtaaaggcttggagaaattggaaggaaggcgttgctttgaatcttgtggacaagattttgatgacaatgtcgagttattcatcgaatatgatcatgagatgcataaacattggtcttctttgtgtccaagagaaagttgcagagagaccaagcatggcttctgttgttctgatgttagatggacatactattgctctttcagaaccatcaaaacctgcatttttctcacacagcaatgcggtatcagatagttcttcttctttaggacataatgcaaaaacttcaaactataattccaacactgagttgtatcctcggtgagtttgtttggacactgaaattaagattttcaagatgatgactaaatgatggttttgattagatttgagtccaactcactgtaagtgaggaaaaagagtgttacaagtctctgtttcactttcaaggagagatgctgtttctaagtcatctcatctcttgaagaaaactaattgggaaaacaaaatgtacaaaaatcaatgacaaaagtaaggttatcgagtgagtcatgatcagttgaagcgagaagcaagatcaataaaaatttcttcactgcaagggattgtgaggccacccattggatgatcaaatccaaactcttcctctgcctttcttaatagatcttgaaatgaaggctggtccaagtacgaaaccggaactacaaatctcttcatattttgttctcctacgtaaaccgctaagtagcctttgggaacatcaagagagctagaagaagaagatgatgacaacagtttggcttgtcggagaatctgcttcgatgattgcagcacacgagggattctgatcgccatggattgtctttaattgtaagttagatgctttattggaaaatgtgagaaacttgcagagcagaaaggagtcagtgatgagtatatatagataagaacattacttgtagataaccctttattggtttcaaaagtttcagctcataaatttttacaccaacaagcaagcacatggctttgccggaccacggcatgataagtaagggccctatagtgatcaatcttcatgatttctgatgtgaagacagaaatcaatatgaccacttgtttgttagatagacactataactagtcaaattttcctttcttgccacagaatttttttgaaggcttttgtgactttgtcagtatataatcaaatcatgtggtcctgtcttttgaatatcattgagaagaaggtatgacttaatcagtgatagagacttgtggttcattaggtacacaacttcatgtccctacataatctatagagagatttggcatgtgatgtctttgagacaaataagccccaatgaagttatcatgtaggacatcattagacactaacttctcagacaccatttattgatttgttcttggtttagtatctacaacccaaagccatgtgctctgtaattaaaaagaaaaacctcaaaaatacttaatcatttctttcatacgttcgtttatataacaagtaactaaacccctttagattcacaaactaaagaagatccaattttaaaatctcaaagctttctccaagactaagaaacatttaagcttcaggaaaacataagggaaaatatggcttttttgaggagtttcttgggtgctaagcaaattattcgaagggaatcatcgtcgacaccaagaggattcatggcggtctatgtaggagagaatgatcagaagaagaagagatatgtggtgccggtttcatacttaaaccagcctttgtttcaacaactgttgagtaaatctgaggaagagtttggttatgatcatccaatgggcggcttaacaataccatgtcatgaatctttgttcttcacagtcacatctcagatacaatgaagtactatactacaacatttccatattttttttagattgttagctaatttcccctggagataattgtaaattgtttcaatgagaggaatatacaatacatagatcgtaattgatcaatgcgtatttgcatgttaatacatttgtgtcttgtaccaaaaaaaggaattatacatttgtgtcatttaactctggacaccatacatttcgtcattacagtgaaacggcagaatttgaacactcattattctggttggtagttatttccatatttctcaaagaacatttatgtgactattatcattccttgcgacaactgtaataatgagaaaacttggtattttttttggctcttcatataagttgtttaaaaaatgtattttcaaacaataattaatagtggcccaaacataatttaaaataggtttcgaagcccaaagcccataaattaaacgcctaacattcacgcgctctttgactatggttgcttaggaacagatgcgcgtggggaagttggcaccgttttttctcttgcttacatctatttttttttcttaaacgtctatttatttgctttacgtcattgtaacgtttgtttgttttctctgtatcgttagttgttgtacacttgtactatggacgttgaaacctgccggttagtccggttcagctagcattttttaaatgtacatctattttcttattgaattatgtgtataatgttattattctctgactatagagttaaaatatgtttttgttttttggatgacaaggttcagtttatttaaaaaacaaaataaatctaacatatattttttcttatacattcattgcattttatacatttttccatgtcaaacaattaacttccaatataacgtattgtcctccccgaaatatgaaaaagattcaaagtttacaagtgaaggagggggcccctataagaaccaattaagcctcattaaaaatttcatcacatgccaaattaagtatatgaataagacttgaaaaccgtacctcaatccccatttagcagttgaattaatcggaaagcttattagtccaatcttttttgctgccgtctcgatcgttttctctaggtgccactctgttttctctctttcttttttttttgccttgacgttgccctcttgaaattcaactgttgatcatcgtacaagaaaaaattagccaatctgatctaataatttcttgggtccaattttcctgcatcccatgtgatgaaaagaccttacatttccacttcagatcttgccacctatttttttcttgacttagaaacagagctcatggattcttttttcacgtgaatatatagagaaattagattcaatcacttcctaaacgaaacatatatggaactttctcatgttttttttatagatttgatttgacacaatcttcaagaaaatatgcactacaactattttttgaacagagtttgtctatttttctgaagcttgacttcaaatagtttacagaataaatttcaagctccaaatatttttgtgtggatatgaggaatcagcaataaagagtgtgttagaagttagaacaaagctacaatgattattataagaaaaaagaagaagaagagacagagttgtacaaagaggagaggacaagggtttatcgattcggtattctcgccgtgaaagtagaaaattagggattcaagaatttcctaaagtaagcagacaagtttcaagactagtaaaatctgcattaaagaagtcgcatttcctactgtaaaaacggaaagttgtacaaaagaggacagttttgagggaagaaggaggcaagagtaacatggggctttcatgtgcttggtcgagacgagagacatgtcattatcagtccgtaagctgaaattgtcccttcaaaagattcgtaatttctctctaatcctcttctcgttttcactgaaaacttcccaacaattctcgttcgcagaacatgctagcctctctccgtgacaacgacagcaaactctctctttctctctctctccctctgtcggtttttgtggtcgattagagaaaaaaccatgattcttattcacttgttgcttgatgtgatagatttcgcaagtaaatcacaagattcaacttgagttcaaagatttaactttgtagaattgcagagcttagagttacgtgtgcaagaagtaaccggcgttaattatattgttttagggtttaaacatgtaatctacgtattgtttattgtcagtatccgttttatgaagcttaggaagaggaacatcacaaatcaacaaagatgggaagctcgagatcgtgagacttaacatgttctttgtccctaaccttctacgaccagaaacaaagatctaataaatgcccattgtcaataagcatattataactatatagaacatggtcaaaagtattgtaaacatatacggtcacttgcagacaagagttaaggcgaatcttactcagttttttggatttttttgtatgcatttgttacaatctgccttctcaaatagatattttgtaaccagttgtttgtaattaaacagttttgtttgttggtcaagacaattagattgatttttttgtatgcatcacatgacagttgtgaattatgacaatttgtctagcctttaggtcctaaaaaatccgcctacctaaacatatctattaaaacctttctatggtagttgaaaatcgcgtgattagtctattttaggctcaagagatctagctacataaaaaaaaaatcgcgtgattagtctaatagactaatactaatagatcttgattctagtccggtgatatcgttttttccactttcgagtatacatggtggctgctagtcttgtgactagtcaaaatctaaatacttaaactaaattatataaacgatcttgtttgaagaatgaataaaaaaagttatcgtaagctagaggtaattaatttaatgcatgctttcaattataatacttacttaaccacatagagtaaggggtacatttaatttgtacttgtagtacatatttagctacctcttcgtacgtaactatgaaatttagttaccgcattgattttttcccccaatttatgataataactattgaaagagaggaagagggaccatggtgtcttggggaggaccaacaatgaaattaaatcccaatgggtttggatcccacactgtcacatgcctctctatatcccttctcctgcttttttcctgctccttaaaaaataaaactacatatatccaaaattataagtagtgtatattgtttatcatcgcaatataactactagctccttcataatgtgcatgtgaaatattggagaatattcactatataatacgtaaaacatctaaatgaccttcattctacttctacaaataaatagctctaattgaattccattttactaattatctgaaataaaagtataaacaaaaccaaatttttaggacgtgttatgatcataataattaattccctcaaacaattagtgggtttgctgaattatcatttgaaatgtatcattattttagaagagtcttacaagacggcactaaccaaaattttagataattattgataaatcatttgatcattatataaaatattaaataaatttcggataatcaagagatttaaaataatactgttgctttagcatcctatcctcatcttcctccataaataacccctttcgccacctctctctcatcaaaaacttctcatttctccttgaatttttctcctcactagctctctcactctcaccaaagaaaaacaaaacactagaactaaacaaatggcggtaaagagatcttctaagctaacacaaacagcaatgctaaagcaaatcctcaagagatgctcgagcttaggcaagaaacaatgctacgacgaggaaggtctccctcttgacgtaccaaagggacattttccggtttacgtaggcgaaaagcgtacaaggtacatcgtaccaatctccttcttgactcatcctgaattcctgatccttcttcaacaagcagaggaagagttcggctttcgtcatgacatgggaggactcaccatcccttgtgaagaagttgtttttctctctctaacatccatgatcagatgagaaaataatagagagagtgtttaagtatgatgaggactaagattcttttgcttcttctttttttacctttggatagtgatttattatccaaatggttctttttttacggactaaaacctgtaagatccacccaaaagatcattctctacatggatcatgtaaatctcgggttttagttcgtcagttaacgccttaatgggtttgtattcgatggaatggttttttttttttctatgagcgctgataagtggtggcttgcactatagtagatgattagtgcaagtttaatattggccaaatttttttatagttcgaatctatgatcgttgaagttctttgaaactaagaaatgtttgaactttgtatgaatctttgttgggtttttcctcacggatgtatatataagtacgtttgacatgtatgcgagtgagctagtgatgtataaatgaaaattttcatccgaaattcataccatcagaacgggttataaatgactacatattatccacgataaacagacagacaaaccgatcagcttagatgactcaatattgaaaattgatgcctcggatataagaaacaaaaacaataaaattacattagttagtagagtagtagaggcacaaacctcaattatgtaaaaacaccaaaaagttaatattggtttatatataattatatgttttttaatccgcctttgagtattatagtacgcagacagaattatgtggattacttctttaggtgaagcaaagcatatttgtctctagtaattataagttggtcctatacatactatttatatggattggaattaacataatgaattaagtttatatatatatatatatatatattataaattaaatgtagttactcttctctctttttcttttcctacgagccacaaatcctatatgacagcaactactctttcttaatgcacatacctttttttgtttttggcctacatacttttaatttactctctctcttctcaagaatatctttttggttcataccaatttatttttatgtttcaaataaactgcatccacaagtaccaataatatctaccttgcctcatcactcattgatacatacacatatgtattgcttaagtcaaatacacaaataatcgaacttgttgaatgttaatatgtatacacacacaacaaaccaattagttaaaggactattaattctcagtcaatctacgtacatcttaaggtttatcacaaatcaatcgttatatataaagtcagtttctagcgtagacaatatctataatccgattaaaaaagagagaggccatttgacgtagtgagaagcacatccaaactatgaatgaagggacgaggagaagaaaaagccaaagaggtttggatctcaattggatgagtacattacaaaaagaagaatctttaacatattgtccctttccgtacgatttaactatatccaggaaaattcttggaaggtgcattagtcatttgtcattaagtgctatacggatacaatttctctaaatctaaaagaaatactagaagaaaagataccttactaacataattctttttttgcaaatgcaacttttatttgattcgaacaacaaaaccttgtactcttttttagtctcatcaaatggtatacatatacattcatacttcaactacatatatagtctaagtaattcctctggattgttctctaaatagtttatgaggaaagtgtttgatccgaaaacgaaatataaagtatagacgatgattgatgacataaacaatctagatcatgcaaaacttttcaagtaaaccagatagagttcaactaaactgaagaacaaaagacctgttccaaggagaatgagatggagaactgaatgatttgaagagccggaaactgacctcatagaaacatgagattctcaacctgagtagaggaaactgagtctgcattacatggtagatagttctctgtccatccttcttttacaaattttctcactttattttccttcagatcacaataaatagcactagatagtgatgaatgcgcataagatggtgtgaaaataatctcacatgtgtcagcgtcagttgtacggaacttttgaagcttaagaatacgcgagtttgttgatgaggcagctagattaggcaatgcaaaagtcttcttcgaccattccccattagaagcatcttccagaatccacaaaccaataataccactcgttttcttttcatagaagatgacagccagttttccctcatattttgccaactttgaaaaactacgaaagttgcaaggtactttgataagatcaaatttttcagacctaacatcaaaactcatgattgcagactcatttagttttgtgccaataaaagctcgataatacaaaacaccgttgatgcaaagttcttcacttacaggagagtgaggaggaataatatcatgaatcatcctccatgatgaatcccgagttcccaatgtcaaaacctgtatctcctcagctaaaccgcgtctattcctaagcataggcatgcctctcgtaatgcacaccactttataattaccgtcaaggggatcatagcctatgtattggtttatggctctcctccctgctttgatcttgggcaaggtaattgatcgtctagtgcaggggttatatatgacgaggctagaaggtggtccatagcatatcaaaccgtggacggaaggagaaatggtcatgcgttgttgagtgtagcaagtcacatggtaagtgattgaagaagcagaagatgatgatgatgatgatgatatctcgcgtgtacttttaaggtgaacggatgagaagattgaacccaaagattgtgctctgaatacaaatacaagacttttgggtcttttcaaggactcattgaggaacaatttcatgaaatacggatcacggattatagaagcccatagcttagatacacaaaggaatctgattagaggtttgagagacaattttttaagaatctccataatcagatcaactggaagcaactctgagtttacacttacctttgtaaacttctttctctgtgtttccatggtggagggcgtgaaagatgacgatcgatctccctctggcagccacctttgcgtttgccgtctagcacaaaacttttgtttaggtgaaaaccctaaagtcttcatcaatgcaattgcaattaatatcgtttcatcattccatattagtaaataatttttataggtaattaattgttgacaaaaatatataaataattaagagttgttgacaaaactttatccaaatttagcttaatattatcgttcccacaaaaaaaaaagaagactttatctaatgtttcctttatattcaccctaagcctcccaaaacctgtcgactttaattaaactaattaagctattgcttggagttcgttaatggccttctctgtagaagaaatctcgtctattctccctaacagtttatccgcaaaccctaggaatgtttctcaaaatactatttccccttcctttttcaagccctcccttaaaccgtacgcttccaaaaccctaatctcattgtcatgtagacgctcactttcccctgttttctcggcgggaacatatgtcactaacgttgacgaagatgacaagcttcacgaagaatgcggagttgtcggaatccatggagaccctgaagcttcccgtctctcttacttggctctacacgcactgcaacaccgtggccaagaaggagcaggaattgtagccgctaatcaaaacggtctcgaatcaatcacaggggtcggattagtctcagatgtgttcaccgagtcaaaactaaacaatcttcctggcgacatagcgatagggcatgtccggtactcaacttccggagcctctatgctcaagaatgttcagcctttcatcgctagctgcaagctaggatcactcgcagtagctcacaatggtaatttcgtgaattacaagcaactgaagacaaagctcgaggagatgggttcaatcttcatcacaagttctgataccgagctcgttcttcacctgatcgccaaatctaaggctaagacgtttcttttgagggtcattgatgcttgtgagaagcttagaggtgcttactcgatggttttcgtctttgaagacaagcttattgctgttcgtgacccttttgggtttagaccacttgtgatgggcagaagaagcaacggagcagttgtttttgcctccgagacttgtgctctggacctgattgatgcgacttatgaacgtgaagtgtgtcccggtgagattgtggtcgtggatagaaaccatggagacagttcaatgttcatgatctctcaccctgaacagaaacagtgcgtttttgagcatggttacttctcacagcccaactcaattgtctttggccgttctgtgtatgaaacacgccgcatgtacggcgagatcctagccaccgtggcacctgtcgattgtgatgttgtcattgcagtgccagactcggggacagtggctgctcttggatatgcagccaaagctggagtgccgttccagattggtcttctgagatcacactatgctaaacgtacgtttatagagccgactcaggaaatccgtgattttgcagtgaaggtgaagctatctcctgttcgagcagtccttgaagggaagcgggtggtagtagtggacgactctattgtccgcggtaccacgagtttgaagatagttcggatgcttagagatgccggagcaaaggaggttcatatgagaatcgcattgccgccgatgattgcatcgtgttactatggagtggacaccccgaggagccaagagttgatctctagtaagatgagcgttgaggcgatccagaagcatattaattgtgattctttggcgtttctaccattagatagcttgaaaggagtctatggaccagtcgagtcacacaggtattgctatgcctgctttactgggaagtaccctgtgaccaaaacagagtctgaggaggccgacgcttcatgaaaatacctctactctcttctttgctttactttttaagttttgagaagcatagtttttaattagttgatgcattgcttcatattttcaaagaaatcatcgcattgtcttttatttaatcagtcaaaaaatattacagaatgacgtttcagacatgttttaaaatgagatttgatattacagaaaatgtggttgaatcagccgttttcagctctgtcatatgcgttggatttgtgcttgggggcaaatgtgaagccctccggaacctttccaagcagcatttccgatatccgcacctgcaaatagtaacattatagcaaacttaagcttatatagtccaaagtaaggtggaatgaaggagaaggatataacaaacgcacccagtcacccgcagattcagacatcatgagtgtctcgagatcatcacgaccaaagtatgaaggcggacgccagttgatttgctgcgggatcacatcaagcaaaccgacaggtatgtacctaaatgtgtagcttagccactccagcaagaaatgcctagttgtctcaactcctgttgaaaaggttaagaaaaggcagaactttagccacgagagaaagagcaaaccaaaaaaacataaattcaatttcatgctgcgtgttttttacctttcgtgtcggatccccaatgttgaagaccaaaacgtacgaagtccttcatgatgttaagtctttctccagaggtaatgtcccaatgccgttgctctttaatttcagtaaagatccaaggctgcacaagtcaaaagtccattgaggctataaaatgatttgctaggaaaatgctgatattttttggtcatacacacaccttgatcagtgctccacgagcaatcatgcagctagacaactcaggacagtcagacttgtgtttgttccagtctaaatatgagtacacatctccatttcctataacctgtaggttagtagtagcgtttttggtacactggtatatatagtcccaatctgcagacttgctataacgttgctgtcttgaccgcccatgaatagtcactgcagtggctccccagtttccgatatctgcaattaaagaatctatccggttcttaccctcaaagaatgctgttcgtacctggcaccaaaaaggaccggagaagtaaagactggttataataccaacacatttgcatccaattatgatgcagtttcatatggaaggcgatttagttacagatttgcttaggcagttaccttgatagtgataggtgtttcaacaatggaagaagagacttccacgatgttcttcatccgtaatggtttgttgagaagagctgaaccagcacttttgttgacaaccatatctatcgggcaacccatgttgatatctatgaaatcaacagtgcattctcggtctataagttcaactacgcgcgacaccgtgtcaggataagaaccgcaaatctgaacaccaaacagatcttccgatgaatgtcgtctaagcagagcccattcagaagcttggccctataacaaatcattttgcaggttttcacattatgacaaagaaaaggtttaatcattcttgcagcatagctgtgagtgtaattagtggcctaacctgcaaaagatttgtgcacatagccatctcaccacaagtcacatctgctcccaacactttacaaagtcttcggaagggaagattgcccacggttgttaagggtgcaaggtacaacttatccctaaaatcaattagctttttcttttctcgagggtgcaactttagactactatcagtttcaacaattttgatgctatcctcatcttctacgttagcttttgaagtaggatacccattctttttcgtttcctcttccaatttcacgcctgtatcaatacaattaactggaacattaggatattttcttgcctcacacccttcttacgtcaactttttctctttaatacatagctaagagatatagctacacacagtaattataagtattcaaaccatgcaactatctgagattatctagcaaaagttaattggcatttggaaatgtagaaaagtaagtctaaccatcataaactccaccaacatctccagttttagaattcttttggtcctcagattttgcctttttcatgggacgaacttcctcagtttctaatggtccaggaatatcaacatcttgtatcatttctgatgtatgctcagaactgacagctgagtcaaccgctacttcagttgcttgagtgccgttcataccattttgagttttttctgcggtaatttcctcggcagcattgctttttttggcatgtccctagaaattttatgaaaataaaaagaaaaaccagtcaggtctcatggtaagagatatgggaatgaagcagtatatgacaagccagagaactaggaaacaaacaaaaatcatgaaaacaaaaacaaaataacactctgtaagacataccaacagaccgagggacttaagtttcgcatctgcgtttgtaaaagtcatcttatttttccacagaagcctctgtgtctctttgttaaaaaagttcatctctgatttttccttgtcatctgaattaccagtaatatctctgtgactgcctaagaatctacatgataaaccatatgcacacttcattccagaggccacaaatgggcattgcccctctatatcatctgccttctgcatttacaacagaaaaaaaatattgtcagttaacttctttctcaatatcatccaaactagttccaatcaataccacaaaattatactatattcaatacacccaattcatgaaccaaataagcaacagtaaaatgcaaaaaagtgagtgagtacctgagccttgaaagcctcaatatcatgattaaaccggcacttgtctttatactgacatgaatcaacgtcttctgttctcgcaacctgcggacagagattgatcgtagattgctgcaagaagaaagagcataaattaatccctcctgttctaaactctctctcatatccaatggtttcagttgccaaaaaaactagttcttaaaacatagatagattcgaagctatacatacaagcaccgatgtgattcgaatcaatacctcgcggcgttcccgtttcagttgtcgtttagatttcttctcctgaaccaaacccgattgaggcgccctaacatcggcggcatcattttgcttcacggaacggcttggaggaggaggacaaaggaactccttcttaataggagccattgatcgttctataagctcttccgaagtcgcttcatacacagagaactgtttcgtcgattgaaccggtaacgcagcctttgcatctccttcaacactagtatccaccgcgtgctccgctattacatctgacatagcggtcaagctccgtcgtcacgaaaatgaagtgagtgatagtgtttgttagggttttagatattattcacagagagagacgaagaaggcaacaatgttttgggatgctgtttaatgggccaaaaaccggcccataatgttaaaataaacaaaccaacaaaaagagacagaatccaagactaaattaaaaactaaaaacaaaacaaacagagaatctttttgtctgaagctcaatcaatcccattacatataacttgtgttcatagttcatacctatatctactataaattgaattttttctttctaagataacaacatattgtaaaattaaatttcttggacttatatgatatatatgtaaattcaactgactctgcacataaatgaaatataatgtttgatttgatatgtaacttgttgaaaaactccaaccctttgatccaccgcaacaacttctctgctctattcatttgattcagattttgttgccatggttccattctggtggttctgctgatgagactgttgctgcatctgttgtggctgctgtcttaactggctgatgttgagttgctggaacatctcagcgttgagtgattgcatctttgatctctctgattcgttctgactgctctcaccgattgccagtttcagtcgctggacttctccattcagtgcttcgttcagagctgcaaagcgggggaaaaaaatcgtcatttcacattcgttaagcgcaaaaatggagatttttttaaagcatataggatctggttccattttttgttaaagtcatgttaataatatcgtaaatttgatacaatgtgaagagaaatgtataccatcgcgaagacgcgcttgttgctccattgcttgaagccggaacttaagctcattgttctgatttgtcaaccccatcatatcgcgctggataatgcagtaactaagatcgttagaacaaaacaaaaattgaccaatctaggcgcttttataacattgtaaacaacgcacctgcaaaagtgtgagctgagcagacaatgtggtagcctcggtctgaagagtctgcactttgtgttccaattctactatgtaccgcatcttcctctcctttgaccgtgctgcggattgacggttcgctaagattctgaaaagaggatcattccttaaacatcagaatatttgattataaaccggtaatgttagtcaagattcaatatttgtaccttttgacacgtttagggtcagacatggccatctctgctagtttatcatttgccatgatcttcttcatttccgctgcagtaaactcaccgttattgaactcgatgctaaaagcagcacccgagttcccatcaaccgaattggtaggggaaactttccttgacatagatccaggagaaggaggcggctttagagattcatcaccaaaagacaacttctccatgaaacaactgtccactgaaacactcctgtaatgtctggtggtaggagcaatatctcctccagccgctcttctcttcacgctctctctcttttcaccagaagaattcatattattattggcactctcattgacactgctgctctctccttccgtatcactaccgttagtcttggtcccgcttgctctgctgctctccatatcatccctattctcattaccgttcttgctatcatcagcttcagaggagttcaacacatcaatgttttcaagattcatatatgctgagaagagatcatccatagcttctctctctccgacaccttccctttcgcagctcgattccttcttcacaaaaggattagactttgaccaatcagcacactccccaccagaaaaagacctctccaatggtctcggagggatcaaaggcatcgaattaaacccactggggatatcactgttggagcgtctatgagactttctcggaggtaaactctcaccgactctcaaggagctagaagaggtcgaattacacctcgtgaacggcgatggaggcaacgaatggttgctgttaaacacgccggaatctctatcctccattgaaacatcgtgatctcgaaacggagaagggcttaacggaggtaaggagtcaaaagagaagaaagagttgggctgtgacattgaccgtgaatgattagctcctcccgggttaaaattatgcgaaccgggttgtcgggtggtcgggatctgagaaaacggagaagtcggtgggattaagttggggtgcgacggaggaacaccgattcgtttgccactgtcactgaaaggcttggagaattgaggagctgatgagcggatgaaattagggtttaaatcgagctgagaaatgggatttttgggaatggaagaagaagtagtgccgaaagatgaatgaagtctctggatcatatcactgttacacttctctgtatcacccattttagatcggataatgcagtttctaattctcaccactctccaataactagagaaaacccctaaaagatcaagctt

SEQ ID NO: 686 - DNA, 100469 bp, Arabidopsis thaliana
gaattcaagaacgagttcttgttggtggctaagcttcagcatcgcaatctcgtgaagctcttaggttactcaatagaaggaactgaaaggcttcttgtctatgagttcctcccacacactagtctcgacaagttcatcttcggtacaactttcttcacattacaacgtcttcttggaaaccattcaactgttttttgtgtgtatgatgttctcaagtgtttgtatagatccgatccaaggtaatgaattggagtgggaaatacgatacaaaatcattggaggtgtagctcgaggacttctttatcttcatcaagattctcgtctgcggattatacaccgtgatcttaaagctagtaacatattattagacgaggaaatgaccccaaaaatcgcagatttcggaatggctaggcttttcgatatcgaccacacgactcaacgctacacgaataggatcgttgggactttgtaagtagcaaaaactaacattcatcttttactcatcaacctcgattgtgatcagtcatttggtttacacagtggatacatggctccagagtatgtaatgcacggacagttctcgttcaagacagatgtttacagtttcggagttttagttcttgagatcatcagtggtaagaaaaacagtggtttcagcagtgaggacagcatgggagatctcatcagcttcgtaagtatattacatgcaaaagcattgagatttgatcaataactgttaattcacttcactgagttctgatgttttggtaaaggcttggagaaattggaaggaaggcgttgctttgaatcttgtggacaagattttgatgacaatgtcgagttattcatcgaatatgatcatgagatgcataaacattggtcttctttgtgtccaagagaaagttgcagagagaccaagcatggcttctgttgttctgatgttagatggacatactattgctctttcagaaccatcaaaacctgcatttttctcacacagcaatgcggtatcagatagttcttcttctttaggacataatgcaaaaacttcaaactataattccaacactgagttgtatcctcggtgagtttgtttggacactgaaattaagattttcaagatgatgactaaatgatggttttgattagatttgagtccaactcactgtaagtgaggaaaaagagtgttacaagtctctgtttcactttcaaggagagatgctgtttctaagtcatctcatctcttgaagaaaactaattgggaaaacaaaatgtacaaaaatcaatgacaaaagtaaggttatcgagtgagtcatgatcagttgaagcgagaagcaagatcaataaaaatttcttcactgcaagggattgtgaggccacccattggatgatcaaatccaaactcttcctctgcctttcttaatagatcttgaaatgaaggctggtccaagtacgaaaccggaactacaaatctcttcatattttgttctcctacgtaaaccgctaagtagcctttgggaacatcaagagagctagaagaagaagatgatgacaacagtttggcttgtcggagaatctgcttcgatgattgcagcacacgagggattctgatcgccatggattgtctttaattgtaagttagatgctttattggaaaatgtgagaaacttgcagagcagaaaggagtcagtgatgagtatatatagataagaacattacttgtagataaccctttattggtttcaaaagtttcagctcataaatttttacaccaacaagcaagcacatggctttgccggaccacggcatgataagtaagggccctatagtgatcaatcttcatgatttctgatgtgaagacagaaatcaatatgaccacttgtttgttagatagacactataactagtcaaattttcctttcttgccacagaatttttttgaaggcttttgtgactttgtcagtatataatcaaatcatgtggtcctgtcttttgaatatcattgagaagaaggtatgacttaatcagtgatagagacttgtggttcattaggtacacaacttcatgtccctacataatctatagagagatttggcatgtgatgtctttgagacaaataagccccaatgaagttatcatgtaggacatcattagacactaacttctcagacaccatttattgatttgttcttggtttagtatctacaacccaaagccatgtgctctgtaattaaaaagaaaaacctcaaaaatacttaatcatttctttcatacgttcgtttatataacaagtaactaaacccctttagattcacaaactaaagaagatccaattttaaaatctcaaagctttctccaagactaagaaacatttaagcttcaggaaaacataagggaaaatatggcttttttgaggagtttcttgggtgctaagcaaattattcgaagggaatcatcgtcgacaccaagaggattcatggcggtctatgtaggagagaatgatcagaagaagaagagatatgtggtgccggtttcatacttaaaccagcctttgtttcaacaactgttgagtaaatctgaggaagagtttggttatgatcatccaatgggcggcttaacaataccatgtcatgaatctttgttcttcacagtcacatctcagatacaatgaagtactatactacaacatttccatattttttttagattgttagctaatttcccctggagataattgtaaattgtttcaatgagaggaatatacaatacatagatcgtaattgatcaatgcgtatttgcatgttaatacatttgtgtcttgtaccaaaaaaaggaattatacatttgtgtcatttaactctggacaccatacatttcgtcattacagtgaaacggcagaatttgaacactcattattctggttggtagttatttccatatttctcaaagaacatttatgtgactattatcattccttgcgacaactgtaataatgagaaaacttggtattttttttggctcttcatataagttgtttaaaaaatgtattttcaaacaataattaatagtggcccaaacataatttaaaataggtttcgaagcccaaagcccataaattaaacgcctaacattcacgcgctctttgactatggttgcttaggaacagatgcgcgtggggaagttggcaccgttttttctcttgcttacatctatttttttttcttaaacgtctatttatttgctttacgtcattgtaacgtttgtttgttttctctgtatcgttagttgttgtacacttgtactatggacgttgaaacctgccggttagtccggttcagctagcattttttaaatgtacatctattttcttattgaattatgtgtataatgttattattctctgactatagagttaaaatatgtttttgttttttggatgacaaggttcagtttatttaaaaaacaaaataaatctaacatatattttttcttatacattcattgcattttatacatttttccatgtcaaacaattaacttccaatataacgtattgtcctccccgaaatatgaaaaagattcaaagtttacaagtgaaggagggggcccctataagaaccaattaagcctcattaaaaatttcatcacatgccaaattaagtatatgaataagacttgaaaaccgtacctcaatccccatttagcagttgaattaatcggaaagcttattagtccaatcttttttgctgccgtctcgatcgttttctctaggtgccactctgttttctctctttcttttttttttgccttgacgttgccctcttgaaattcaactgttgatcatcgtacaagaaaaaattagccaatctgatctaataatttcttgggtccaattttcctgcatcccatgtgatgaaaagaccttacatttccacttcagatcttgccacctatttttttcttgacttagaaacagagctcatggattcttttttcacgtgaatatatagagaaattagattcaatcacttcctaaacgaaacatatatggaactttctcatgttttttttatagatttgatttgacacaatcttcaagaaaatatgcactacaactattttttgaacagagtttgtctatttttctgaagcttgacttcaaatagtttacagaataaatttcaagctccaaatatttttgtgtggatatgaggaatcagcaataaagagtgtgttagaagttagaacaaagctacaatgattattataagaaaaaagaagaagaagagacagagttgtacaaagaggagaggacaagggtttatcgattcggtattctcgccgtgaaagtagaaaattagggattcaagaatttcctaaagtaagcagacaagtttcaagactagtaaaatctgcattaaagaagtcgcatttcctactgtaaaaacggaaagttgtacaaaagaggacagttttgagggaagaaggaggcaagagtaacatggggctttcatgtgcttggtcgagacgagagacatgtcattatcagtccgtaagctgaaattgtcccttcaaaagattcgtaatttctctctaatcctcttctcgttttcactgaaaacttcccaacaattctcgttcgcagaacatgctagcctctctccgtgacaacgacagcaaactctctctttctctctctctccctctgtcggtttttgtggtcgattagagaaaaaaccatgattcttattcacttgttgcttgatgtgatagatttcgcaagtaaatcacaagattcaacttgagttcaaagatttaactttgtagaattgcagagcttagagttacgtgtgcaagaagtaaccggcgttaattatattgttttagggtttaaacatgtaatctacgtattgtttattgtcagtatccgttttatgaagcttaggaagaggaacatcacaaatcaacaaagatgggaagctcgagatcgtgagacttaacatgttctttgtccctaaccttctacgaccagaaacaaagatctaataaatgcccattgtcaataagcatattataactatatagaacatggtcaaaagtattgtaaacatatacggtcacttgcagacaagagttaaggcgaatcttactcagttttttggatttttttgtatgcatttgttacaatctgccttctcaaatagatattttgtaaccagttgtttgtaattaaacagttttgtttgttggtcaagacaattagattgatttttttgtatgcatcacatgacagttgtgaattatgacaatttgtctagcctttaggtcctaaaaaatccgcctacctaaacatatctattaaaacctttctatggtagttgaaaatcgcgtgattagtctattttaggctcaagagatctagctacataaaaaaaaaatcgcgtgattagtctaatagactaatactaatagatcttgattctagtccggtgatatcgttttttccactttcgagtatacatggtggctgctagtcttgtgactagtcaaaatctaaatacttaaactaaattatataaacgatcttgtttgaagaatgaataaaaaaagttatcgtaagctagaggtaattaatttaatgcatgctttcaattataatacttacttaaccacatagagtaaggggtacatttaatttgtacttgtagtacatatttagctacctcttcgtacgtaactatgaaatttagttaccgcattgattttttcccccaatttatgataataactattgaaagagaggaagagggaccatggtgtcttggggaggaccaacaatgaaattaaatcccaatgggtttggatcccacactgtcacatgcctctctatatcccttctcctgcttttttcctgctccttaaaaaataaaactacatatatccaaaattataagtagtgtatattgtttatcatcgcaatataactactagctccttcataatgtgcatgtgaaatattggagaatattcactatataatacgtaaaacatctaaatgaccttcattctacttctacaaataaatagctctaattgaattccattttactaattatctgaaataaaagtataaacaaaaccaaatttttaggacgtgttatgatcataataattaattccctcaaacaattagtgggtttgctgaattatcatttgaaatgtatcattattttagaagagtcttacaagacggcactaaccaaaattttagataattattgataaatcatttgatcattatataaaatattaaataaatttcggataatcaagagatttaaaataatactgttgctttagcatcctatcctcatcttcctccataaataacccctttcgccacctctctctcatcaaaaacttctcatttctccttgaatttttctcctcactagctctctcactctcaccaaagaaaaacaaaacactagaactaaacaaatggcggtaaagagatcttctaagctaacacaaacagcaatgctaaagcaaatcctcaagagatgctcgagcttaggcaagaaacaatgctacgacgaggaaggtctccctcttgacgtaccaaagggacattttccggtttacgtaggcgaaaagcgtacaaggtacatcgtaccaatctccttcttgactcatcctgaattcctgatccttcttcaacaagcagaggaagagttcggctttcgtcatgacatgggaggactcaccatcccttgtgaagaagttgtttttctctctctaacatccatgatcagatgagaaaataatagagagagtgtttaagtatgatgaggactaagattcttttgcttcttctttttttacctttggatagtgatttattatccaaatggttctttttttacggactaaaacctgtaagatccacccaaaagatcattctctacatggatcatgtaaatctcgggttttagttcgtcagttaacgccttaatgggtttgtattcgatggaatggttttttttttttctatgagcgctgataagtggtggcttgcactatagtagatgattagtgcaagtttaatattggccaaatttttttatagttcgaatctatgatcgttgaagttctttgaaactaagaaatgtttgaactttgtatgaatctttgttgggtttttcctcacggatgtatatataagtacgtttgacatgtatgcgagtgagctagtgatgtataaatgaaaattttcatccgaaattcataccatcagaacgggttataaatgactacatattatccacgataaacagacagacaaaccgatcagcttagatgactcaatattgaaaattgatgcctcggatataagaaacaaaaacaataaaattacattagttagtagagtagtagaggcacaaacctcaattatgtaaaaacaccaaaaagttaatattggtttatatataattatatgttttttaatccgcctttgagtattatagtacgcagacagaattatgtggattacttctttaggtgaagcaaagcatatttgtctctagtaattataagttggtcctatacatactatttatatggattggaattaacataatgaattaagtttatatatatatatatatatatattataaattaaatgtagttactcttctctctttttcttttcctacgagccacaaatcctatatgacagcaactactctttcttaatgcacatacctttttttgtttttggcctacatacttttaatttactctctctcttctcaagaatatctttttggttcataccaatttatttttatgtttcaaataaactgcatccacaagtaccaataatatctaccttgcctcatcactcattgatacatacacatatgtattgcttaagtcaaatacacaaataatcgaacttgttgaatgttaatatgtatacacacacaacaaaccaattagttaaaggactattaattctcagtcaatctacgtacatcttaaggtttatcacaaatcaatcgttatatataaagtcagtttctagcgtagacaatatctataatccgattaaaaaagagagaggccatttgacgtagtgagaagcacatccaaactatgaatgaagggacgaggagaagaaaaagccaaagaggtttggatctcaattggatgagtacattacaaaaagaagaatctttaacatattgtccctttccgtacgatttaactatatccaggaaaattcttggaaggtgcattagtcatttgtcattaagtgctatacggatacaatttctctaaatctaaaagaaatactagaagaaaagataccttactaacataattctttttttgcaaatgcaacttttatttgattcgaacaacaaaaccttgtactcttttttagtctcatcaaatggtatacatatacattcatacttcaactacatatatagtctaagtaattcctctggattgttctctaaatagtttatgaggaaagtgtttgatccgaaaacgaaatataaagtatagacgatgattgatgacataaacaatctagatcatgcaaaacttttcaagtaaaccagatagagttcaactaaactgaagaacaaaagacctgttccaaggagaatgagatggagaactgaatgatttgaagagccggaaactgacctcatagaaacatgagattctcaacctgagtagaggaaactgagtctgcattacatggtagatagttctctgtccatccttcttttacaaattttctcactttattttccttcagatcacaataaatagcactagatagtgatgaatgcgcataagatggtgtgaaaataatctcacatgtgtcagcgtcagttgtacggaacttttgaagcttaagaatacgcgagtttgttgatgaggcagctagattaggcaatgcaaaagtcttcttcgaccattccccattagaagcatcttccagaatccacaaaccaataataccactcgttttcttttcatagaagatgacagccagttttccctcatattttgccaactttgaaaaactacgaaagttgcaaggtactttgataagatcaaatttttcagacctaacatcaaaactcatgattgcagactcatttagttttgtgccaataaaagctcgataatacaaaacaccgttgatgcaaagttcttcacttacaggagagtgaggaggaataatatcatgaatcatcctccatgatgaatcccgagttcccaatgtcaaaacctgtatctcctcagctaaaccgcgtctattcctaagcataggcatgcctctcgtaatgcacaccactttataattaccgtcaaggggatcatagcctatgtattggtttatggctctcctccctgctttgatcttgggcaaggtaattgatcgtctagtgcaggggttatatatgacgaggctagaaggtggtccatagcatatcaaaccgtggacggaaggagaaatggtcatgcgttgttgagtgtagcaagtcacatggtaagtgattgaagaagcagaagatgatgatgatgatgatgatatctcgcgtgtacttttaaggtgaacggatgagaagattgaacccaaagattgtgctctgaatacaaatacaagacttttgggtcttttcaaggactcattgaggaacaatttcatgaaatacggatcacggattatagaagcccatagcttagatacacaaaggaatctgattagaggtttgagagacaattttttaagaatctccataatcagatcaactggaagcaactctgagtttacacttacctttgtaaacttctttctctgtgtttccatggtggagggcgtgaaagatgacgatcgatctccctctggcagccacctttgcgtttgccgtctagcacaaaacttttgtttaggtgaaaaccctaaagtcttcatcaatgcaattgcaattaatatcgtttcatcattccatattagtaaataatttttataggtaattaattgttgacaaaaatatataaataattaagagttgttgacaaaactttatccaaatttagcttaatattatcgttcccacaaaaaaaaaagaagactttatctaatgtttcctttatattcaccctaagcctcccaaaacctgtcgactttaattaaactaattaagctattgcttggagttcgttaatggccttctctgtagaagaaatctcgtctattctccctaacagtttatccgcaaaccctaggaatgtttctcaaaatactatttccccttcctttttcaagccctcccttaaaccgtacgcttccaaaaccctaatctcattgtcatgtagacgctcactttcccctgttttctcggcgggaacatatgtcactaacgttgacgaagatgacaagcttcacgaagaatgcggagttgtcggaatccatggagaccctgaagcttcccgtctctcttacttggctctacacgcactgcaacaccgtggccaagaaggagcaggaattgtagccgctaatcaaaacggtctcgaatcaatcacaggggtcggattagtctcagatgtgttcaccgagtcaaaactaaacaatcttcctggcgacatagcgatagggcatgtccggtactcaacttccggagcctctatgctcaagaatgttcagcctttcatcgctagctgcaagctaggatcactcgcagtagctcacaatggtaatttcgtgaattacaagcaactgaagacaaagctcgaggagatgggttcaatcttcatcacaagttctgataccgagctcgttcttcacctgatcgccaaatctaaggctaagacgtttcttttgagggtcattgatgcttgtgagaagcttagaggtgcttactcgatggttttcgtctttgaagacaagcttattgctgttcgtgacccttttgggtttagaccacttgtgatgggcagaagaagcaacggagcagttgtttttgcctccgagacttgtgctctggacctgattgatgcgacttatgaacgtgaagtgtgtcccggtgagattgtggtcgtggatagaaaccatggagacagttcaatgttcatgatctctcaccctgaacagaaacagtgcgtttttgagcatggttacttctcacagcccaactcaattgtctttggccgttctgtgtatgaaacacgccgcatgtacggcgagatcctagccaccgtggcacctgtcgattgtgatgttgtcattgcagtgccagactcggggacagtggctgctcttggatatgcagccaaagctggagtgccgttccagattggtcttctgagatcacactatgctaaacgtacgtttatagagccgactcaggaaatccgtgattttgcagtgaaggtgaagctatctcctgttcgagcagtccttgaagggaagcgggtggtagtagtggacgactctattgtccgcggtaccacgagtttgaagatagttcggatgcttagagatgccggagcaaaggaggttcatatgagaatcgcattgccgccgatgattgcatcgtgttactatggagtggacaccccgaggagccaagagttgatctctagtaagatgagcgttgaggcgatccagaagcatattaattgtgattctttggcgtttctaccattagatagcttgaaaggagtctatggaccagtcgagtcacacaggtattgctatgcctgctttactgggaagtaccctgtgaccaaaacagagtctgaggaggccgacgcttcatgaaaatacctctactctcttctttgctttactttttaagttttgagaagcatagtttttaattagttgatgcattgcttcatattttcaaagaaatcatcgcattgtcttttatttaatcagtcaaaaaatattacagaatgacgtttcagacatgttttaaaatgagatttgatattacagaaaatgtggttgaatcagccgttttcagctctgtcatatgcgttggatttgtgcttgggggcaaatgtgaagccctccggaacctttccaagcagcatttccgatatccgcacctgcaaatagtaacattatagcaaacttaagcttatatagtccaaagtaaggtggaatgaaggagaaggatataacaaacgcacccagtcacccgcagattcagacatcatgagtgtctcgagatcatcacgaccaaagtatgaaggcggacgccagttgatttgctgcgggatcacatcaagcaaaccgacaggtatgtacctaaatgtgtagcttagccactccagcaagaaatgcctagttgtctcaactcctgttgaaaaggttaagaaaaggcagaactttagccacgagagaaagagcaaaccaaaaaaacataaattcaatttcatgctgcgtgttttttacctttcgtgtcggatccccaatgttgaagaccaaaacgtacgaagtccttcatgatgttaagtctttctccagaggtaatgtcccaatgccgttgctctttaatttcagtaaagatccaaggctgcacaagtcaaaagtccattgaggctataaaatgatttgctaggaaaatgctgatattttttggtcatacacacaccttgatcagtgctccacgagcaatcatgcagctagacaactcaggacagtcagacttgtgtttgttccagtctaaatatgagtacacatctccatttcctataacctgtaggttagtagtagcgtttttggtacactggtatatatagtcccaatctgcagacttgctataacgttgctgtcttgaccgcccatgaatagtcactgcagtggctccccagtttccgatatctgcaattaaagaatctatccggttcttaccctcaaagaatgctgttcgtacctggcaccaaaaaggaccggagaagtaaagactggttataataccaacacatttgcatccaattatgatgcagtttcatatggaaggcgatttagttacagatttgcttaggcagttaccttgatagtgataggtgtttcaacaatggaagaagagacttccacgatgttcttcatccgtaatggtttgttgagaagagctgaaccagcacttttgttgacaaccatatctatcgggcaacccatgttgatatctatgaaatcaacagtgcattctcggtctataagttcaactacgcgcgacaccgtgtcaggataagaaccgcaaatctgaacaccaaacagatcttccgatgaatgtcgtctaagcagagcccattcagaagcttggccctataacaaatcattttgcaggttttcacattatgacaaagaaaaggtttaatcattcttgcagcatagctgtgagtgtaattagtggcctaacctgcaaaagatttgtgcacatagccatctcaccacaagtcacatctgctcccaacactttacaaagtcttcggaagggaagattgcccacggttgttaagggtgcaaggtacaacttatccctaaaatcaattagctttttcttttctcgagggtgcaactttagactactatcagtttcaacaattttgatgctatcctcatcttctacgttagcttttgaagtaggatacccattctttttcgtttcctcttccaatttcacgcctgtatcaatacaattaactggaacattaggatattttcttgcctcacacccttcttacgtcaactttttctctttaatacatagctaagagatatagctacacacagtaattataagtattcaaaccatgcaactatctgagattatctagcaaaagttaattggcatttggaaatgtagaaaagtaagtctaaccatcataaactccaccaacatctccagttttagaattcttttggtcctcagattttgcctttttcatgggacgaacttcctcagtttctaatggtccaggaatatcaacatcttgtatcatttctgatgtatgctcagaactgacagctgagtcaaccgctacttcagttgcttgagtgccgttcataccattttgagttttttctgcggtaatttcctcggcagcattgctttttttggcatgtccctagaaattttatgaaaataaaaagaaaaaccagtcaggtctcatggtaagagatatgggaatgaagcagtatatgacaagccagagaactaggaaacaaacaaaaatcatgaaaacaaaaacaaaataacactctgtaagacataccaacagaccgagggacttaagtttcgcatctgcgtttgtaaaagtcatcttatttttccacagaagcctctgtgtctctttgttaaaaaagttcatctctgatttttccttgtcatctgaattaccagtaatatctctgtgactgcctaagaatctacatgataaaccatatgcacacttcattccagaggccacaaatgggcattgcccctctatatcatctgccttctgcatttacaacagaaaaaaaatattgtcagttaacttctttctcaatatcatccaaactagttccaatcaataccacaaaattatactatattcaatacacccaattcatgaaccaaataagcaacagtaaaatgcaaaaaagtgagtgagtacctgagccttgaaagcctcaatatcatgattaaaccggcacttgtctttatactgacatgaatcaacgtcttctgttctcgcaacctgcggacagagattgatcgtagattgctgcaagaagaaagagcataaattaatccctcctgttctaaactctctctcatatccaatggtttcagttgccaaaaaaactagttcttaaaacatagatagattcgaagctatacatacaagcaccgatgtgattcgaatcaatacctcgcggcgttcccgtttcagttgtcgtttagatttcttctcctgaaccaaacccgattgaggcgccctaacatcggcggcatcattttgcttcacggaacggcttggaggaggaggacaaaggaactccttcttaataggagccattgatcgttctataagctcttccgaagtcgcttcatacacagagaactgtttcgtcgattgaaccggtaacgcagcctttgcatctccttcaacactagtatccaccgcgtgctccgctattacatctgacatagcggtcaagctccgtcgtcacgaaaatgaagtgagtgatagtgtttgttagggttttagatattattcacagagagagacgaagaaggcaacaatgttttgggatgctgtttaatgggccaaaaaccggcccataatgttaaaataaacaaaccaacaaaaagagacagaatccaagactaaattaaaaactaaaaacaaaacaaacagagaatctttttgtctgaagctcaatcaatcccattacatataacttgtgttcatagttcatacctatatctactataaattgaattttttctttctaagataacaacatattgtaaaattaaatttcttggacttatatgatatatatgtaaattcaactgactctgcacataaatgaaatataatgtttgatttgatatgtaacttgttgaaaaactccaaccctttgatccaccgcaacaacttctctgctctattcatttgattcagattttgttgccatggttccattctggtggttctgctgatgagactgttgctgcatctgttgtggctgctgtcttaactggctgatgttgagttgctggaacatctcagcgttgagtgattgcatctttgatctctctgattcgttctgactgctctcaccgattgccagtttcagtcgctggacttctccattcagtgcttcgttcagagctgcaaagcgggggaaaaaaatcgtcatttcacattcgttaagcgcaaaaatggagatttttttaaagcatataggatctggttccattttttgttaaagtcatgttaataatatcgtaaatttgatacaatgtgaagagaaatgtataccatcgcgaagacgcgcttgttgctccattgcttgaagccggaacttaagctcattgttctgatttgtcaaccccatcatatcgcgctggataatgcagtaactaagatcgttagaacaaaacaaaaattgaccaatctaggcgcttttataacattgtaaacaacgcacctgcaaaagtgtgagctgagcagacaatgtggtagcctcggtctgaagagtctgcactttgtgttccaattctactatgtaccgcatcttcctctcctttgaccgtgctgcggattgacggttcgctaagattctgaaaagaggatcattccttaaacatcagaatatttgattataaaccggtaatgttagtcaagattcaatatttgtaccttttgacacgtttagggtcagacatggccatctctgctagtttatcatttgccatgatcttcttcatttccgctgcagtaaactcaccgttattgaactcgatgctaaaagcagcacccgagttcccatcaaccgaattggtaggggaaactttccttgacatagatccaggagaaggaggcggctttagagattcatcaccaaaagacaacttctccatgaaacaactgtccactgaaacactcctgtaatgtctggtggtaggagcaatatctcctccagccgctcttctcttcacgctctctctcttttcaccagaagaattcatattattattggcactctcattgacactgctgctctctccttccgtatcactaccgttagtcttggtcccgcttgctctgctgctctccatatcatccctattctcattaccgttcttgctatcatcagcttcagaggagttcaacacatcaatgttttcaagattcatatatgctgagaagagatcatccatagcttctctctctccgacaccttccctttcgcagctcgattccttcttcacaaaaggattagactttgaccaatcagcacactccccaccagaaaaagacctctccaatggtctcggagggatcaaaggcatcgaattaaacccactggggatatcactgttggagcgtctatgagactttctcggaggtaaactctcaccgactctcaaggagctagaagaggtcgaattacacctcgtgaacggcgatggaggcaacgaatggttgctgttaaacacgccggaatctctatcctccattgaaacatcgtgatctcgaaacggagaagggcttaacggaggtaaggagtcaaaagagaagaaagagttgggctgtgacattgaccgtgaatgattagctcctcccgggttaaaattatgcgaaccgggttgtcgggtggtcgggatctgagaaaacggagaagtcggtgggattaagttggggtgcgacggaggaacaccgattcgtttgccactgtcactgaaaggcttggagaattgaggagctgatgagcggatgaaattagggtttaaatcgagctgagaaatgggatttttgggaatggaagaagaagtagtgccgaaagatgaatgaagtctctggatcatatcactgttacacttctctgtatcacccattttagatcggataatgcagtttctaattctcaccactctccaataactagagaaaacccctaaaagatcaagctttgtgtagaactaacctatcatcaaaaaagaatcaatgatgagaagaaaacaagcatcaaagttttcaaaagaatttgacagaaaaatcagagctttggagagtaaaatgcaagttggtggttacctctaacttcaacgcacttgaattaatcaatggcgcaaatggcgagaacgtattttgaagaatgacaaaatctttttttttttttctctctgtctctcaacgttgaattaagaaacttatctaatcaatcttcttcttctctctctctctatagaaattggagaatcacagagccattttctctttcttttcttttttcctccgcaattttctctcccctttgattttttttttctcgagagagaatagtaaaaaaaaactcgatagagacgacgacttttttttttcttttttgacacgagcaagacagtgtaaactctaaagtagtactagtaacaaagaaaaacaaaagacacggatttcatgagaagtaagagaaaaagaagaaatataaaaacacccaacaagacgcgtgaatttaccacaacctcccaagattttctatttaatgcaattctatccaaaactttatataaatttggatttgttattttttagccatttatttcaaatgtttttttaagtaaaaatctgtgtatattgagtatcaaatacgaatttaacatatatattcctcattcatatgattacattgtatatatatacggttattttttggataaagatctaaaacttgtttagtttcacaatattactggtttgacaaaatgaattttaggaataatattctttgtcatccgaaatggaagttaaaaccatttagcgaaaatgtttctttttatttttgatgatttgaatatggatttgagattcaattctattccgaccacaattgacattcttgtctagacgaaagattctgtcctccttatgttgtcatgtacaatgtaaaaagccattctttgtattttctttaattatgcctctcttacttatatatttctttaaataatatgtaatggaccgccatattgaatgatttgttcccgacttatttgtctacaccaataatttctttgtttacgaattttagagatcgtctgtgttgatctcgtgcttcatcgtttatttatgtaaggacgatgacagataggttcgttcattttggtgattaatctatcaaccgtttcaaggcttggtgcaaaaatgttctaaacggtggtaaccagagtttacaatctttgtaaacaatttctaagatctagatttcacctatcaatataattatatacttcatttgcttttaattagatgaaccccaccacacaacaaatattgactctttataaccacctccctccatgtttctcgtaaatatctacatatcattatttgattctacgattatagtattttactaggtgtttagtcgcactacccgcggtttgttgcgtcaattctttttattttaattttttaaaagaaatcaaattacaatgcacgttttaagaaattttctatttttgtaaaaaaattcagtttcaaatatagatttgacatcaaaataatcaaagataaccaatgattttcttatttaaatgaactactagtatttttgttccttaagaaattaatagaagacatagaacagcgtgtgaaaatgataattgaaagtcgtaattaaggtgttaaatcacgtggattaagtcgtagtcatatcataaatggtcgtgttacaattaattaacaggaaccgaataacatcactatactggagtattaacgaaactataatgcacgttttaaaaatcaaaccacggtggtttaagaaataaaattgtttgattgagtaattatgtaaagtttgtatgtgcaacggatatgatctaccgatctaaacgtgggccaaacatattaatcagattaatataagtgggggcagtgttcgtcttgatcacgtttgaattaatttcacaaacaatattatgcctgcatcacaaattaagagtttagagcaaatttttattttggctttcgagaaattcatgtattttatttggtatacgtatctttataattctcggcaaatgcaaatgctacaacatccataaccatgcacatccaaagtttggaatattacattctcctataaaacgaatatactctttgcctctttgataagcaacttttgttttcttcagatttggcttacgaaaaaaaacttgaataatcaaatataatccacctaatatacttttctgtaaataagttcaaccctaatataaagaaaaaaaagttttttaacaacaaatttggccaaacgaatttctttatttacttgaagttcggaactatatatgactatataaacacacaaaatatacccatatgccataacaaaagtaaatgtaaccaaaatctcctctgaattagtaaaaaacattaataattaaaattgtaggttattttttcttaaaaaaaacagtattcgtctccttaaataagaataagtctaagtggaccccacatacttagcttatcttcaatcttaaaaccaaactaaacttggcgacaattccgccgatcataccacgtggtttcttgtacatccgttagatgacaaattttcttgcttgtgggacatgttatataattttcattattggactcaccatgacgtggcaatttccaggaattagagagaatcgaagtttgcttatcttgacatttagcaaagcttcgactttgaccaaaaaaaaaaaagtagaaaaacaaaacaaattatttcttattataacgtaacaaattataagcttatagttgcggcggataaaataatcagatctaacaagaaagaaccgttacttggaagatggaatgatccatggtaattgaatgaaacactcacctagtccgacatgatcgcacttggctatgcaatgggaatgaaactgtgcgttttagctttgccgttttgttctcaaatatcttctccatgcactttttctgatcggccgaattaaccacaatcgccaaactctcacaattgttatctttagtttctttattcccactcttctcggcagaaccgtcgacacactgttcttcttccaccatgaagctagcaacttgcattgaaccgtggcttgacgagaaaatcatgacaataccgagacctagccagatgagaataggaagaatgatcagggacaaggcgtagtagatgatccattggaatccgctatggttcttgccgtttaatgtccattcaaaagcaaaagcaattccggagaaaaatgtggcaaaactgcctataaaaaagattctaacgattctcgggttaggaacgtcgaaaaatgtcttgatgtggttaagccaacgctttggtggttgcggtggtggactagtgttggtggtctttagcttttggtccatgcttttttttcttttctttaagtggaactttgagagtaagcttgagatgaagagactacataagtcgttgaagcttgactctaatataaggagattattaaatttttttcctttttatttgttgaagttgttcaaattcttgcgatttaatgggtgagatttcgaattttgaaattacaataatacaaagtagatgataatgtaactatttacataaaacaacaaaaccaagtcaaaacagtactactagatatttgccttttaacggaactatcgacagtaaaaacaataacgagcctaacttcatctttcattcgacttttgatcctaattgttaaatctaaagcgacaaaaaaaaaatcaaaagggatgacgagagagcaatacttgatatatagtggctactggctcataaatcttggttacttgatagtgatgtagcggttggtgccgtgcctagcccaatagttcttgagatcaaccggagaggaaagctcatgcccttcaccagctaaacgactaagtaacctggagaagacacttccactcattttcctgccgccaactcgggaatgccgcttgtttggcatctgcgggagcggatactcagacaaagtggttgtgcagcaagatgattgccagccgccattgccccacttataacactgacgagcagtcccggtgcaagtgcacatgggcactggcattgtcatctcatcgaacgtgactaggacatcgttactgtcccaatcctttctgcttttctttccgggagaagcaactggacggttcagatcctcgcccattttctttccctgcttgctctctttcttccttttggtcggtctcgtgttggctgcttcaggtggaatagttgatataggggaaggattaggtaagtggctttcttcagttataaacctttgggaaccaccgcgcttggcacacgacaaaatgtagttaagattgttttcacggtatcgaagagcatttaacgcactttctgtctccatgatagcattatctctttcagagagagctttgtcccgctgctcaagtgcttcatcacgagaggctaatgcttccttagttgctgcaaccgcttcgtttctttccttgacagctgcgtccctctcagcaaggatggagatgatcttcttattcatcaccaatgcattatgttgctcctttttcggcatcacattctactgcacacacacacagtttgtacttaggtttcattcaaagtaacgaaaacatgtttttttgttttagtgatctgcttcttcaagtgtttttgcttaccacagattgtgttcctttgtagtaatcgggcttgtagcgcccattttcatactgcccaccactctccatcctcttactttcaactgcaatggagaaattgatatcaaacattgtgaaactaggctgacgagtaactaaaaacagaaatactccaaatcataagcagttccataacatacatttaacccaaataaatcgagaaatcgtatcatatcccacaagtcagcgtaataccatccaaaccaaacgatgaagaaaacaatggagcaagtaagatacgcgggaacatatatagagttcgaatttcaagttaaagcaacgacgagagagctcccagaagaaccaaaattcgaagaaaatgaaaattgtagagagaaaaacttggcatgctgaaattaacagataggtcaagaacacgattaacgatcgaagacttacggatttcaacgagccttcaggagaaacaagcaacggaaatcgagaaagatctgaggatacttggaaatggtgtctgtgtaatgtggcaagaagtggaagacgagccaggtactctcggttcaatttactaatatacccttgtcttaaaactgctaaacgagagcaagcaagaaggttattattgtctatccatcttactcgtaaaaatgcaaagacgtttctgtttcaatctctccaaatataagccaaacaggatatgattttggttctggtggatcattctagtgggccgtatgatgggcctaagaataaggcaactaatctgggtcgaatacgggtagacccgggttgagatcccgacgtgtgcgcttcgctgttgtagtagtagtatatctcatcatcaatcaggcttttgagcctcggaaactcaatccttgtatattcaacggagagagatctgcgagagaaagagagatcagattccggtgttccaaggaagcacatattttaagatccagaatcgcctgagagatgtctaccttcagtggcgatgagaccgctcctttcttcggcttccttggcgctgccgctgcgctcgtcttctcatgtatatccatctatactctcttataatctccatcttcttcttttctctttggttctgaattgttcactgatcttgtgtgtgtttgttgttctcatgatctccctcaaagttgcttttgtgctttagatcggccctgagaagttcaccgatctgtgtgttgctcatgatttttcttagaaatttctctctagatttgtttaggctaagcgatatcactgaactattatatgtctctccttttcgaaaattctagtttattatctttagtcagtggatcaaattcttatggaactgctctacgctggttttaaatcctttttctttgtcttttctccattggtgatgtagtctaggctgatcttctagaaactaagactttttggcttagatctgtatgtgttgaatttcttggtgtccccgacaaaaaaaaaagaatttcttggtgtcctgttctttgtccaacatatcgaaattacctagggaaatttgctggagttgccaggttttgtgattgctgtgactggtactaattgcataagtacagatttaccgttgttaccatcaaaattgctgagttgctttcatctatgtcaattatgctttttcttcatatcgaaggcatgttgattacttgtgtaaaccatagttagattgtgaccttaaagagtgtgtatctttgtgttattaacaaggtatgggagctgcgtacgggacagcaaagagtggtgtgggagtggcatctatgggtgtgatgaggccggagttggtgatgaagtctattgtcccagttgttatggctggtgtgttgggtatctatggtttgattattgctgttatcatcagtaccgggattaaccccaaggctaaatcctactacctcttcgacggatatgctcatctctcttctggtcttgcttgtgggctagctggtctttcagctggaatggccataggtatcgttggcgatgctggtgtcaggtacgatcctctgtgtccttctttgcagattcactcttatagcctaatttgctaaaagactcaattttatacaagtatatctcccttatgaatcagaatatcatgagtttagtgtcacaattcaacttgatgaaaatttggtagggaatatgtgcaattcactgactgttgaatctataatggaagaaatatcagttcattacatgcttctgtgagatgtcttgtgccatggcgtatttctctaggatgaaatataatggaagaaatatcaattcaattgtgagtgtctatcccctgttatatcattttgatacgcaaatttgtggtttgatgacagggccaatgctcaacagccaaagcttttcgttggtatgattcttatcctcattttcgctgaagctcttgctctatacggtctcatcgtcgggatcattttgtcctcccgagctggtcagtccagagccgaatgagaaaagagtgcggttcttgaagtccgcatgattctttcttccccttttcaccggtctcttcatagagccgggatcttcttatattgtttgtcaggttagtagagagacacagtggttttgttccttgtggcatgtcttctcgaaacaaaaaccacacatcatcatcaaaagcgttgttccgttttcacccttctgttatgtttgtaatgagaccgttgcggattcttctgttcccagtaagataactgtgggagacaccctatttatatcgtttatcattttcctaataaaattccagaaaaactcgatttgatcttgtttatgaaacttttttgaatatttttctgttttgtttttgggttttatcgtgtatatatatatatatatatatttgtcgaccagtttaatttcgttaaaatgaacagagcccattgggctgtacagatgatgaaagaagcccaaactcctatcgtatatatatattttgaacatgtggatgtgtctgttaactatcatttttaacatgcgtctggttaactacaaagtttctcattccttatcgcacacatttgtcgttaataattcaaagcccaaagccgaattagaacttaagcccaagcccatattaatgtaagacgccgtatacggtatataaagaaggagatagacgtgaagacgatacgacttaccttgcgggaatcacgcgaccaattgattcttcttctcacaagcaggtactctctctctctatctctgttttctccgattgtcaattctcgcgagaaggaagcttccaattctaggtttccgttttggttcgcgctttaagcccaattatggtcggatttgtacgtttgggtgtcaccatggtagattcgtttcgttagaattgtggagtactcgtttaggaatcgaaaggttgggttttgtgcgtttcgacgcgagttgtagatgatcttgcctatacgtctgcttacttgtgctaaatgactattaatttggtcttcctttttgacagttggcgttaactcttgtttatctaccagttgaaagatggtaacttttctcttaaatcagtaatttcaatctatctagtaactgttcttccatctcatgtgttagtgtccctgcaattgcagttttacgatggatacgcttatcatggaactacctttgagcagacttaccggtgttatccctcatcctttattgataaggtttgatttcaaagttccttacttattattttatatgcttatatatgtaaaattggagaacttgtgcaatgtttacaaccccaattctaacatctcttttcttttttcttttttcttttcatagcctcaaattgaaagtggtgacaagagtaagtctttaatcttacaaataatgtgtctttccaagtttatgttactctttataatgctcaagttttgtaatttgatttctttgatatctattttcagttataatgccaccatcagcccttgatcgtctaggtacattttcttcctttgcttaatgattccagcttctttttcggatttcatttgattatccagagccacttacatccatcactgtttacagcttctttgcagattgattatccaatgctctttgaacttcgtaatgcttcaacagatagtttttctcactgcggagtccttgagttcatcgcagaagaaggcgtgatttacattccctactgggtaacaaacagtagcttgtttttatcaccaatacaagatactcgatatcttgtgacttaaaatcgattgtttgcttttgcagatgatgcagaatttgctgttgcaagaaggagacatggtgagagttagaaatgtcactcttccaaagggaacctacgtgaaactgcaaccccacacaacagactttctcgatatagctaacccgaaagccatgtaattccgacttactcctccccctcttgtatttttgtctccatctagactttgaattctttgcgaataccgtactctgtgtatattgaaccggttcctgtgtttctgctgcagcttggagaccgcattgaggaactattcatgtctaacggtcggagatagcattatggtcccatacaacaataagaaatacttcatagacatagtggaggcaaagccttctaatggtattagcatcattgaaactgattgcgaggttgatttcgcacctccccttgattacaaggaacccgaacgacctgtagcacctgctccagccaaaggtgaagcaaaaggtgatttgtatgaattggacatgaaattagctccaagctgttagattctaatgtggtcttctttttttgatacagctaaggaggttgatgtggctgaagcagaaccaaagtttaaccctttcacgggttcgggaagacgtttggatggacgacctttatcctatgaaccgcaacctggtgctgctaacagtaacggccaatcacatcctgttgcaagtagtagtagtagtgggtcagagaaggctacgcaacaaaatcgagggaaacttgtgttcggttcaaatgtagagcggtctactaaagagacaacaaaggtaaataacttgtttaaaagtagtatgtgcaaaaaatggtatcagagataagagatggagtagaaatataatgttgatctatctgtaacttaggttggagctgggaaagatagaaagcaagaggaagaggctgagaaggaagccaagttccaagcttttagtggtaaaaaatattcattgaggggttgaaccaaccaatgtgtggaaccaatctctcgtcttatttatgattttactcttgtgcttatgtattatctatggaattaaacgtttaaaggaagaaaaaaaacacaaataaattcaagaaaaaaagaagaagatgatgtatgtgattcatcatcattaattttagagtgggatttatttagccatttatgttttttttttttttttttttttgtcggccaaatttcatattggatattaaaacccaataaagggtgttacagatgctgatgaaaggcccaatccctcaccatttacaactttgattaaaatttaaagcacagcttaacccacccaattctaaagataaggctaagacaaaaaaagtgccacgttgccaacacgtgtccaacgtgagatgaagagatgttgaaactgacgttgccggctgatccacgatccacctctgctccgtcggtcgggcttaatcaaatcaacaccaagagcttcttccacataattcgccggattccatcagctgaagattccatgccaccaccttgaaataaattcagagatctctcaatctagtcttcaaaggaaagcttcacctaatacctatcttgtaggtcccttcaatggacggtgaagatattactcccttataaaggaaaagatgagtttggtgaaagcagaattcttctgaagaagaaagcaaaccgaattgatcttgtaaacatgtggaaaaagaaaaactaaaacacaaacaaaaaatccgatctaatcggaaagataaaccggacaacgccggaagctttatccgttaaaacgaaaatttatttgtagatctgatttagattagaaactataaacaaagtagaaagtttctctctctcaaagatacatgatagagaagagagagaaactaatatttagccatttatgtttaagaatgcatgttgtttgttgtctgtgccaaattttgaaaacggtgcgatgtttacttaatgaagagaagccggtaccgaaccgaaccgaaccgagccgtcgtctttgattggttaaaagaaattcttgaaaatttacaaccgcctctcttttctgaaacggaagaaggatctcaggagtttctgatttctcttttaataaataccaaaagtcaaaatcggatcttcgtgtatataattgttcatttccttgaaaacggttacagaattagggttttgtttcttctctctcgccgattgatcttgaaatgtcttccccaattataattagggcaccgaagaagcaaccgccggagccgccatgtctgatttcgttactccccgaagaaatcgtcgtcgatatcgtagcccgtgtccctagatgctattaccctactctctcccaagtttcaaggcgtttccgatcactcgtcgcttctccggagatttacaagagacgatccttcttcggatgcacagaacaatgtctctacatcgcaatctccaaagatcaaacctctgatatccattggtttactctgtgccggaaacctaacggacaacaattctccggcaccaccgcctctgatcatcgcctggtacatatccccactctccctcctatgcctatgcatggaagctatgttggcattggttcgaacatctttgtgatgggtggattttgcaattggaagatcacatcgagtgtttcgctcatcgattgtcgaactcacactgctcagactctccctaacatgcccaaggccgttgcttttcccgtcacagagctcattgatcggaagatttatgtaatcggaggatcagatacgctctcgccgatgaaatctccgtcaagaattatgatggtgtatgatacagataccgaaatgtggcaacttcgggcgaggccagattgggaggcagggaaaaaatggtttagcagtgtggttataggaggtaagatttacatgaggacttatcacaatagctttgtttgcgatccgaatgatacaagttgcgatagagatgaggttttgcattctaaggagtggtggagtgcgtgtgtgatagatgatgtcttgtattactatgatgttcgtgagaattgtttgagagcttatgatccaaagcagagagcttggggagtcgttaaaggttttgaaggattgttgcctgtggcttgtaagtggtccaaaactgtgagttacaccggtgggaaattggttctgttcttgcagaaaacagagaaaacagagatttggtgtgcggaaatcgcagtggaaagacgcgagggtggagagatttggggtaaagtggagtggtgtaatgttgtgcttagtgggaattttcacataatggattgtgtagctgttgtgctctgatcttgtgttgtaatagacttgtgtcccctgcttgttcttgtgtgttttactagcttatgaatgttcttccctggaatcttctttttattagcgtatgtttgtatggtatactgttgttgtgtttggtgggggaaatcttacttacatttgttaatagagtccctctcctgctgctgcttctgtcttctcttgtgattcaaaacttagagatagataagagtctcaaattgacagaatcgtatccagcatagcaggttggagtaaacaactacacttcatgtataatctaggaagaataacaaatgcatatatttttgtactgtaaggaatattttggtgattgctcaaagatttatatttctttactgtgagaccaactatcgttgttttcttcaataacacatgtacacataatgagttttcctcttttttttgggtcaaaatattatgagttttcataacattaataacaatttttacgggtaaaaagaaaagaatttgatggaaaagaaaaattcaattacaacattgtctgttttgaaaaatcaaaagacagaggaaatgaaatgacaccaagaagatatacaagacatggcttctgctacaagaaacccaaaagtaaaatgtcattggaccaaacagaagttagaaaagtgcaggcatgctttttctccaactatgcgatctccgagttgtcaagaacgaaggaggtgtgaaggtcagaccaaacatctccttcatggctctgccttgctcagcgaacctcacaagcttcgctacaacatctgcgctttccataacctgagtcatgtccttgggattgctccagagctcattcacaagttgtaaccgcctgcgtttggagttaatcgcaatcccaaacttgtggtagattcttttcctctcttctcctgaaaaccttttccccacaagcttgctcagcatctttctctccctgtgaagctctttccggcttcaccacaaaaaaaaaaatagtaggcattaaaaaaaactgcaaccactaatgccaaacgctatatacacacgccaaaaagatctaaccttgaggccaatgttaaggtttctcctccttccaatgcttggtttccctgagagaagctatctttcataaacaaaagtcttcttagctctactccgatgtagattgaatccgcctcatctcctttgaagagcaagtaaaagtatgttctatgcaccaaagagatgttacaagtttgccatagctccagaatctcttgccgctgtctctcaaattctctgtccatggagtccagaccaatgtccctcctcattttaccagaatcctcagcatttgagacctgatcaaacaaaccttgaaaatcaattgtaagctacatagaagaatcgattagtatatatgtttatgaacttacctcgccttgacgcttagccatctctttaagcccttcaacgaaagtccggatactagtaataccaccctcttctcccaacggcgttctgatgctctgagtccctgtggaatcgctcccgcaagaagacatagaatcattcctcgatacagtagaaccgaactctaaatcaggaaacgcaatcttgtgactctctggtcttccgaggaaacctgtccctatgttttcaggcggagtgctcgggcctgacacagtctctctgcggttccaacttctcaccctgacgttctggcttacactcgtttcaccattagcatcctcaccacagcctaaaacgttttcaggttctgctctcttgtctttcttgttattatagactgtgactgattcctcagtctcaatgcattgaacttctctgcaatattcttctgatagatcttccgaacgcctaggcaagtcttcatccagatcatcatcgtcagagtgagaatgaacataagctcttgatattgacagcggtgtagacattccatctgatataaaactccttctgtctgaatcgaccacgcctgatgtctccgatactgaaccatcctcccacttgtctgtgtggttgccgaaatgtggagttccaggcttccattgaggaaaaacagaagcaaaccttttagtaaaattgccatagaaatctaaggcagaaccgtgataattgggaaaacgtgatgaacaattcaattatctgctgcacaaagtgagattgtgggaagaaccagcaatacctttgacgccacattgtgttcaatcattctcatgaaatcttcaagccgggattgagcaagatccctctgttttctcaactctgcgatctccttttccatctgtataacattaactcttcatcagcattaacccgccacacagttacaaaaccagccaatgtcatatggaagcaatttgggcgtgttcacaaagcacaaaccttttgtatctgaagatctttcttcctcaccgtcattgcacaatcacagtttgaggcaggtgaggaggcagggtttctcagctcagtctcgagcctcgcaagctcacgctgtagttgctttagcagagccttgtctgacataacaacattgatccgcgcctttgtggtgacttcctttgcacaacacgcaaacaagagagtgttcttcgttagctctacatgactccttgctgggctcagagtgcagatgatagctgttcttgcattaccccccaagcatggctgtagaattcgtgtgagcttcgagtctctaaagttgatgtgcccttgtcttcccttactaggtcaagtgtagaaaggcgtggttctattattaaagttgaactactaagcatgccaaagacagcaatctttaaaggatgtattgtttacacacctaagtttacggatcactgttccaagagtcagcaaacttctattgatatggcagccttccttgagtcttgtaccagctgacatagcttgtgaagcacgctcgcttcctgctagatcgatgaaattctgcacataaagggtgatcaacatgaagacatattgtttttgttttttttttttaaaaaaaaaaaaaaactctcaagatataacataaagaagggttgttttagctttgcagatgagagcataccacactcgccatgagggtggtggagttttctttgcctaagaactcacgagcagagctttcaactgtctaataagtaacgagacaatcaagggccaagctaagtgagagagaatttgtatcataaataaactgatagataagaatctaaccagtctgatcatttgatgagatctggaacttctctcattcaatgaggtttcacctatcttacgctgtgctgcgaaaatgtagaagcatgtaagtttacttttcagaaaacatgttctggagaaaatacagagtttcagatcatgtacacaacaacactactttcattggctacttcatagtaatggaaagtgattttgacttttgagttttaccttcacaaatagatagaagttccttcagatggttccagtctcgcagagtttcctctgtggctttttcaacaactgtccctttctaataagaaaaaacgatagaactaaggagagtcagacaattttacaaactaaaaaacactcagtaaggaaaatgatattcatttacctcaggatcgtctcgtagcctcagtgatgtaccatccgagctaagcagatctcgtatggcctcattgtagatctctatagctgaaaacttcacggaaaacgccctttcttcatgctgcagcatccagatccaattagtagtgcataagaagaataaataccagcattaactttggaaaaaaattacttatgcaacgaggcctgtacctgaaatatatagtcaaatatatcagccacagcaaactcagtaataccagtcatggtgtatgtctttccactactcgtctggccatatgcgaaaatactacctgtccatcgttacagtcatagaagaactaagcatatagtttcatcaatgtgtgcatcagcaaaacaacgggaaatcaagcttacaattgattcctttgacaacagacagagcgatttccttggttccatcctcgtaaacttgtctggtgggacattcacctcggtagactttatctgtcaccaaaaaaaatcaaacataaaatgggaatctgagtcagcatacggatgaatggtgagatcgtttcaaaaagaaagtagaaatttagaaaagcaaaggtcaaagccagatagagttaagttcataaaagaggttaactattagtttgaagttcaagtaagagagtgtggatctaatgtatagaagaggtttaaccgttagagcactattgctcttcttaccaaatgaatatgcagaaggaaagttcgagccttcgcgcaatgtgtttctgtacaatatggtggtatcattgatacattcccaatccgcagcttcattagcggcaatctctttctggtttagaggcctcaatctcacgagaaccagtatcttctcttctcgggctacaggcatctgtgtcttctccatcttctttagcaagtgctaccaattgctcaccattggtttgaatatttcagagtaaccagaggaacctttgttttcctgaaacagttcaaacttaagacctctaagattggagtcttagcatatttactgcagaaaatatattcaggacttgtgaaagaacttcaaaagcaggaaggacccttattttccaactaatcacaaccataaataaatggaaaaactcagaaatctgatctcaccaaactaaaactaagagactaaaacatgaaacatgcctggagaaggaaaagcttctgtgttgtgatgaaagagaacacttgaacattttatatgaaccacaaagacacaaataagagaagacttcttgtcattataatattaggattatacaagacagtttacttagaaggtgatcaaccacaactgaagaagaagaagaagaagaaaaacaaaacaaagattaccgactttatctgtaatggtcacccactatgcttgaggactaagtcacgttttaccaaatctaaacattgtttaatcgaataagagaggtaatgcatggtcccacagaccatgcttctccttataaaatgcatatacatctagtgtagagaacaaaaaaataagttatcatactctaaactttgaaaagtaacttggattataatatatgtacacgcaaaatcaaacataaaaataatagctttgtagtttttgaattcatcaatggagagggagacaaggtcagtcacaaatgcgtgtttaaaggttaaaaaaagtaacttggagtttacttagtcaaaactcaatgaaaccttatcaattgcaccaacagaacatttaatcattatcacaaaatgcatctcaatcttgaaccagaatactaagattttgcgtctataaagtgcgtgtcttgtctacatctctaacaagcaagataaagaaacatgcaaaggagctgtttttaccttgtgagtgagttgtcttcttcttcctcctctaaagggaataatgcggttccagaaagaatcctcttgtgtctcactcttcgcactccgaagctctaaactgcaagcaaacatccactacagaattcagcaatgacaacacagattcgaaattttgcaattgttttgtacttctccattagtgactttatcaatgaatgacacaaacccaaacaacaaaaccagattttgaaaaagtaactattatcttttggggcacatgaaaaaggaaagtagtcagaagtagtaatccaagatgtcacggttgagagaaacaacaatgtgaagttttcttctgaaagggaaccctaaagagtgccggaattggaaacacaacagtgctcaccggaaaaccaaaagaaaacaaaacggaaagatttgtaaaagaaaaagagagagaaatgacaatgttaatcccacccacttcctcctgctactgcctacaagtttggtagttgtttgttcttcgtcgtagtcgtcgtcgtcttcttcttcttaacttttgtctgaagggaccactccattgatttggtcccaaagattctctcttttcttctattcgccggtttctcagactctctctctctcggcttgggtagttaatgaccggtttacccctgaaacttaattaggaaccttaaacccgccacgtggacctcacactccacttcatcgtagcccattagtgagagaccttttctcccggcccagaaggtcataatgatattttgataacaaatataatggatatctagcccaacattacaagtaaagcccaacatttagcaatgatgcacatggcaggcaaactctcttctttggatgctctgttttttataaaaaccataatctatattttcaacagaagagaacattgtaattatgcaaatattgattctcgtgtttatgaatagggtgcgtcaaaacttttctttcaaattttacaaatgccaaagtgtcataaaacaagctacaaaagaatgtttatggaggagagaaagaataaactttgggatgaaaagaaaaaaaaactaagataattgtgaagatgttagttaaatgaaattgagaagatgggcaaggaaataaaaacaacattaaaccaaggccactagtagagttttgagagttgctttcaactacttctcgaccaccaattttttaaatggctggtgacatttggcccacccacctctttgtctttttttttaattccttttgtggctcttattttttcccccttttttatttattttagtttatatttttacttttaaaaatagtcacacgtcctaaatcttagcacattatgttgcctaaaactatttcagctgccgtcaaaaaaaggaagaaaaaaaatcagatataggatccaagaaatcatataaagattgtgacaaaaaaaactttttcaccaaaacaaaggaaacaagacaacgaatgtgtttcagggagacacatcaatgacctcccagatggcattgagtctttcgtcttcactttttagtcgatatcatttttctttttgtctgataatggtctctgatataatggactttaaacaatcttataactcaaaaccatatccactataaaagatttggtcttcccaatattttctcctaaatcatactacacacatttcttgttaggtactactttaatcataattttcgttagtcaaaacacacaattaaagaaaaaaagtaattgattggagaaatttactcaaagtagtaattaacagattttgccttgtcacagcaaagtatgcttatttgatactctcggcgcgtggatttggtcgtcgtctcttctggtctctcaagcttctcctccatcgtagaaaaagattttaaaggagcgatttttataatcttaaataatttcttccctttcttcttcttcttctagttccttgataccaacgcgtaatcctaacccttaatctacttcctccttaattaatcagaggtttctacttattatttccacttctcatctctttcaatcgcaatctgagttctggctaaagattttgtcttgaaggtgagattcattgttccgaatagagtgagaaaaagacttataagattgaaaaagcaagatgcggattttgtgcgatgcttgcgagaacgcagccgcaatcatcttttgcgccgccgatgaagctgccctttgtcgcccctgcgatgaaaaagtaacttctctcccaaaaaagcttcctttttttctttaactctcctctctatctattggttgtgctctgatgggttcgtcaaagatcaagtctttgttatctctgtctgggaattctcagttgatttggacctgagttgatctggcttttcgataactttgagctaaagaaataagatttttgagatttggtttctagattcttaggctcttcacatgagattagatatttcgaagtgtagtgaatccgtcaaaagagttcaaatagttgaaacctcttctctcatttggtggattaagatggttcagttgatgaatttacatgtttgattacatgagtgtttgttgctgcggtttcaatgattctactctgtcatgtacattgcagggaacgttttgtctccagagtttgcatttagtagtattaacttctggagaagaaaataatcgattttctgctctttgcgcttaatccttacttcagttagatgactcttaagggtaacactttatagtccttctcgagtcattggttcatccttctctactgcaatagctcttagtagttttcggattttgatcggaaatggattacttcaaagctttgtaatgttttcttctttcaggttcatatgtgcaacaagctagctagtcggcatgtacgtgttggtttagctgaaccaagcaatgccccatgctgtgatatatgcgaaaatgcacctggtatgatctctttacaatgaacttcccacactcgtgtttaatgttttcgcatatgtacatatattgaaaaatgaagagaaatcttttgtctgcaatgttttttgttgtgagaacagccttcttttactgtgagatagacggtagttctctttgtctgcaatgtgacatggtagtacatgttggtggcaagagaacacacggtcggtttcttttgctgagacagagaatcgaggtttgaattaactaattgtttctttctcacgcagacacacaatcattttgagtcgatttcttagttttaatagtcatcttgtgtttatcgtttcttgtagtttccaggggataagcctaaagaaaacaatacgagggacaatttgcagaaccaaagagtctctacaaatggaaatggtgaagccaatgggaagattgatgacgaaatgattgatctaaatgctaatccacaaagagtacatgagccatcatcaaataacaacgtatatgaatccctctatccaacatattctcaatctttgtttttgtattctcaattcgaatgtttctcaatgagcaggggattgatgtaaataacgagaacaatcacgagcctgcaggccttgtaccagttggaccctttaaacgagagtctgagaagtgataaggtgagagagagagagagaaagagactctttactctgattcaaaaaatcagtttaagaagaagattgtaaaaagtttcaagaactggagatttcatgtccgttttttttccttccttctgattcttagatcgttgctggtgtaaccgagctttgttgttgaagagggaaggtttatgttgtttgtgcattatcttagttttaaggaattagcttaagtgctcacatgaatgtaagctaatctctgaaattctaaataattttatttgtttctgtttttttttcttaataaaatcctctgggaaatggacgaaaaagaaagaagacgaaaaattgggccaattaaaagattaagcccacttaatatgcaaaggccccatgaggctaagcgttgtcctttgagaattgtaagcttcgtggagaccatttcctcctgtatcctctttgttcaaaatttaaaattggttgattatggaatagttgtagtttcaagtttaaatagatcaagagagatagataacttcaatataatagaacttattaaaaggagtagctaacgcaaagtaagcagagaaaataatgatttgacatgattaataacaagcaaactcaaaaacaaatgtgattaaaacatctgcttcatctcttttttcacagcatcatctcttcaataggtgtaccctttgacgaacatgccctccttagcctcttcggactcaccctcaccggtgtattttccgagctgagccaacgaattggccttggcacgggccaagagagtggtctgagctgcgttcacgttctcgggtctgccgccccatgttttcagacaagtgttctgcaacgcacgtgcgtaggagaaggacacgtgccatgggtttggtgcctggttcattgcgttcaagttgagtgttgcctccacctccgactgtcctccggacaaaaactgcaaataacaaaaaaaacaagaaacaatgttacttctacctcaagcaaccaatattaggctttgcctcataaaacaccttttcgttgtattgaatcgaacaatcttttaattgtgaagagaatgagagaaacttgccatgattccggggactgcgggagggactctgttgcggaggagcttgagggtgtaggcggcaacttgttcaggagtagctctgtctttagactcagctccgggagtcaccatgctcggttttaggaggatacctgtgggtaaaagtttccttagtgatttttcagacattataagttgtattaagagaagcactttataacgaatataccttcaaacatgacattgttctgagcaaggtaaaagaaaacctcagcccaaaccttctctgctacgtcgtatgttctgtcaatgtcgtgttctccatccaacaagatctctggctcaacaatcggaaccaaaccgctgtcctggaaaataaagtcgtgtgtgaatagcttgatacactccgatttgacatgtttcttgggatacacgctatgtttgttacctgtgaaatggcagcgtatcgagcaagaccccaagcagcttctttgacggcgagggcagacggaccgttaggaatgctcacgacagtacgcctaatcaaccatcagagacaataaatcactatgaaatcgaacctaggcatattttttggtagtaggaaatgaaatgagaaccgagagtactagtctgtaccatttggcgaaacgcgcaccctgttgatagtaagcagcagttcgagatgatagaccatctagtccttggcaccatgactcattgttggatccaacaagtggcaccaaaccctaatattccatacacataactcattaagattcctcaaattaagcaccatgcatgttggtatatatactctacagtctatgcgtttagttaccttgtcgactttgataccagggacaatgttctgctcgacgaggacgtcgaccattttcttgccttcggtggtagactggtacagagtctcctcaaatagaattgcgccggagacgtactgtccgagtcccggtgcagagaccagcaaagtccggaaagcttgacgatttgcctcagtgttctctagccctatcgaatccaaacgtttcccgcaagtcgcgtttgactcgtccatcgccaagattccacgtccgggagacgcaatagttttctactccaccaaaattaagagaatcaaatggaattgcattataaatcaatcatatagtattaccaaaatctagatcaaaagttcaaaactgaaacaaaacatctgaagggtaaattcggtttaaatagattctgaaaaaaaaaagtagaaacagggcaaaacagaacaacagaatctagacattcccattcaaaaggcactttacgaatcatgcagataaaacacgtggtagagaagagaggatatgtgtgaagaaactaaccgctgtcttaacaagctcatcggcgtaggaggaagcggcacggacggtgagggaggtggcacggttgcggaggacgacagaagcggaagaaggctgacggaagagaacgctttgtcccttgacccattcggatttgtccaacaccggagaagccttgaggagtgaggttgatgccatttttttttgtgtgtgttatctcttttctctgcctttggtttctttgagagactcacagtaaacgcttatgacaccacccttatctctcactcctccctcttttggatttatatttctcttcagatcagttatttgaggttcttgtgaccttgccaataatattccgccacctggaccgtaatcttgtattactctcaattcaagaaatatacatacactccaatttttatctttttttttttctccgaataggaaatcgatactctttttatgcccgtcgttacataataatcgtttgcctttacacggataaaaatcgaataaaatcgaataagtacagaaatagttaagattcgttcaagatactgtttctttaagaaaaaacaaattataacgttaggctacaatattaaaagcatattagcatgtagaaaagatgtataaaaccatcaagagttaatatgtagcaccgtggaccataatattaattagtttataagtttttttcttgaattgcaaacgtcttgtatatcactaatttactatacatattgtcataatgttgaactccaggacagaaaacataagacaaacgcatcattttcaattaaaaatagtggcaacaggcttataaagatacaaagatggtgttttgataagagaaagaaaaattatgaggttcgtatcatttctaatttttaatttttaagagctgccgagattattgatcagattagctaatgtctaaatttgacggtagagagtttaccacgtcaactacacaagaggacctttggatccggaaagaggtttcgttagtctgggtctcaagtttctcaaccatagacttatatgctaatccagtgaacccatgattatgaaaacctattaaaattttcctttttagaatttagagccaaagatgcgtctgaaagttacactcaaagagaaagattttgtgaggacgtagttccctgcgttttcttaaggctgaggttaagtactgggatttttaagagattgtgaagtctacatcatcagtcgagagacactgcaatctcatcgtcatcattgcacaacaggtggccaagtggatgtgtaggcaccaaattgacccagtaaacctttcggtctggtctagtagcagattttgaaatctcaaacccggtttgtgtcggttaaggagtagtaaagcaaaagagagtttgtgatgtcaaaataaaacacatacacatagttcacttaaaagtttctgcaagagacagatccgatattccagatatcagatcatcgatattgctcttctctgatacaacttgatcatcattcagtggctgtggaaggggctggacagtggaagactcatcgagggccttcttcagctgcagcaccaacccatcttcctcatcattgtcccccacaacctctagatcccacactttgaaaatctcttgtgaagttactttgacaggatcctctgtaacattacaatcctcagcattgtcttcaacgtatgtgctcatgaaatcatccttgaatacttgagacgatactgacgctggtttttcttctttagcctctccattgctcactgacccatcttcttctatactttcaacacctccaagatctgtcttagaaccgtccgctggttcacggtttccattctctgctatagactctggaaaataataatcttctaagcaattctttgacgggtctgattcaaaagttagcatagagataatctcgctaacttcttcattcgatgaattagttctactgttcgctgaaccagctgctggttcagatctccgtagatcaatagtctcggattcagtcataacctcgtctggagacaggacacctcttgttcccgttgttgatgaaaaaacaaacatctcgggatggatatcgatgatttctgttaaagcatctctaaaagttccccaattattgttgtctgaatcatctagaaaactgatgatgcaagaatcagcccaagctacacattcaggagaaagatcttcctcgtttctcactgaaagagaaacctctgctgcgtcttctcgttcagccatggctacaacaaagcagagatttgaagttatgatagatgttagagaactcagggataacatatacaagacatcccgggatggataaaaataccagattgatactaaatacactaatttcaatcactaattataacaaaactagggttacatggatgtgaattggatttagaagcatcaacaacaaaagtgaaataccttcgaatgcacaagaatcacagaataaacatatataacgaatcgaatcaaagagtataaacgtcaaatacgtaagcaggaaaacgaaaattcttctgagcacacctaaatccatgactaagtccaatggattactgggtacttcaattcaattaaccaattaaggaaatgactaacctttatccacacgagaatcccccaaaaaaccctaattttcagaagaagaagaaaaactaattttgaaatctctgagaaactgaagagtaaacgacgttaaattgtttggaattttggataaacttgtacgatgccgtttttgtggtgacttgttttttgttttgttttgttattaatagcccaaatatttttagatttacagaaaagcctcatactttttattggcccaatgtgatcccaaattgtgtgacagtagacattaatgtatttgtccttctgcattttatttcatcaacacacagtcaaaattcaacatatggttggtcttaaagaaagcttaaacatcgacaaaagttgcattataccccaatttgtttaaaataaaaagagtcttattatatatccgttaatactttttttagtttttctttcattatatgaatcaagtgatacaaaaatactcacttttagattctgttcgttttgcacaaaaaaaaaaagattctgttcgttgtttaatacaacttactttcttctgtcaaatcttaaaaggcagaatcgtctcaaaccgggttggccttaaaataagccaagagaccaacaaaaggtgcattgatgtaggtcgtcggctcagtctcacttgcatttgtccgacctccaacgaatttgtcatctatgtttggtcctccgatcactgcacctactaaaacgttggggtctggatttggtgacgagaaactgttccatccttctgagcatttgaccggggtaggatgagtagtgatagacggtgaggatgcaccgcggtgatggatttgtcgtggatatcggttaccgtacccgatcatgtatgacattttcatcggattatctcccaaaatgtaatccacctatatgaaatcattattaccatataaccgatcaagttagttaagtagtagaccactaatttgtaaaatgataactcatgaactttctcaaaaccaactatatttgctatgcgttgtgttaaatacctgtcgtttggccaagcgacggagagaatccggctggaacttgagactaccacagtggagttgttgagaggatttggagaggttgttgagaggatttggagaggtaattggcgtaagtgagaaggagaaaagacaatgcgacggtgttttggagctggctgcttccgggtttgtaaagaagaccaccgggagagtaactcatatgtgcaccaggagtttccagaaaaaacgaacacatcaatttttccgctgtatccttatacggtgcaatcgcagcaacattcttctcaaatacttcctatatcaacaacaagcagctcaaacggtttagaattaaacgagtttgttctcgaccggtataccagaatatatacatttttctatttaagaagaataatatatgcatggtcaagttatactacttgtatgttcagtataaaatgagttacgatcatgagttttattgtattatgaatataatttcgtcattttaaaaatcaaagagaattggatcaaaccttggcaacgaggacattgacgcccccaactttgttatcccatccaaactcgaagtaattggaatctgacccaaaagattgacgattctccactaagtatttaatgtaagaatctttaccggtcgctcttctcagccatgcagctccccataataattcatcctatatgaaacaacatgattatttatatggaactaaaaacattaatctagaccgatatctaattttacataagatattcaagaaatcatagagagattacctcatatccgtttacactacaataaaatgggcagacagctagtttagtctcaggattattggtgtaagaacctcgatgtgaatctgcgtactcaaaagttcttaaagcattatcgagcaatagtttagaatatctaggatcaaatcgtttgaatgcgattgaggcggctgccaacgcagctgcgatttctccagctaaatcagaggctggtttcggtgcttccagtgcgtaagcggtccgtggtgtgtccatgtcctctggtctctcccaacactgatgatccggtgttggttcacctacctaaatatcattatttaagattataaatcaaattctcaatatatatgcatcagtttaactcttatgaatattatagcctcgttaaataaattagttaattactaacaagtaaaaacaaacaaaaaataagtaacaatattgagatgaaaaaaaaaaacaagataataattgtttgtgatatgaacaaatacattacgaatctaagatctgaagtaaaatttgtgagaactagatgtatgtgtaaaagacacacaaatacaatcgttgttaactatcctaagctatacatacatgtataataaaagacaagagcttattgacgtatagtcaccgtacttggacgaagatgcgattagggagttgggaaacggtcttgaggagataattgctgccccaccggagagcgacgagattgtcccggagatcagccggagacatgtaacttccgaagtcgatagcgctccacgcaagcatcgtagtcgtaaaagccatcggaaaatggaatttaatgttgtctccggcgtcgtagtaaccaccaacgaggtcgacattgaggttcttgccatcgttgagtgcggagttgtggcgccacgtcatcctctgttctcttgggagatatccagatcgttgaccttcgaagaagaggattgactttgtgagagcatcggagtagtcgtgagaaatcgtcgttggtaggaggatgaggaggataactataaacgagcaaaccaatggcttcattgttttctcttttagggtttatgagagatgactaaataagacgatgcatatatataaacttttattcgatttttttctatggaaactttcccgcatgttttaactccttgtatatttttatatctaaactttcctcaccatgatttatcacaatcaagaactttttgttctctgttaaatcgttttttttgtcctagtttaaatggatatattggcgagtttttcttttccaaatttgatctatagataaagaggatatgtaaacttggcaaaaaaaaaaacgaatgaaagcgataaaaatattatcgagtcttataaaacatcatctaaattaccacaaataaaaccatatctgcaataaataattttctgtttgaatataaatacatattattttattttttaaaaatacatattataattataatatgtattcttttaatttttattaattatataaatactttaagacataaagataaacaacggtaaaacaaaagaaatttgtatcatgaaaacgtaaattgcataagaataaatcattataaaaattttttatctaccttgccattgtttatacggtataaattatacctaaaaaaaataagtaagtaccattaagaatattactaaaaggtttaaagatgtgttttcctttacttgaagaatttcccatacataaatatatatctcttgatgcgtacttttacctcaatcaatatatgtacattttcatttatttatttttacaaatctgggaaagaaattgaaatcaagagaagttggggttgcttttgaagtacgcaaagacaccaacaaaaggtgcattgatgtaggttgtgggctcagtctcactagcatttgtccgacctccaataaatctatcatctacgtcaggcccgccaatcaccgcacctataagaatgttggggtttggattgggtgatgagaaaatattccatcctgctatgcacccaaaggcagccggatgaacggtaacagacggtatagacgagccacggtggtggatcagtcccgggtaccgctcgccgtacccaatcatgtatgacaacttcattggattatctcccaaaacgtagtctacctacaaaaaataaaacacaaatatttttttcttagactaacgaacacaagaattatggaagaaaaaaatgatcttatgattctaatatatacctgtcgtttgactatgcggcgaagagaatccggttgaaacttgaggttaccgcaattgagctgttgagaagatgtagagaggtaatctgcgtaggtaaggagaaggaaagatagtgcggccgtgttctggagctgagtgcttccaggtttgtaaatgagaccgccgggagtgtaagacatatgtggaccattggtttccggcaaaaatgaacacatcattttctccgcggtatctttatatgcggctatcgcggtcacattattctgaagtacttcctgtttaaccaaaatgattaacggtcacacttatcatatatatatacatcagtttgattttggaaattggaccaaaccttggcaacgagaacattaacacccccaactttgttgtcccagccaaactcaaagtaattggaactttcaccgaaagcttgaccattgtccactaagtatctcagataagaatcttcgccggttgctcgtctcaaccacgcagctccccatagcaactcgtcctatatatatgaaagaacatgatgattatatgaaattaaacccaattaattttcattgtacaatattcgagatatgttcaagatgtaccttatatccattaacactacagtaaaacgggcaaacggcttgcttgattcccggattatcggtgtaagaacctcgatgtgaatctgcgtactgaaacgtttgtacggctttattgagtaatattgcggaatacttaggatttgcttgtttgaatgcaattgaagcggctgctaaagctgctgcgatttctcccgctaaatcggaggctggatatggtgcatctaaggcgaaagcggttcgtggcgtgtccatatcttccggtctttcccaacaatcgtggtccggttgtacttcaccgacctatacaatattaatcttgtgttgttggtgtgtacataataaaaagatattcttaatattttccattaaaaatcgtggtctcgtaaaaagaataattacagaagaagaaactaatcaacacatattgttatcttgtcagggaagatatccaatttgattcctgtcctattatgacaaaattggtgaaacaaattcttgataccggtatgtattagtgaatatacaaaatatatatatatatatatatatattatactataactattgtgtccatagatggtgaaaaccaaatgcacgattacactaaaacgacgatgggttaagagttaagacgtacgtggacgaaaatgcgattagggagttgtgaaacggtcttaaggagataatcagtggcccacttgacggctacgagattatgtctgaaatcatgctgagacatatagcgtccgaagtcaacagaactccaagcaagcatcgtggccgtaaaagccatcggaaaatgaaacttaacgttgtccccggcgtcgtagtaaccaccaacgaggtcggttttgaggttttttccgtcgttgagtgcagagtttctacgccacgccatcctttgttgttttggaagacgaccagagcgttgaccttcgaaaaagaggattgactttctaagagcatcggaatagtcgtgagggatcgccgttggtagaagcagaagtagaagtatgaaaacggttacaaggtaaatcgaagctttcattttcctaaaaattattaggacttggtgagatttcgttgttttgatatgtagttttgggggctttagggttcatatttataggcacataatatatgctacaacttctggttcacgtacgtagtttgggtcatttggtaagtaatcaatacgttttggtttggtaagaatccatgcatgtttatcaaaaaaaaaaaaaaaaattagatagaaacaagtaaactagataatgatttcgcttcaatgactcaaaggtttattcacagtactttatctattatttttacacctcgaattttcttatactgttttaagaaaaatattcctgacaattaaatttaaatcaatatctttgagtgtattctccttaattgaatttaaattttatttatttttgtctaattcatatatattttaagacaagaatattcaatcctataattaatcgtttttagttttgctagatttgaataccagctgtggtaagaaaaaaactatatcacatcttttgctaactttatatgtttatatatatatatatagaagttctatgtatgttgatattctgaaaagaggtgcaatgagaaacaaaatattaaaatttgatgactcatatatcattagctaattaatattaattattattaattattaatatgtgagagaaagatgtataggagaatgaaatctgaatgtttttgttgcattgggtaaggtacagattttttcccggccgggatgcctcttctttattatagatggattataattggcttaatttattttcaggatataattaagatgtaaatatcaacaaataatcttcttgaaactaaagtaatttgatttcacattttcatctcttgtttcgccagaataaatttcaggcaaaccaatatttcatacagaactgatcagtaaatcgaatttaagaagaaaaagtactagaaacgtgattaaaaaaaaaaatggtaagaaaaattaatgttctgttaagagaaaagtaaaaacaatgtattttgtctaaggcaaaacttttcttgatgagttttgcttctctttccaatgagttatactttctacctgattcttgaaccaagcgtgtgtgcatgcaacgattcgagatattgcttgtgtttaatcgtacaatttattttgctcttgactacattctatatcatatacggaacgagttaataataataatatatggaacgagttaagtaattagcataaactctgtttttttcttatcgtgtaccgtatcattttttgtttctgccccatatataaggcaatcatgctcttttatttctctacacaatgtctactctgttatattttgtagaaagcacatatttgttcgtttctctatatcacatcacctttcgttgtagtttccacaattgtcgcgtttatatattctttaagaaacatttaatttgaagcatatccaaactgaggcaaatatatatatatatatatatatacatatatatatatttaaagattacgtaaactagtattaattgtgtatattacatttattagtatctatgaccaaccgctattaataggtttagttgccgagtagttttcgattacctttcctacgctattttataaaaatccaattataaatttgtggactacagttgtatcaatgaatcatttgtacaatcatagacctataaaatatagtattacagaatgattacaatcatcacataataagtacggacacacaacaaaccaaaacgaaattattattaatattgctcgatcgaattagtatataatttgtacatatatttattgagatgcaacaaaaaaaaaaaaaaaaatcagaattcatagcaattgaagtaataatatatgactatcgagagaaatttgcatggaataaataatttcaaataatgatagtctagctagtggattatcgttatgtacttacgttagttcagactaattattttcaaccttttttcaaataattattttcaacctttttttctcctgtaccactaaaatattcatttatcgatttatataacgtgagaactctctttaaccagacctaaataaaattgtacccgttttctttagcaaccattatatatatgtatatatgaatagactattaattacatttgataaaaaaagaagtatcaaatgatcaacaggtgaataatccgaataagttattcagattaattttgcgtaaaagaaaaactattttaactgtaagaactttttccttctttacttgggcaagaagatgagagacttgtaagaaaaaaaagaactcccatactcttggaacttaagaataatgttttccaattttactcccatgtcgtcagcttagctagaaccaggattggctgcaaagtacgccaaaacgccaacgaaaggagcattgatgtaagtagtgggctcggacttgcggaaatcggaccgatcatcatcgtacatatcgtcctctccgggcccacccaccaccgctccaatcaaaacgttcgggttcggttcggtagaattgaaataaaccgacccgtctttgcatctgatggcttctggatggtccacaatcgatggcaatgatgagccacggtgatggatcctctttggatatctctctccgtatccgaccatgtacgataatcccatcggattattccccaatatatagtccaccttcattttccaataaatacatgattagttttgctggatgccaaaaacaaattatatgttattcacttataaacttaaaccaaaccaactcaaaccggtctaacctgtttcttggcaagacggcggagataatcaggagggacggtaagggtgccgcaattgagggagagagagcttcttgaaagatattgagcgtatacgaggaggaggaaagatatggtggtcgcatgttggagctggctaccgccgggcttgtaaagtagaccagcggaagtatactcaacatgcggtcccgaagattccgggaccagactacacatgaagctctctgctgatgccttgtacgcctctaagttgtacatatttccttcaataacttcctgtaccgaaattaaatcaaaccaccaagtttatcagttatggtaccggtttggttcttaaccgggtcagtttggattcacgtacacggaaagaaaagaacataactttgatatgcacgtgaaagcctcgtgtttactaaacttttgctaaagtatttaaagttaatttcgatttcatcccctaaatttgatgttaataaaattggaagtattgaactaaccttcgaaacgagaacattaagtccaccaactttgttgtcccagccaaattcgtctacgttatcgttagcaccaaacggttcacggttactctctatgtaattaaggtagctttcatcaccagtcgcttttcttagccaagctgctccccacaataactcatcctacccataacaaaaattttacaaaaaacaacattaaagaaaatcatcaccaagaaaatgtacaaaatataatatttaccaagaatgtatagatatttagcttgttctaatgatcctgttaaatatttgataacttctttagtcacacaaatgttgggattgatgtttacctgaaatccgttgaaatcgcagtagaaaggacacacatcatttttgatatcgtcattgctgctataagcaccgcgatacatatcagcgaactgaaaagttttgacagcattttggagcaatgtttgagagtatcctggatccgatgatcggaaagcaatcgaagcagctgagagggccgccgtagtttctccggcaacttcagaagccggattcggggcattaacggcgtaagcagtccgtggtgtatccatgtcttctggtctttcccagcaattatgatctgctatcggatcacctacctatcacaagttcgtttatttttttcctaccttagttagttttcaaaaatattaaatattcaagccctctaaataaaacaatatataaatcaagatatgaaattatcaatgaataaaataagaaatgcacctaacaacatcaacatcatatctgatgtttgatttttctaatattggaacaaagagaattgaacgattctgaaagaaagaagtctctatcatcgtatctcaactctaataattattaaatgatcataatttattaattatgatgcaaacgaccattgaatcaatgttgataatttcataacccattcactaatttattttagaggtgtactattgaattatcattatccatttattgctgaatttaagtcaacaaaatttattgttgtagtttttttaaaaaaataaacataaaaacaaacgaaaaaaccctgcaactaaaactaatggttggtcatctttgtatttactacaaagtacgggacacacacaaaataagaccaaaattaaattgacatttacgttgccaacttataaagttcctagtcaattgttatttcctaaatgattcattcgatgttatacgtatgttacgtactggactttgtcattaacaataactaattaaattgatattgatgtgtattgataatttcgtagaaagaaaagaatatataggaaaatagaaagggccaaaaaaagtgtgacgcaacgacaaaaaaggtaaatgcagagagactcttgagagtccaaaaacaaacacccacttcacgggttcgtttcatctcttggcaactcaaacgattcagtttcctcaatctctgtgttattttaattccccaatttacccttccccatagtttcgtattcactaaaaatgccactcaccggcataaaaaaaaacagttacgaaattgaattggcaaattaaaaccacactaacctggacgaagatccggttaggtagctgtgaaacggatttgaggaggtaattagagctccaccggagagccacgagagagttacgtagctccgacgaaggcatgaattcgccgaactcaattacgctccaggcgagcattgtggtggtgaaagccatcgggaaattgaatttgacgttgtctccggcgtcgtaataaccgccggttaaatcgatgttgtgtgtccaaccgtcgctcagaccggagttacggcgccaggtcatacgctggtcgtttgggaggtaaccggagcgctggccttcgaagaagagaattgattttgagagtgcgtcggagtaatcgtgctggttcgacgacattgtcggtcggaagaagaagaagaaaaagaagaagacaagtgagagagggtgtaaatgtaatttcatggtgtatcggcgtcggtgacggccgccgtggtggtgatggtgagaggctactgtctgtgactgatcggtgtttgcaactacgagtgtgtcacgagatgtgtttatatatataagtgggagatcatattttttttactaatatagtatagtataacataataaaggagtcattatgtgatttagtactttttgttatgcgatttatgcttggataatacgtagaaaatggaattaaaaattgcaactaaaatatatttaagtgttgcattaggaattagtactttgcaatcgtggattaatttatatattatttacaactaatttaataagaactgaataatgtcatttgtgcgtgtggcagcactactgagtactgacaaacgaaactgaagcgagcgcgcgggcaagcaagcccatgggtgtcactcttttggtttttgctcgaaattttttcattttctgttttaaatatctctttagcaatgcaatgagcatgtctctttaggaatataatgggaattataaatgtaaattaggtttaataatgaataaaagatagtatgacgacaaaaataatagaaaaaggatagtataagcgacgagattagcataataaaaagactgctttctataatgcaaaaaaaaaaaaaatcagaatctcgtgaccatgtgggacctgcatgctactgtaacatgattcgggctttgcgtttaagcgttaagatgcaaaggaaagtatacacaaaattcacaatctttctatgtttgtgtgtacataaatattttttctatgagttacctactaagaaaacattacccaattttatgtttttttgttcgtagcgcctcgcttctaatgatttagtctttagcgtccacgaaagactctgtctctcgtattctcatctttacaaattaactttgccatctttatcttcatatgagcaacatccatataatttagccttcttgtaaagccaaccaattaactttttgattccactgataacacaaaacgacataagaaacctacaaaaaataaaactcagaataacgagatatttaaaaacaaaacacttttccagttgaattacaataaagggatcagacctttgtatttagtgttcaattcattataatcttgaatccactaatgaatatcgatcttagaaggtgtcgcgacattgtggatcgattcgaaaccaatctttgataaatgacaatacgattttatttgagagatcaatatttgtgttatttatacattaataattcagtaaatgatattactaatctatatctgtacgtatcaaagtattgactaatggagcgtttcacaaaaaaattaagtgtcaatattacataccaaacatatatatatatatatataactgtagttagttaaatgttaggcgagtagaaatatcaaatatatgattttaccaaaacaaaaaatatgaattcatcatactttttatacgaaacaaagctcacgtaaactaaaataaaaataaaatataacgtatatttgtgggggactttgccattttcacaagcaaaataatccgttatttttttgccttatcctttatcgaccatttttctattttcctctaaaaatcttagctttacgcttacatgattttctgccctaggaaattatcataaaccaatatgatcttacaatgtccaaaacattaacttggttgaaaatcatatatatgatacaaattaattaagattccactaacaaaagtcaacttttttttttagttaaataaacaatagacaattggtgtcatactcatatagaaatgtattacaagtgattagtgaaaataagtataggcattataagataatattagaattctgacaaatctatgtctcattgcattggtaccataacgtaccttgtggaacacgacaagtgacctcacagcacatgcgtgtgttatctttttttttatgtgtatcaaattgtggatattcatttctacagacatggacctaaaagcaaaggtagaattagactactgaaataatgggcttcatttaggtttagtttgttattgggttttcagatccgtacgttatgtttcgtgaaccatcgtatcagtttcttctcgtactgaggcccatgactcggtaattaactgcatattttgggatctttaagaattaattggcaaactaattcatttcaagaaaactaatatatttcttaaattatgacaaatgacagaaaataatttaagattttcaaagtaataccaaatgtttactttcaatgaattcgtaaaagtccattaataacttatcttatttacatatcattttacatcaataagtccaaatttaataataagccatatttatctgtatttataaatagacatgtgtagacgtgtttgatttaacatatatgataaaactccaagataattaaaacattccacctagtgctttgtagattaaaaaattaaagatttttcattaaaactctaattaatcccccttaattttcatcacaactttgtactactaatcttcctacattctgctacgacttttggattaagactatgttttggtgtataataaagtgtcaaatagcaaccgtatgtattaagagatgagtaattgtttgtgagtcaataataattatattgagtcagcaaacgtaactttccattacatatttacattataggtgagagttttcttaaccataggcacgaggctttcgtaaacatttaaactatctccacatatatgtacgaatcatgcaccaaatatctgtatttcttcaactttgaaaaatatactccatcctagcgtgttaggttcatatgatttcttctgctgaattttaatacattataatattaaaatggaaatagaagtaaagggatagttgaaatttgtggttttgtgagtcatcacttttctgtttggagatgaaagatatgttctctttaatctaaacggcattacgcgtaaaaaaatactttcccttaattttcatcacaacctttaattttattactaaacttcctatatatatagtagtcgatgctctatttctaatcacacgataaactttcttaaactttgaggagctctctctctattcagcccttgtttttactttaaaaaatcatgttcaagttacgtgaaattcgtctctttctccaatcactgaacaacaaatggtgtctcgttatccaattggtggtttcgctttccataggcaccagtttcatctacttctacgacatttgggaatcttctctcaaaaagaacgtaactttcttcaagttgacgatgagggtattcgtttttttctctattttgatgctacttgtgatgtacgccacacctcaattttcttatatgacttatggggtttttcgtaaacacaagcacattagaaagatggtaaagtgtttttcggaatcgttcatcgtgtggttaacaacactcatagatagtattgttgcttattatgggtgacgtagggggttggatagtcgtcccattaactacaataatcgttttcactaagactcttatgatggccgagtgttgcgaggagtgttgtgagcaaatggaagaagacgcttattcggaatggctccgtggtatgggctggtacatgccaacaaatagatctatgccagcataatcctttcattagtccttaaaataaatagtaaatatatataaaagataatgtaaatagaaagaaataacacaggacgttttagtataaagtaaaagcatatattaaaaatgatgtaatggaaacatttcttttttttttgggcaaaatgtaatggaaacataagaactagtatttctacaagaaagtaaaagtatataatgatgttattattgttatcgttgataagaaggaacagaaatatacaaacaactaatccttttgcctttgggctattaaaagtaaagctttgggtcatcacagcccattttcaacaaacgaattgctgacgccattttcactttcccctttagccagccaccagaagaagcttttgcttagtctacaaaatcagttttagcccgttaggaaaacgggaggttattttgatgtttgattttatattcttgtcggtattattggacctgcattgattttcatcataatttgaggacccccggcccaaagcttaaaattttatatatataaagattatgtattacaaaaagcccttttcattgaaaatattgaagggtcccggcggcgttaatcgttatttgagaatttattggcaaactaatccatttcttacatagatattttaacttttaagatatccaaaaatacacatttttgtgaatataatatcctctttctagatgtcattttataataatacaatctccaaatttaaaactaagttatatttatttctatttttacataaaatcttctttaaatataatagtctttggaatctatcaaattgaggtacaaagatttggtgttttgcttttgcatgtttctatgaaaaggttgaagcagagcgtaattaccatcaaaggatccttgaggttattgaacggctagaaggagaggtatatatatctccattggccacatctttctacaatgttaatccccaaatgacataatttccttgtatagatgagatttgagcaacaaagaatcgaagcaactcaaactccacaagtagagaacatcacatcttcgcctcctctttcatattaagaagccaatgatggagtcaatgcttctcaaatgcataatggaacatcagacgccatgggatatttcttaggagaggttggtgtactttaaaatgtcatcattttatggtcgcaagaacttgattaatctcttgagttgcctatctttttccgcacaggtcatgtttccatatcaagctgattcagattttgagctcagcttatcagttggagactatgttgttatcagagaggttagcattcaaatcaaagcatataagataccattctttcgcggctcaggacatcgaataacggaaagaatcttaaaactctttttttttttaatctctgtggactcattcacatgtctttatgatgttccaggtagtgagtagcgtgtgggcagaaggagaatgtaaaggcaacgcgggttggtttacttacatctacatcgaaagaagggatcgtgtcttcgcaactaaggtcatcgaggtcttctagtggcttcttttggtgtgtttcggtgacttttgttgccattgttgttctgtatctaactttttttttttttttttggtcaaaaattctgtatctagctagatttctttttcttcctctctttacttatacacaagatctgatcattgaagcaaaataaatctcatctccgatgatctaacaataatttccataattcaaatgctttcagaaaggatttctcaatacaggttaaaaatatcaatctaatctttgcaaactcattaaactaatttagttactttccttaactttaagaaaacaaatctcaaattttgtggctataccaccattttcattgaaactaactactcaattaacggtctgaaagaggacaaaaagattttcacaagtgtacaccaataaaagaaaatcgtttttttcccttataaaatgacaaaaattaccaagaaattaaatggaacataacttacgacgaaatttacctgacgattttttttccttactgaaaattaccaagaaatcgcgtggaagtcggaaatgttacatacttttctttgtaactacactgcgaaagcaaaaaaaaaaaacataaagtcaaccttttgggaaaattgtcgtctttgacatcagaagagattcaaactaaaatgaatgagtacgttacttgcgttatggttgggttttcctttttaattttagaaacttttcttacttatattttgaatcaacagttgataacacaagtataaattattattttcgccatcacactggagtcaagctcgagagagacttgtttcctaatttaattcataaacttgtttcgacagtgaatatatacatcttcgaagaaataacaccattgacttaaaaccaaaataaataacaatagtcttataatttatattattcacacttaaaattaacaatacaagtcttttcaaagtcttttaattatataaacaatagaagtctttttcattgtctctttttgactaattaataaagaccatgaaaagacttgtattgtaagttttgagtgtaaattgtaataaattactatggttttgtttgttttatatttctgccatctaaataattacattatatgataaaataattaccctagcgacaaatgacagctagaaatgtaataagaacaccaactaaataattatgcaggttaataatggagcaagtgatgttctttctatatactgtacattttctttttaaaaaattatgtaatttcgcagaagagaaaagaaaaacacgtggtgattagagagtagtataaagatagttggttgggttctgtttttttctgtatctcgaggcgccaaaaacaacaacaaaaaaaacttcagagcggtgatcagattcaccgatttttctcaaaatgctaatcaaatcccaaagattgactcttttctctcctctcttgtccaaaacaagacggatcccggttaactcccaccaaacactggtcgcagaatcggtgataactcggagaacactcggtgcgatcaccgcaactccgagttttcataaaaatccggtggtgattcgacggaggatcaaattagagagagttacgaggaactgcgtcagaattgatcgggaaatcgacgaagaagaagaagaagaggagaaggagagaggggatctggtgaaacagagcatatgggaacagatgaaagagatagtgaagttcacaggtccggcgatggggatgtggatttgtggaccgttgatgagtctcatcgacacggtcgtcatcggccaaggaagctccatcgaactcgctgctcttggtacgcttttcaatcatacttgtctttccggtttagtagccaattttgaaccggtggactggtcccctacccaatagctaagctgtaagattcatacactgtttttggttcctttgtttagtctctttcgaatatattacacagatttggaaccaataatagttttaaaaacaggtaaacaaattaggcaagtgtccagctatatcatcttattattttaatcattttccaagccaatcattagatttgtgtcggtttaccaacttcgaaaatttagtagttgtgtaacgtttttcacgattcttctagacagaaaaaaatataatcggtaacataattaaaagaacaaaatacatatgttaaagttaaatatgttggtctgaagaaaaggcaaatggttttagtctcgttggtcaaagttaaagaccgttttcaagcatttgattatacaaatttgactagtcaacgcaaggctaactaacataattcaatggttaaaaaagaaaaaattgtttgatttttggtgagaatacggtaaataattgttagtatattttatatgatggctgagaaaattaccggtttaataggaccgggaacagtactatgcgaccacatgagttatgtcttcatgttcctctccgtggctacatccaatatggttgctacttctcttgccaaacaggttatttactttttactctttcaactttgttttcttcttcttctgatgtcgaaacatctcaaatgttatttatatttcttgcaggacaagaaagaagcgcaacatcaaatctctgttttactctttattggattggtttgtggactaatgatgcttctgctcacaagattattcggtccttgggctgttactggtaaacattttttagtacaaaagtatgtttccgttttaagaaatatttgagtgaaatgtgtatttacactcttgtcatggtttttttgcagcttttacaagggggaagaacattgagattgtccctgcagctaataagtatattcaggttcttgttcgtttgatcattctctgtttcaaattcttctgatgaatggtgtctctctttaactggaatctctctgtctcgcagattcgaggcttagcgtggccgtttatccttgttggattggttgctcaaagtgcaaggtttcttacacttcccttcttattaatcagctttaacgttcgatgttctgtgtcgattttccgcctctttattacttaatttgatgtgagaatctgtctcagtcttggaatgaagaactcatggggacctcttaaagcattagctgcagcaacgatcattaacggtcttggcgatacaatcctatgcttgtttcttggacaaggtatcgctggagctgcttgggcaacaactgcttcacaggtaatattaattatagtatcatgaagcccaacacttgaaatgtaaatgcagaagatttcattacggatttatgtgtttgtgtgttatgttatagattgtttcggcttatatgatgatggattctctgaacaaagaaggctacaatgcttactcttttgcgatcccttcaccgcaagaactatggaagatctctgcactcgctgcacctgtttttatctccattttctccaagattgctttctactctttcataatttactgtgctacttccatgggaactcacgttttagccgctcatcaggtacattacaaaacagagatctttatgcccagtcatgttggtgttgtatatttataattgtggttttattacaggtgatggctcagacgtataggatgtgcaatgtatggggtgagccactctctcaaacggctcagtcatttatgccagagatgttatatggtgcgaaccgtaatcttcccaaggctagaacgttgcttaagtccctgatgattattggagccacgcttggattagtcttgggagttatcggaacagcggttccaggcctgtttcctggtgtctacacacatgataaagtcatcatatccgaggtctgtttttgtttttcaaatcaacatttgtttcctgtgtttttgattctaacttggtctaatctgattcttgatatgtttgccagatgcatagactgcttatacctttcttcatggcgttgtctgcattgcccatgacagtatccctcgagggtacattgctggtaaattacaaactcttgttcgattaggtggtttcttgagaagcaagcagctgaataagtctctatatttttcaatcttgaaacaagatagtatgcttaaaccaaaggttgtttcttgttcaccaggcgggacgtgatctcaaattcgtcagctcagtgatgagttcaagcttcataattggttgtctcacactaatggtactttatagagtctctcataaaccttaactacgtttattaatcttcaaagacactttcaatttgagcaaatctaaaatacttttttgttgttgataatgacagttcgtgacaagaagtggctatggtttactcggctgctggttcgttctcgtcggatttcaatgggtaaagacagacatacacagcaacattttgttatcagagattttctctttatccaaatctgtctttaaccaaattatggttaacattgcagggccggtttggtctatatctacgacggcttctttcgcctggaggcatacttaattcagatgggccgagtccatacacggtggagaagattaaatccatttaagtctcagtttgatgatctcattgattatctaagagtttgccaacaaatggctaattatgatatatcaggcaccaatgtcaagaaacggctaattattgtcaacttttttctttggtcagaggctcaatgtaaatttaaagcataatagacaaataatatatacaagtgtggttagttcaatcagttagaaaagatcaaattcactgatagatcgactcttcacaaagcttcccagcaaaggagaatttggcataaaagatcaatgtgattgtatttctaattgtattattattggagaaatgaaaatgcatcactactcttgagatgaaaacaaacaaacgggtaaaaatttaagccgttggaactctacttccgcctctgcgtccacgtccatcaggtctctctgaatactctcttctctacaataaccaaaagattgaatgatcttcaaactcaaaagaatagagagtaaatacgccatgttttcagggttacttacaaagggtttagtgggtctagtgtttgcgtatttctgccttctagtaattgacattctctcaacttccttcttcttcgcctctgctttcattttggtgggactgggcctatacaatatcacagtccgccctatttgccctactgctacggaaccagtcgcttcctccaaatgctgcaccgcatcctctagctcatcgggcgatgtcttgcgtattttcacctgttcctcatataagaatcaacaagagactcgctcaagtaagccttgaatgttttccacagtttcaatccattctcatagatcaatcaaacaacaacattcctttcacaaaacataagaccaaaacaaaaatcatgattccacataatcttaaaccctagtcgagtagaagaatcatcccacttttaacacatgagtcaaataaaccacaaagttacacttcctcaactctaaatccctaattttgggggagattacttcacttccatctcattagacctaaagattgaacacaaaacattaataaagttgatacctttaagagctcgttcttctcgagagtctcgaggaatgagaaaacgacagaatcagtaacaccagatttgccgacgagttgacatttcaatttatcacccaaactatgcgcgtaagaagccaattcctttttctcctttatcgacagtttcaaagcagagcctcgactcttcttcttcttcgtattctctgttttctcctctttatctcctatttccgaaacctcctcagatgcttccgaatcttcaattcctctctcggaaaccaccactccactgtcctgctcatcttcttcttcttcgtcttcgtattcgtattcttctgcgctgaaatcttcatcctcgctctcttcgtcttcttcgagatctggttcatcgatggaagagaaggatttcactacgagtgaagcagaatgacaaggaagcggctttgaggagaatgattgaaatcgaggcttgttacggtgattggattgagagactgaagcggagaagcaaaagggtctgaggaagagacagaccggagacggtggtttgggatgtcggagaagattgtggataaggtgagtcgatgaacaagacgctgacgctgtcactctctccattgcaccaaacactctctaactttggtttctggtttctttttattataataaaccctttcaaatatgattatttcacaattaagaccctaaatgtttgattatttagaaagtaatctcacctaagtatctcacggttcagattgcgccgtggttgttttgggtcgttgtataatgggccaaattaggcccaattcgacccatttaaaaaatgatattctctccttcttttttgttggtgggtcactcaacaatgacattctctactgttttgcacacgctttcctgctaaaacaaattaaaattggtacggaccgacacaaatcggagattgatgacgaatttttataaaacataatttaatatttgatagattgtctttttctagccttattaatttccatttcaggtatgtttaagctagtaatttactaacaccaccttttttttttgcttttactaataccacgtattgttttattttctcttttatttcgacattagcaagcaagggaatttaaagatcacaccacatggcacgtgagaaaagaaaagcatacacgtgagccagctgtgcaacgatgctcaaaaaggtcctatgacaactacttagcttcgagaagcaggcactatatatttatcgcataacggtatttatttcattcaataatctttttgttgcataaatttacaaaaatttgagtgtgtgatgtgtacatatttctgacgaatactttttgttgcattatccaaatttttacatgttcccgagccgagagtctaagacgacgatttccaaattattgtcgttgctgttattataattgttaataatagtaagaattattattattatttaggacacgcaagattccacatgatactgcttaagcactacgtcgagctaaaatgaaatactcgatttaaatgaactaccccattagttacttgaagatgaaacgaaacaatttggttttggtcttttggatcatatagttaaacgttatgtatcttactcagtttattttaatgaagtttgttgtttggtatatcaattagccttagatgtcaaatcaaaacgaaacaaaaacatgaaaattcaatttggcgttaaatcaaaataataattaatattccatggataattaatatacacttagcaaattaccgaagtacccttgctatctcgttgtcgtcaataatcaaaattacagtattaacccaattaagagcgtttagcgtctacgtgtaaagcggtatcaggagaaaggagcagcgatcacatgggtggcttaaatctatatcctccggttcctcaccggccaattattctcgcgcgtgtctccgctcctctctgatgcgcgtcactcaaaaagtttgagtcaaactccagtaatatttttgatttattttgtattttcaagaatttcttaaaaattgctgttacgtaatttacaatgcaatgtctcgcggtaaaggtagagccggaactcaagtcagatcaatctccgtgtatgattgtgttcgcatccaatgttaataatttcaggatttgtattttccaagttaaaggatactattgttaactaacgtatatgctgacaaaaaaaataaaaaaataacgaatattataaatttatatcagtcgcataatgaaatgtgtaatttcacccagacaaaaatatctctacagaacaaaaaaaaaacgtttgttatatatgtttattctgtatatttaaaatgtagtctaacgtttgttctatatgtctacaatgtgtatttatatttaaaacatattccatccttaatttgctttatattattgttacaccattcatagtaatggaagaaatatctattggcattctatactttatgatatatatatatatatgaaccaaagtattgtatgtccaactgggacattttatatgacggcggacgaataaagcttagcagatatatatgtacgtgctggtaactccatattcattattttggatttaagttgtaactccatacacaatacacattgatggattagcattgcattttttttatggcattttatatcaaaagattctcaatcaaaacttagatagattcctaaagcttgtaattaaagcatcaaacatatttgttaaccagttattatttttgaaatcgagtagtgttttgttgatgctacatattattccatcataaaaagaaaattaatgtgtgtgtaagtgtgtttgaaataagtcaatatcttagtacagtaattaactaattatacgaagaagaactataagggtaaaaacggtaattacagtatttggtcagccatagttattcccgctcgtctcttgaaaaaaattcaaaccggtaaaccattttggtcatacacgttacagtaacacggtggtctggtcttcaataataaccacgtcagcagcatacagtaaaaactactttaaatgtttttttttattctcacccaagaaaataatttatttttgttttgtcgttctccttcctaaataatttttcaactaccacaattaatttaaaaattaaaaatagagtatatttggaaaggcacaaaaaaaagaaacaaaattcaaaatctgaaatttctcagcctcctcgtttcttcacccagaggagagagaaatctgaggaattcgatcttcgcttaaagaagacgaaacaatctctctctctttctctcttcaatggtctcaccatctctgtctaccatctcctagccaaagaagaagacgagaagaagaagagagggtcacaacaatgctttattcttcttatgtctccagccatgtgagctcccactgacacattctctgcatcttcggaagttttgttttggtttgattcttctcaccgattcctgcgaccgagtttgaccctcgagtttcgaggttagtggatggcttcatcctcatcgagaactagaagcagtagacctccaagtcccgcttcttccacttcttcttctcatctcagcaaccgtctcattcctcgttctaactctacctctgcttcctcattgattacctccgccgccggaatcgcctcccgatctatgacgcctagtcgcaccttctccgactcgggccttatcggctccggcagctttggaattggatcgcctgttccctacccgtcagaggagcttctcggtgaccctatggacgatactattagctctgagcgggatagtatctccgtcaccgttcgttttcgtccgttgaggtatgctagatctgatctcgccatggaccagatctattgcagagattacagttttcatgtagatgcaattggagtcaattctttattggggtttgcaaattcaagtttttatctttgtgggtttgcagtgatagagagtatcaaagaggagatgaagttgcttggtaccctgatggtgatacattggttaggcacgagtataacccactcacagcttacgcatttggtatttggttcacctctcaattattctgaatgttttcttgtaatcattgagtgaatgttttccaaatttgttttgatgccagataaagtttttggaccacaggcaactactattgacgtttatgatgtagctgcgagaccagtagtcaaggcagcaatggaaggtgttaacggtaagtaacattgctgcaaaattcagctttaccaaaatctgtatcttttatatagaaatatcctctaaaccaattggtccgcaagtagtattgcttgcaacatattttctgactcagggttggaattttgacaggaaccgtttttgcttacggtgttactagcagtggaaagacacatacaatgcatgtaagggttttaaaaaagaagaatccttatacgcctttctctctagtttttcttcaaaacacatgtgctatgaattgggatctcttcttcaacttggtccccctttggtatctgctggttattctgggttactctaaacatttacatggtagcaaaagataccatacaaataccaacttgccatcattaattggtgatggttatgtgagttggaaatcctcgtatgaatggaatttgaaggtcttcatttagattggctgtgcttatctttagtgaagtagctacgttgggtctttagttcccgtccaaacaagtagaacctaaatctgatgttctttttgttctgccattggttgcttttgcaatatgcatagggtgatcaagaatctcctgggatcataccgctagcaataaaagacgtgttcagtatcatccaggatgtaagtggtcttaacggggttcatgtcttttctcatctcatcacgacttttttatatgatttcatgctcgctaactggctacatttttatatttcagactccaggaagggagttcctgctccgtgtttcatatcttgaaatatacaatgaggtaagtggaactttttatccttgatatatttacttggtaatccctgaaaagtagatatttttagattgggatatgttttctagttcttctgccttatctttgagaactagaatgcttaaaaatatagagaattgggtgactgttcatgatcttcttggttttacatgtgtgcttctatgtttcagatatccgcagtttatctgataaccgtctttgtatcaggtgataaatgatttactggatccaacaggccaaaacttacgtgttagagaggattcccaggtttgcttcaacctctatagaatgcttggctttctcccatttctctctcacacacgcacacacattgtgctctactagaataaatgtgaacaaattagcttagaatcacatgtgaatttgatatcatttgagaaaagatattgattcgttttgcgttttgtttttctagggcacttatgttgagggtatcaaggaagaagttgttttgtctcctggccatgcactatcattcattgcagctggggaaggttattagataatttaacccctgaaacatgttttgattttgtcaactctgtccttcccgcctctacttaacattgctgttgtttttaattgcagaacatcgtcatgttggttcaaataatttcaatttgttgagcagcagaagtcacactatatttacactggtacgtcttcatgctccaagctccaagagcttgtcatattgtaatttgtagcctcttttcagtgtctcggcatgatgttttgctcttacaaggtgtccttacaatgtacatgttttgaagtctaatttgtatgtgtttgcagatggttgaaagtagtgctactggagatgaatatgatggagttatcttttctcaactcgtaagggcctctttctttttgttattgtataagatcaattagttttgaaaatgggacctaactgtatattttcttgtttagaatttgattgacttagctggatctgagagttcgaaaactgaaacaactggattgaggaggaaggagggttcatacatcaacaagagtcttctaactcttggaactgtaggtgtctatttttgattcgagctatctttctatttttcatctgtttctttagacatttaaggttggcatgtccatcagaagctttgttactgaataatgatgaacttgcttacaggagtaactcaattagtttccacattccattgttggcattagataatcagaaaggagtatgcagttgtgatgggaatatacttgggattttcagtacttttttttcttgatgtagtgctgctagtacttcttgatcgatgtttgatgttctgataagtagtctgttgcccttattatactttatgcctgtcggtggtagcatcttcagtcacttaaacctttgagatggtagggcgttttacttataattatctcttgtggtttcatttatgaaggtgattggaaaacttagtgagggtaaggcaactcacattccatatcgtgactctaagctaactcgtcttctgcaatcttcattaagtggtcatggacatgtgtcggtaagactcttctgtatctgactctgttgcaatatttccccaattcctatatactggtttcccatggttggctctcttagaattttttgattgcaatactctatgcttgttttgtttatattgactaatttgtaagaagcagttaagcattgagctgatggtgctccaccataacaacagaaaagctaattgagtttttctgtttgctttttatagctcatatgtacaattactcctgcgtccagcagtagtgaggaaactcataacacattgaagtttgccagcagggcaaagagtatagaaatatatgcttcacgcaatcaggtgatgttttgacctgttttacaattaagtacattgctatactcaagggtatataagcttgaacctctgcttgatttgttttcttttctttttcatttctgaaaagcagattatagatgagaagtcattaattaagaaatatcaaagagaaatctcaaccctcaaactagaacttgatcagcttagaaggggtatgcttgttggtgtcagtcatgaagagttaatgagcttaaagcaacaggttcggaccttccccaagacctttatcttaaaaattcttactgtgttctaaaggcagtgaattaactaactatccatttatcacaacagttagaagaagggcaagtgaaaatgcaatcaagattggaggaagaagaagaagccaaagcagctctaatgagcagaatccaaaagcttaccaagctcatactagtctctaccaagaattctattcctggatattcgggtgacatacctactcatcagcgcagtctctctgcgggtaaagatgatgtaagttttttgctccaaccagtgatacaatctaattgaaaaattcttgctatttcaaataatcggttttagtgattctgttagttatttaatcgatcctggctgtgtagttttggaataataggttttgatgatttaacctgaataagtttctgttttgtttgttcaaagcttcttgtctctggaccatgtaattgaaaatctatctgttccttatttttcttctgctgcaggttgcttccacatctcagaagctgtttcaaaacacaatgactaattatgttatctctttgcttttcagaaattcgattctctactgttggaaagtgataatctgggatctccatcttcgaccttagctcttctatcagaaggttctttaggttttaaccacaggcgatcttctagcaagttgaatgacgaaaactcgccgggtgcagaatttactcaagtgagtaaattaccccaacgtttctgttgactgttagaaaaatggtatctgattgttgtgtggcttgtggcgttttgtagggtgtcatgacgccggacgaaatcgaccttctggttgaacaagttaagatgcttgctggtgagatagctttcagtacgagcacactaaagcgtttggtggatcagtccgtaaatgatccggaaaactcacaaactcaggtaacatagtagtactgtccacctgaagtggcacatttaacttattcttaactaactaacctaagaaattattgcatgcagatacagaatctggaacgcgagattcacgaaaagcaaaggcaaatgagaggcttggaacagctcataattgagagtggtgaagcttccattgccaacgcatcattagttgagatgcaacaggtatttaacctccacatctcattcacggcgagaacatgatggttgaccttttcaaagtcactggtttaagactaaacgatgatctgctctgatatcttgctcttttgttgttttcagaaagttatgagtctgatgacccagtgcaatgagaagagctttgagctggaggtgaatttttatttttatttttattgaaagtaccgccttgttttctacattatcaaaatcagaagattgattatcttcaccgtatgcttaaacttggttctacccctgtcacagatcaaatcagctgataattgcattctccaagaacaactacaggaaaaggtcggtacatgtttttctcgtattgaagtcgtgcacaattctcttctttttactccattcttcttgcttatatctaattcatcctttgaacattgttctgcgaaaaaatgcttcttatcacacttgctccaacaatgcagtgtaccgagaacaaagaactacatgaaaaggtgaatcttctagagcaacgcttgaatgcagtatctagtgagaaatcctctccatcttgttccaataaagcggtatctggagagtatgcagacgaactaaaaaagaaaatacaatcgcaggtaaatttataaacatacattctcagttctcacaagtatcccagtaaatacctctgcggatcaataaatatcaagtaacatagatttatgcatttatttgtaaatctgatcctcccttaatgctaacataaatctcattcttacgtggatgtttatgttttgtatttaggaaattgagaacgaagagttgaagctagaacacgtgcaaatcgtggaagagaacagtgggttacgagtacaaaatcaaaaactagctgaagaagcttcatatgctaaggagttagcctctgcggctgctgttgagctgaaaaatcttgctagcgaagtaacaaaactctcactacaaaacacaaagctagaaaaagaattagcagctgcaagagacttggctcaaacgcgtaaccccatgaacggagttaatcgcaagtataacgatggggcaaggtcaggaagaaagggaaggatttcctcaagtaggtcaagtggagatgagtttgacgcatggaatctagacccagaagatcttaaaatggagttgcaagtaaggaaacaacgagaagtggctcttgagtctgcattggcagagaaagagtttatagaagatgaatacaggaaaaaagcagaagaggcaaagcgaagagaggaagctttagaaaacgatttggcaaacatgtgggtacttgttgccaagttgaagaaagacaatggtgcattgcctgaacccaatggcactgaccctggaagagaattagagaagagtcaaagccatgcggttctgaaagagagacaagtctcgagtgcaccgagacaacctgaagtagtagtagtagctaaaaccgaagagacaccaaaagaggaaccactcgttgctcgtctcaaggtaaatgtaatgagatgagttttctacatttacctgtgaaacagtcttttctttcaaatatcattaacaagattttgctgtaataatgagacaggcacgaatgcaagaaatgaaagagaaagagatgaaatcgcaagcgaatggagacgcaaactctcacatttgtaaagtatgtttcgaatctcccactgcggcaattctactcccttgccgtcatttctgctgtaagtcacaacttcatctccatgaaacctcatgtctcttcttttatcaaagagttgtattaaaaagatgaaaatctctgattcattgttacagtatgtaaatcctgttcccttgcttgctctgaatgcccaatttgccgcacaaagatctctgatcggctctttgcgtttccgtcttaaccagttgaaaaggtaacctttctagcaagtggatgcgtcttttatgttacattccattttaggtttagtaaatgtagaaatcaaattgaagctaaaaactgagtttggattgtctatcacaactgtatatgagaaactcaaagttaaagtttggtttttgatatgtagaaaacaaaagctgacttacccaattctttaagctttttaggttcagtgtttggattaattattggttagatttattcttagtgtcaacccgattaaacactaatattatgatcaatatcagatgttaaaacagatcagataagacttaaaaaaaagatgtaaatattgattaacttgcatgattatgcaggtctctaagaactgtgggtgaagcctgttgctaaatattttggggagagaacaggttgggatttttaaaggaattagttttgtatgtaattttatgtccatcagtctatgcttatattttgatatttatcattaaaaatgggggaatcggaaaaatcaaacatatacgtaataccaaacttttctgttaccaaaaaaaaagaaaaaaaaaaaagattggagcaaactctttaatttttctcgtttgaggtcgcttattcagagcgaggcaccaacaaaagaatgccgtaaaactactacaaaatccaaaaattgattgttttcttccttttttttttccttaagaactttgatatttagaagttttattttaccgtaatcactatttaattacaatttcaaaattttaccgtaatcactatttaattacaatttcaaaaagaaatattaatatatcattttgatgagtaataatcctaagattaatcaataaggggagaaaaataaaaggtgcggtgataggaaaagttgatgctttgattatctccctacttaatgtgggggtggggcgatcagtattcttccaaaatgattatttgaagatcacaacgcaataagtgttataaaacatcttatattatataattatcaaaaattatacaaagaacaaaacaaaaaaaacatataaaatttagtatgtttatatatttagtataaacatataaataatgtcatctttatataaatttaatatcaaacaaaataaaagaaaaaaccaaaaaaccttttaaaaatctaaattaaaaacttggttactaaaatctacataaagatgatatgaaaacaagttgaatgtttggaatcactaacaaccgaagcttgatccaaaatccggttagtttcatatatctttttgtaaatttagtatcaaacaaaataaaataaaaaaaccaaaaaaaactttaaaaatttcaaagaaaaaactttgattctaatctgtataaagatgatatgaaaacaagttgaatgtttggaatcgctaacaaccgaagctggaaccaaaatccggttagtttcatatatctttttgtaaatttagtatcaaacaaaataaaagaaaaaaaaccaaaaaacttttaaaaatccgaataaaaaactttgataccaaatctatataaggatgatatgaaaacaagttgaatatttggaatcactaacgaccgaagctggatccaaaatccggttagtttcatatatctttttgtaaatttagtatcaaacaaaataaaggaaaaaaatcaaaaaaagtttttaaaatccgaataagaaacttcgataccaaatctatataaagatgatatgaaaacaagttgaatatttggaatcactaacgaccgaagctggatcaaaaatccggttaatttcatatatctttttgtaaatttagtatcaaacaaaataaaacaaaaaaaaacaaaaaagctttaaaaaatccgaataagaaactttgataccaaatatatataaagatgatatgaaaacaagttgaatatttgaaatcactaacgaccgaagctggatccaaaatccggttagtttttatttacatctctttatgtagattcagtataaaaataaataaaattaaacataaaaaaaatcttttaaaagtaaaaatcttttattacagaaaaagaaaattaggaaagcacaaaccttggttctcgctggtgatcatgattatggatcgatcgatgaaacacaaattcgtctgcttcctccgcagtcgaattgtagttttaaagccaaagaatctgccaactggtcgtcaatttcactatccctctcttggccatcgtccttctccgtcgtgtaatcatatccttcgccgccgttgaaagaatccttgggtgaaagcgtttcggtggcgagatctttgatcgtgtgaaattagggagtcacgaactaaaaagtgaactcgattgattgaagattgttgtcacgagagaaggaaagcacatcagtgatcagtctcgcagggaaattgcaggtaaaaaaagaaagaagaagaagaagaagaagaagaagaagaagatcaaagatggtattttggtttttgatttctcaacgaagaagaagaaacgagagttggagtatttatcagcaaacgctccattgaaaaaaaaggaaattgtctcctttattatgttttgcgaagaaaaggaaattgatcaaggtaacaaaaagtcaaattaagttaccgttacaagaataaatatgtttcttctgtaatttatatgatgtttaaaatttagagcgattgttgaaagagatggaaacatcaacaaaacaagccttgtaaagtaacacaaatctataaaagtcaaacctagtcatctattagcataatgctcggaacagaatgaaaaatatgccactagcacaatcttactcaatcatatatagttgttcttactatttttatttgttattgctctgagtagagcgagagagtagagtccactttcattttcagtcgtaatcgtttctttgattttcaacacacattgtaattattagttaatatttatgttaatttgattagaagtttttaatacatgtcaagatctaataaatcaaatatatacctaatatagttaccaaaaagaaaagttaagaaaaaatatatatatatatatatatatatatatattcatgattagtatatataaatatactttaaaaaaatagtttttctatttcgagaattatatatatatatatatatatatcccttatttctattttatatataggttttattattaaagaaccctagtcgtgtattttcttaacaacaatttagctacatgtaaaccgccgctatggagtccaatataggaacaccggacgagacgtcaaagcatcctccacggcctccgtcttcgtttttatcactaccggaggatattgttttgagcagcttggctcgtatcgatatcgtactacccaaagctctctcttgtctccaagagcttccgctcgttggtcctctcagacttactctatgaggtacgaagcgaacttcaaactcaagaagaatgtgtttatctcggcctacaaccgcccaacaaacgttgtcccatctggtttagtctctggataaaacctgatgatcaaacccttaaccaatattgcaacattcaagaaaagtctactagaaatttattggtaccagttccatcttcctatactcctttcccaccaaatttaatatgcgcagaggttggctcagaaatttacacggtcggcagccatatatatcatgcgatgtgggtccataatgagctgactggcaacggtcgtaaagcccctagcatgatggtgggtcgcatggaaccccatgtatgcgttctcggtgagaaaatatatgtaatgggaggttgtcgaccagatgaatcaacgaattgggctgaggttttcgacccaaagactcaaacttgggaacctttaccggaccctggcccctgaggtccggctctctttaaataaaaagatcttaccgatggatggaaatatttgtgtgacgatcaagaagaagaatgtggagagcaagaagaagaagaagaatgtagagagcaagaacaagaagaaggacttcgtttaccttttaaaagaaaaaaaatgggaagttgtcaaggatcactcaagcttggtggagaaatattgtgtcatagagaatgtagaatacacttatgcggataaaagatgttggtggatggaaacaacgtcgtcagaagagtcgtcagaagagtggagattggtcaacggtttgactggacttgatgcgtacgttataaatgatactgaattttgtacttatggtggaaagcttctactcttttgggacagtcctgccttgtctcctcttgatcaaaccaagaaaatttggtgtgctgtgattttgcttgacaagagtctcaatgatgaagtttcgggtcagattgagtgggctgatgttgttcttacagtccctgtgtcctatacactctgggattgtgtgaaattctcgacatactcaacaatatgctttccagttttgtttttcaatacacaaacacacacctagtctggtgttttttaatccaaaagttatgatactacattgtattagtttacgattttatttttaaaaagttcacagtttttagtgttggagctctgttttctcaaagtggtgccaggcactgtttgactaaaatttcggctaatcccttacggaatgtcattgattcatatcgatttcaaatacgtatccagatcttcttcatctgttacagtgtatagatatcaatacaacaaatacctgaaattaaattcaaagaaaaagaaactaagattaaaagaggattggttgacaaaataaatttaaaatcataatgtgagataaatatagaaacaacaatactaaaaaacgaaaacaacaagttggtttggattcatgattacaaaccccaacttataaaaaaaagactataattcgacagaaataagttcaagagaagggtttgtgatcccaaaacccttgatgatggaattgtgaagaaccatcataaaccctataagactcactgttattgttattagtaataatgttatcctcataggagacacaagaagggtgttcaagcaaatcctccactctccaacccggtaatgtctccatcaaatactcggatatactacctgtacaacccgatcccgaccccgaatcgctcacgtgatggtagttttcttctatcccataatagcaattgctcgtggtcgtcgaagaagagctcgtaaatacctcattggaggccgagctcgggacctcgctcgatactgattttggtcgggttttggctcgaccaaatgcagcagcagagttggaattggaggctcttgggtaggctgacggggaggcagagatcttaacgccggtaaggaggaatctattgtgtttcttagtgtgctcattagcttgatgtattggaatgtcacattctctgcatagtattgctctgtcttcttggcaaaataataatgcacgcctctcctgtcatatgtataaaggtttagtaccatttaataatagataatcaagaagactcttgttttgtatccatctattttaaaacatacttatctgctagatttgaccttttcaaacaaaaaacattccattttattgttttattttatttaatgaacagcaaaaagaaatatccttttctccacggcttaccttcccaaagaagaaagtattttaatatcgtaataactaataactcgatttaattggttaatatcttaagtttgattagtgtgtaaccaaataaatcaccaaggtgtttggtaagctcaatctctgttctctttttgagaaaagtaatatttggtcgtggccataaaattcctcgtcaaaaattgtgtgaaacctcaaatttgctaggaaaggaagtaaacttgttgccaaataatcattttctcaccaaccaacaaacaaatctcggaaagaaagaagaaaaaaaaagtgactcaggtcacccgaaacatccgttcatgaaaccagatttccatcaatactataacatatctaaaagctcacaaattttccaagtgaagattataattctatcaagaaaggcaaaaaaaaagagagaagtgttaaattttgttgttacgtaccccgcaaatatcacaaagaggagcatctttgaaagtaggagaagtgagagagaaccggagatgtttcccggctagtttattggcgaaatgaacatggcgatcgcaaccattacaaagagctgcttcatccgcacaacaaaacaccgaagcttcttctttatcacaaacagcacaccaaatcttcatctttctattttctttcctctctgtattacaaaaataactttattttttattgtttcttgaatataacaaaattgcttcttctcactctctccctcaacttgtacctttggaccagtactatatagtagtgtttatgtagagacactcatgtgggtgagtgtatgtagaggttgatggggtataagtgtgggcaaaagggtaagaataatgtgttggctttatagataagcagcttaggtttcctttgtcttttttaactccttcctctcattttcttgatttgatagctactctctcctttgctttcaatgcccccaaattgacttgttttggttttggtttcacacccggtttgatctggtttagaattcagggaacttaaacaaaagcataccgggtatgtaagtcaattagtatacgttttaatcacaaattacattaaatttcggtttcatagaaggaggcagatattataattgataggaacttgacggtagtactagtatgattaagttagttaatttttgtttcatttaataacactgagaactattaattggtagttaagctcatttgtttctttagtttaaatgagtcttaaactcttaatgctttagaaaaatattatgtaatttatacgaatgtaaggaaaaacaaaaatgatgaatcagtttaattgtttcttttatattaccgaaataggtaaagaggcctagaagtgggaacttttaaggctcttatggaagaaaaagtgcaaaagtggaatttaatagtacaatctttttggtctaaaattcatctttttagtcagatgctagttaatctaattaatagaaacgacaaaaaaatcgaaataaaaactaattaaagaaatggaaaaggtgggggaactttgagaaatggccagctcttcatgccagcttttgtcttccatcatccatgtgtatatctacttccttttttttttttttttacctcaataaataaatatcgccgctctttttttttatatagattttatgtgtattagttgaacaaatagtataaattattgaatggcaaatccattttccaatcttcttcatacactcaacaaacactgccatgtatttgatattggtttcggtataaacctaaccaaccatagcttatttaaaaaccatagctttatgaacttcaatttattcttacagattttggttcagtttctattccggtggtttgtatcggttctgtctaacttgattgaaaatggtacaatatgctgtaatcgttataaagtggccttaatgaccgttgagaattgagatttagacatgatctaattgtattaacaggctagacatgatcatcgcttgttcatgtatctttttaatgaatgaaatttcttaaatgttctcgtagtaatcccaataaccaaacatactcgtattaatataagctttgcggtcatgtcggccatattgttcgaatttaaatgagtttttttttggtataataaacgctgaatacttttgatataaaataagtagagtggatctgatcttttgaagaataataattttagataatatataatttatgaggaagaagacgacaaaaaacacttttagaggaagaagatatggatgatctctctcgattctcgaatctttcccctcgttacttattttttttttgtcaacttcccttcttgcattaaaaatctatacattcattttgactgactctttgaagaaaatttttaagaatttttgagtttgggtttcaacgaagtaacttcgtcaggacttggtactaaaaaacgatattgttgatctcatttttttttttttttatccaagctgctgcgtggaatcatatcgtcttttggtttgcatttgatgtacataaagaaaaacaaacaaaccaggtaacaaatcgttttcaaagaaaaaaaagaaaaggttctttgcgtgattttaaaagagatcaaattttttatataatatttgtagatcttgagtcacatggatgtactactggactttttgaaaaggttcttcgtgcactttttagacattccttcttataaaatagtatgcatgggacctttaccaattaactactaccatcaattattcatcgatggactccaattaatttcaaatttgtttccatatttttgtgtaacctaacaaaatccaatcattcatcgatatatcactgtccttgttttgtgttaaataatgctaatttgctctgctaattgactattcttcgatttcgatatctattttcttgttaccaagtttaatctcgaattgtcacattaattttcatatttttgatcagtcggtgcgtcaatttttgtgagcggagtattaattatatcgtttgtctttgtctttgtcttaaatccaacaatgggttcgtggaccatttcctgacatgtttattgcttctttcaatcatgtccgtccaaatcccgtagatctcagtgtatattaatacgtacaatcccactttagcttttatttctgtcttcaaaggaaaataagaaaaagaaaaaatcgtatgagagcttttgtggtccaaattgtgactaatttttttgaaaatacgtttgtgtttacgttatatacacatttacgatttacatctccaattgttatatgctttcttgaaatttcgaccgggatattatatgccttgtccaagaaaaaagaaagagagacctgaatcttggaactaagttatttgggggtgtcactcatgggccaatattgggtccattttgaaaagcacatcactatttcaacccaattaatgagagtcccatactaacgctgatgttactattgtaccgaaccagttttgaagcccattaaaagcccaatacgaaagtacgtttgtaaatttgggagcccaagaggggtaaatatggaataaaaaatacgcgatgtggacaaaataatttacagctactatctctcctccgtcttggcttcgtggtggtctctctgacattatcgtcagacaaataatttctaaatatctctcctctcctctcgtttgattccaaaaaaaaaagctcatcgacgaacgaacgatggcggaaagtggcggtggcggtggctgttgtccgccgatggatctgatgcgttcagagacgatgcaacttgttcagctcattgttcccatggaatctgctcatctcaccgtctcttaccttggagatcttggcctcgtccaattcaaagacgtccgtactcattctccttctctctatctctcgatgtttttgttgacgaaatatgctattggattgtgcattttcttatttccaattgcaaatccgcgtctgatgaacaattttcctctgttggatttggattttgacggggttttctggtctcgaatttggaaccctaggtttaattcaggttttaaaaagagtttacgcatctatctatctatgtatagctgttatttgaatatcgcgatcaattttgactttggcgtttggttgaaatatagattttcctcaccacagatctttttggtgaataactctcttcttataaacctttgttttttaatgttgatctcagcttaattcagagaagagcccatttcaacgtacttacgcagcacaggtacattcatgcttgtgtatctgttggaatttgtgatacaatgtttttcgtatatatgattacattacgagaaggtacatcgtacacggttgtgataatttggcttttgttttttgatggattaagattaaaagatgtggagaaatggcacggaaaatacgtttcttcagggatcaaatgtcaaaagcaggagttccagccaaggaaatgcaagggaaagaaaatgacattgacttggatgatgttgaggtaaaaatggggatccatgcttctcatttccatgccatgcttttcgttttctcacggatatacttttttcttccttctggcttgttaggtaaagcttggagagctagaagctgaacttgttgaaatcaatgctaataatgacaagttgcagcgctcctataatgagcttatggagtacaagttggttcttcagaaggtatatttatagttcatagatttgaagatgttatgtacgatttttggtatcagtggtatgttttgggtgatttgatttgcaatcaactttgaatttgtttttttttttttttttacaatatggaaaagttaagatactaagtctatcccacgataggtaatgtttgattaagagaaatcataagagtatgaggatttttatggtagttagtaggtttttaattttatggttaaattggttgtgcatcttgagcttatttatctgaatgtgatctttcaggctggtgagttcttttcttctgctcatagaagtgccgcagatcaacagagagagacagaatcacaacaagcgggtgaagatctgctggagtctcctttgttacaggaagtatgaaaaaggcaactgttctcatgcttaaagtttttgtaatttcttatttagttaccaacagtcacaatagtttcttttaaacaggagaagtccattgattcgacaaagcaagtaaagcttggatttcttaccggattagtgcctcgtgaaaagtctatggtctttgagaggattctgttccgtgcgaccaggggcaacatttttatccgacagactgtcattgaggagccagtcattgatcccaactctggggagaaggtcagatgcttctgctttcctcttgaattctcttagacataggaggcaagctcttatactgataggagtccagttactttctttccttctctaatttctgctctcatatatatatacatgctagatatttaaaatatgaaactgtctatgcggctttaatactttccacctgttagtgttgcatctatctatattttgtcgatgtacagagccaggactttcttgaacatggaaggctgatctggttagaaaagaaatatacttttctgtgtatccattggagttgacttcgaacttataaatattgcaggctgagaaaaatgtttttgttgtcttctattccggggaaagagcgaaaagcaaaattctgaaaatatgtgaagcttttggggccaatcgttatcctttcagtgaggaccttggaagacaagctcagatgataaccgaggtatgtattatcattcttgttcatgttcttagtgggaggtgtagtaaatatttattattgtttgttgtcatagacccttacttccctggatattttttctttgtacacggctttcttttgacatgagtcatacttactaacaggatttttgtattcgtttgcactcagatgtccaataaacgctaatccatgagaatataatgttttgacttttgatcattgatgttctgaattagttagaaatcgtttagcatccatgtcatgatgcatcttaggctagcaattttatgatgatactgtaagctcagaaactgtttgccatgtttaacttcttcacaatgtttcaggtttctggtcgattatccgagcttaaaaccacgatagatgctgggttaggtcagcgtaacattcttttgcagaccattggagataagtttgaactatggaacctcaaggtattatcctatgtggatcaatgttggggagtgttgacctattatttccactccatacaagatgacgtcaactatttatttaccctttgcaggtacgcaaagagaaagctatctatcatacattgaacatgcttagtcttgatgtgacgaagaagtgcctcgtggccgagggctggagtcctgtctttgcatcaagagaagtgagttgttcattttgttgcactgtcaattgcaatattgaataacacattccttgactgtgagtttattgtttttttatcgtttacttagtataatggggttttgttgtgcagattcaagatgcattacagcgtgccgccgttgactccaattctcaagttggatcaattttccaggtcctaagaaccaaagagtcgccaccaacttattttcgcacaaacaaatttacttctgcaatccaggaaattgttgatgcgtatgggtaagtgtctttctggagcttttgacgcagtttaagaaacgggaaattgaagatagcctttgaattataagaaaatgtgttgtagactgcgttttactcttgtcacagtttcctatgaactctactctgcagtgtggccaagtatcaggaagccaatccaggtgtattcaccattgttaccttccccttccttttcgctgttatgtttggtgattgggggcatggaatatgcattctgcttgcaactatgtacttgatattgaaagaaaagaaacttgccagccaggtaataatactccaactgatgtcacttacgagtgttaacacgcgagattgaaatctgtctcatcagcagaacttgcttataatttagctgtttgttttactatagagttgcatgcaaatatgaaagaatgggaaattcacttgacgtttctaaagatcagattagtctgttgcattttgatgttttgtgcttacaagttctagatgctaacctcttcaatcgttgcttcctgacaacagaaacttggggatattatggaaatggcttttggtgggcgttatgtcattttgatgatgtcactcttctcaatatacactggattaatctacaacgagttcttctctataccattcccattgtttgctccttcagcgtatgattgccgggatgtctcttgcaggtattcaggctacttctaataattcaggtttttaaatgaaaaagcatattagtagaacaattgtaggaatatctttacggttctgatttttttttattttttttttccgttttcttctctttgttcagcgaagctacaacaattggtttgataaaggtcagagacacttatccatttggtctagatcctgtgtggcatggatcccgcagtgagctgccattcctgaactcgctgaagatgaaaatgtcaatccttctcggagtttctcaaatgaacctcggaatcataatgagctactttaatgctagattcttcaaatcaagtgtaaatatatggtgggttcagttgatattttctgaccatagcgtgctctctctctctccagttccttaaacagtaaaaatcagtcatcatctcagcatctaattttgcgggcttgcaggttccagttcattccccaaatgatattcttgaacagcttgtttggctatctctcagtcctcatcatcataaagtggtgcactggttctcaagcagatttgtatcatgtaatgatatatatgttcctgagcccaatggacgagttaggagagaatcaactgttccctcaccagaaaacattacaggttagtatctctacgtagccgttgctcttacgacgagatctagaaaagcatgccatatgctttggttcactcatccctttccttgccattttcagcttgtgcttctctttctggctcttgtttctgttccgtgtatgttgcttccaaagccgttcatcttgaagaaacaacatgaagctgtgagattctttccttttcccttttttgagtttctttataaggtcgtgtttatttcttctttgctgatcgtccttaagggtttgcttctccagaggcatcaaggccaggcgtacgcacctcttgacgagacagatgagagtcttcatgtagagacaaacggaggaggatcccatgggcatgaggagtttgaattcagcgagatatttgtgcatcagctgattcacaccatagagtttgtgcttggagctgtttccaacaccgcttcttacctgcgtctatgggctctcaggtatgagtagtagaagctatacatgaattacataacctatactcgtggcttaatatccattcttttgtttcagtcttgcccactcggagctgtcatcagtcttctatgagaaggtcctccttctcgcttgggggtatgcattcattgatccatctctctctctctcttttttccccctaaatctatctccatctttggtctaacatgtctaatcttttcgtgtctcgttggcactaacaacgaaacagttacaacaatccgttgatcctgatcgttggggtcttggtgttcatattcgcaaccgtgggagttttgctggtgatggagacactaagcgcgttccttcacgcgctgcgtcttcactgggttgagtttcagaacaaattctacgaaggagatggttacaagttcgctcctttcactttcattttcacggcaaacgaagacgagtgatgtgattcattcctctcatcctctgcattttgcatatataaggtacaaaaaacatgtttgatttctttctattaaaatccaatatattttttccccttctctccgtataagggtcaattaaatttatttatttgcctgtggagataaatttttaccataaaaaatgaggggatacttggatctgtacgaggcataaaaacgatttgttgttgttgtttgtttggaattaaataatacgctgtggatatgaataaagtcaggaattggaccttcccaacatgtatatgttttttcaggccgtgggactatataatggcccagtaatgatcttttattatcccattattacattgctgtttgtttaaaactaaatgcactctgtcgtttaagcagcacatgcacgccgttttattatttacaaaaatatatcaaatatattttattgagttattccacgtaagctattatcaagggtccgagtttgagcccatataaagtgataatagtttaaaaaggctcattttaacggcccagtgtcgattaaacatatattaggcctaagtaaattgttacttaatagaaacgctcatttaacggccctgaatcgattaaacttcatatattaggcccagagaaactgatatttgttagaaaggttcatttaacggcccagtctcgattaaacttttatatactagccccagatcaactgatactttttaaaaaggctcatttaacggaccagtccattatattgagcccaggtaaactgattaaaacggctcatttaacggcccagacttgattaaactttcatatattaggcccagatgaactgatacttgataaaaaggctcattaaacggcccagactcaatttaactttcatatattgggccataaactgatacttgttaaagtgggctcattgctaatgagcattgtacggttttgctcaatagaacgcattttatttacaagcaagaagcagagataaatagagagagtcagcagcgcaaagagagctcgctcatacaaatcaccaaagtaattaaaacttattgacgagatgcttaatgggcggtggttgagacggtggctgcaacagtggagaccatactgtcaacaccacaaatgttacggcctttgcagattttgtagaaaccattttcaccccaagtctctccccacgagttcttgatgatccagtaaggcttctccttgaacctagccggagcgtaacctgccgctccatagccaaccaataagacaccgtggttgagcctcctggtgcatatgtaagggcatgagactcctccaatgtaagtctgcatatagccagcgttgatggctacagcaagaggtccgttcttgacaaggtttgcagcaatctgttcttcatcaatggagataacactgaagttggagacagaggcaacgatcttggacttgtctagcttgcaggtcttgccgtcctttccggtgtaaggatagtcttcttctttcatgagccctccggttttgagggtgtattcaaaagcgctgttcattagcccaccattgcaaccagagtcgcaggaatctgcctcctcgggatcacactgcataaggagatgatagcaacaattatcagattagtttcacagagatcatgttaaccattatggtcatattatgaatcttccctaggcactgacgagaaacaagatcattaaaagtaagcaacctgaactaagtagtgagttttatcatctcaacatatccggagagaactgtgaatatctaggataacatattgattgataagtgatcaaacatcaacacagtcatgttcagtgtccttcaaactcatcccaagactcaagagaaagaaaagacaaacctcgtgatcacagtcgacgagctgttgttcgctgaggctgacgagtttgccggtagcgaggaagttagcaccttccaaagctccagtggcgctgaaactccagcaagagccgcaagatccctaatttgtacaccaggattagaccaaatcagcacaaagaaacgaattgaagtttgatccagagtcaacgaattcgataagacatcaatttgcgacatcatcgagtaaaatacctgatttttgacgggagtaacggcgccatgatctctccaatcaaaatcctcagggagattttcggtagggagaatcggagccttgttggcatctttaggaagcttaaagccacttctaacccccaagtgcttcttacggaactcagaccgagtcagatctgagaactgcgtaacaccatgagtcgccgacggatccaacttctggtgacgcctcgctcgcctgagattcgctttgaaaaccgagaatctatagtcatgctcctcgttggaagcgtagaccttcccgaacttccgcttgaagagagaaaagtgatcctctgaggtcaaaacctgaggctcggctccaccaaccacctgacggatcacgagatcatcgccgtcgttgacatcagacgacgaaaccgagacgataaagaaagacaaaacgaaaacggagaaataaagcttaagacgatccatttgatttgcaattagattgaaggaagcagagaaggattaatatagatagaaccctcagtagattatcacacgcaacgtgaatgtataggtgtatgtataggtctctgctacacgtctttttccctttggagattagctttcggtttcttttaagataattttaaaagatattgttgtcatcattattatagtcggagaaaaaatcggaagatatttatggtatttattattattttaagatgccttatccaaggggaaaggagagagttaaccaatgatgtagaaccacgtgttaatcattgaatgggtatggagtaatggaatgggataggttcaacttgttgttagcagtgccgtgttgtcttggataatattaattctctcttttctaaaaactttaaaaaatagttctatcttcctctttttctgagacaaatgtagaagctcatgatcggtagttgccatgtttctcttctctgattcatttatttatgttcccagtgtactaaaaataatttgtaatgtaattttattgatttttagtgtacctcctggtttttggctgtactttgaaccaaattatgaagacacgatgatcaaatatgtctctttgaatatgcgttttagaattaataaagaatgaaaaactaataaagaatgaagggtttctagagttcacaatgaaaacaaacaaataaggaaccaacactctctttgtttgtttgtttgttttgttttcttattataaacaaaccattttacccaaattttatatgtgacaactaaaggagatgagaaaccaccatacgctatacatataaattatacaacaatcaagccaacaaacctaaaccctcattttttaagaaagaaaaaactagagagggaaagaaaacaaaaccacctttgtagattacacgattgatactcagactcaccaaccagatatctatagcctttacaagtttatgttaacctggtcgcttagtgtgtttgttcttcgatttagttacctccaggctgcgctttccattcacctgttagttaggacaaaacatttcacaaggttgtctttgaccttaatgacacatatactttgggtttatgtgtttattctgccttaagttggtatattttatcagtccaagagcttacaattgttggcaaggctagctttatatgtggaacgaacggtcaacttaaataccttaaatttattcaagcctatttgcaacgggtttgaccatccctcaaaaactaaagatattttctgaaatgagaaatagagaaataccttagcatctctgttattggaagttgaattagagttgtgcaaattctgctgttgtggggaacactcttcgcagtagaagttatctggctttttagcttcctctattgttgttcctatacaagaaggatgaaacctgagccaatgttagtttgctgtaacatcaaaggcaactgacaaagacattcgaaacaaaaaaccttaatcctctctttacaaaaaaaaaagtaaaaagattaagcttaacacttaacagttccaacttccaagatcaaacgatcactatttgtttcagtatgacttcatttacgttacttgtgtcatatagcaagctaacatgggtgaaagacccaaggcacaaactaagaagctgcagaaaaacccaaaccttaacagcgactcaatcagtaacgtgtaagaaaatttgaaaatccgcaacatatacattagaatgttaatcacagatattacaaacgttcagactagagtatcagcttatgttcctattcatctgcagtttccacaatatcagataagacaaaacatgaacatgagtaaggaagagcatcaccgaagtaaagcatgacaaaagcattcatctcaagcaacctcaatagcatatcaactaggacctcatggatacacgaaaaacatacgagcaattccagattgtgactcaagaagattaaaacagagtttcaaataagtgaacacttaccactcagaacactcctcgcattgcaccatcaagtcatctgggttatacggcatctcacacttgcagaacctgcaaacagaaaaaatcaatttaaactcaattgattacttctctttgcaaaaacaacttcatgaaaccaatttagatgacaaatcaatgaattattaacaatcaatgcctacactaaagcaacacaatctaatttccaaaaaagcctcaattcaaccgataatagttccatcattcaatcagtattttcttctcgaataaagtaacagagagtcgtaggaacacatacacggtgactctgtcaggatcaaacgcgccggtagtggaattgtactcgaaacgacagaagaagtcgtcgtttccaacagagtcaagtttggtgtagctactgaaactgtgaaccttacactttccttcaatcgtatcggcgctttgaaaatcgaagtggtcagagagaaaaacctccttggctccatggaattgtctcctccctccgatagattcctcagggcgataataccacctcacacgaactttcgcgtgcgatccacgcgcgtccgtctcgatcgcctctaccctcgctacgtacgacggttttccaggctccgacgaccgcatcaacacagcatctccctctttttaaccacaaaacaacatcgaacgattcactttcaatatccacgaatttcaaattgaggatgaacaagtcagacgtaccttgaatactcttgttgatgtgtttgagtttataggacttgagctgcttccttggagctttttgcttgggcatctgaaactgaaaggtgagtaatggacgatgatgaagctcaaggtttttgcgaacagtttttctcaatgaatacagtcaagaatcatcaatcgcatgtctcgcggagtacggtaagaacaagtcatgaggatctcaggagcgtatgattgggtgtacaatggcaggatcgtgaatatagaggaaagaaagggagaaaatgggtaaatagaatgtcagatagccaattgaccacgtcagcttttaagtggaagcgcgtgtgtgatacgcgcctctaggccgctcccttttgtcgtgaatcatgtaaaattagccacgtaagcaattactcattatgacttgtcctgactttgtctttgtgtgttgcatgttttcagataaataggaaatgctaaggaatattttaagaacctttcaattctatatttattcacttattattcaattctatgcgtacgtatgattacattcgaaaggatttccaacatttttgtcccaataagcaaattggaacaaacacatccaaatctacataatttgcgcaagaaaaaaagataaccacaaaaaaaagacataaaaacagtaaagaaaatcaaaaattggatatgaatgacgcccccacacactgaactgaagtttgtgttttcagtgttgggttgagaataaaaaccaaaggagctactaaataaattgagaaagtgtaagcttcttttttcctaagcaacacaaggtgaggaacagtgggtgctactagagacccttcgacaagggtagtttgagaaattcacattgctgttaatagctgcagaaaatgaagatgaagatgattgcttgttcttcttcttcctcttcttgtaagcctcatcatcatcatcgtcatcaaaagtttgggttggtttcttcagatcctcaaggcattttacatctgagatacatatgaatgatctcgcttttcctgaatagtaccttgataatcctctcctattttacaaccattcacaaaatccaaaattagatagtaatccggatttccataacttaaacaaacaatcataatcaatgaaatcctttttcaggattttactttttgggaaggttgtttcttagctctcccatatcaaaagccaacccacttatgttttccatgataatagatataagcgaggtaacaaaaacaaaataaaacaataatttgggtctctttggcttttgtgggaaaatttaagctattcatttctatatatacacataagaagagaaaaggaaagagaactcatttgcttaattgaagggaatggtttctatttctgggtttatgttttattttactttcatggttctcttactttttgcagaatctgtgactgaccctaatcttttctcacctatacttcctctcctacaaacacttgtgaagagtttgatatccaaacatttacgattgtgtatgtttacatatacacaatattgcaaggtttctacaatgattagatggaaaaattaatggctttccctgattagaaccaaactaacccatctaaagaaggaaatggtgtctatgattattaactaacagaggtcgtaaaccaaacactaaaattccattcaatgaatcaaagcttgaatccaatatataacaacacacaaaccattgagttccttttccttaatattactaattcaggttcaaatgtgacagctttaactagagtttacactagacaacaaagtacgagaataggttaccctttttttccaaagactatgggagaacgaacacattattccccagttaatgtttaggtactttcttagagaagagattcatttgcaaaaccagatgataaaaatttttttactctgaaacagatcttttctggtctactctgaaacagatgctcagagtccagactgtaaaaccaactttcttagaatacaaaaagagaactttttgtttcctgtgtgtacaaaatgatgtaaatttcaagtaagattcacacacacttatgtttcaatgtgaatttgtatttgtaagctaatattaacaactacaatgaaggaggataagtaaagtaaatgcagcagagcatttagaagtacacatacatacatatacatatccacccacaaaattacacttcatacaaaaaatatataaattttataaaatacaccaaaatatagaaatatcacacacatctccccgaccaccaccaaaaaaacatacaaagaaacaaatatatcaccttaaaaagtcaagttttttctattgcaattactgtttataacgacaaattcggtttggtgcattctttatgtccttttttaattatttatctgttagtttgtttttatcttccgttaaggttagcaaactgagtaaacatggctgttccagagtgttcatccacggccgtgccactgttctcttccaccttagcaggaaccggaacagtagccgcttcgttggtggtgactgagggagtgatcggagatggatcagacacaggcaccgagccaggtgtcaccacatcaggcttagcgttctcggtctcttctgctttgccctgagtgaatgcctcttgaagctgaagagcatactccaagttccacagaacatctcccattgttggcctatcgacaccgtagtcttctaaacacttctctgcagcttcagcaaacttcttcatcgattcaggattaatcgttccagccaaatgaggatcaatgatcttttcaagaagtccttttcgtttccattgcatcgcccattcagctaagttaacctgctctcttggtagctgaggattgatggctggtcttgcgcacagagcttctagaagaacgacaccaaaggaataaacatcggatttgtcggtaagttgttgtcttctaaagtactccgggtctaagtacccgaaacttcctttcacggccgtgctgacatggttttgtccaaaagctacatctttagaaagaccaaagtcagcgacttttgcaactaaagcttcatcgagaagaatgttggtggatttgacatcacggtggataatcccctgagctgttcctgtgtgtaagtagtgaagcccacgtgcagatccgatacatatctcgagtctttgtttccaggttagaggagcaaggttctttccatacaagtggtccctgaatggaccattggacatgaactcatagactaagatcatctcagagttctcgtcacagtaaccaatcaaggagaccaagtgtctgtgtctgagcttagaaagcatctggatctctgtctgaaactcagtgattccttgttcagactgtggattacctcttttgacagcgactttggttccatcgtcgagggttccaatgtagacgttaccgaatcctccaacaccgataatctgggatgcttcaaagttctttgtggcttcttgaagctctgaaagggagaaatagcggccgagaccaagtgttgagttgtagaagttggatttctgagaaccacctttgcttgtcatgaaagtgctatcaccagcatgtattggtagcaaccaagaggagaaactatttctcttctgccaatcttgtggcctcttcttccacttgtaaaccatggctcccagaccaatgaaagctccaaacatcatcacaaaccccgcggttgctaccataccatgcttccccatgccagtggttctaccatccactccaaactctccatcaaggctgttcacggaattgctcatcttcagaacctcaacaccgttcaagatcgcgtttttggtccctgtatcttctcccatgggaccaatctggacttggagctcagggcccataagtgttgcgttcacaacgatgtctttgtagtaaggagcagctagattcccagcgacagtggacaaatccagtccagaaatggcagttttcccgttaatgtacacattaaagtacaggtcattgagagacttgctaacgatatcacagaaatgaagccggataaggtagttaaacgatgggttggaggggaaattccaggagacgttaaaattagggtctatggtgagagaattagccatttctacagctgttgcataaaccgtctgtggagcaatcaaaggtgtaacttccggtgggtacttgattgccgaaggggttgttttaacgtcctttgccaagttctcatctttcaagaattc

SEQ ID NO: 687 - DNA, 89035 bp, Arabidopsis thaliana
aagcttaagacgatccatttgatttgcaattagattgaaggaagcagagaaggattaatatagatagaaccctcagtagattatcacacgcaacgtgaatgtataggtgtatgtataggtctctgctacacgtctttttccctttggagattagctttcggtttcttttaagataattttaaaagatattgttgtcatcattattatagtcggagaaaaaatcggaagatatttatggtatttattattattttaagatgccttatccaaggggaaaggagagagttaaccaatgatgtagaaccacgtgttaatcattgaatgggtatggagtaatggaatgggataggttcaacttgttgttagcagtgccgtgttgtcttggataatattaattctctcttttctaaaaactttaaaaaatagttctatcttcctctttttctgagacaaatgtagaagctcatgatcggtagttgccatgtttctcttctctgattcatttatttatgttcccagtgtactaaaaataatttgtaatgtaattttattgatttttagtgtacctcctggtttttggctgtactttgaaccaaattatgaagacacgatgatcaaatatgtctctttgaatatgcgttttagaattaataaagaatgaaaaactaataaagaatgaagggtttctagagttcacaatgaaaacaaacaaataaggaaccaacactctctttgtttgtttgtttgttttgttttcttattataaacaaaccattttacccaaattttatatgtgacaactaaaggagatgagaaaccaccatacgctatacatataaattatacaacaatcaagccaacaaacctaaaccctcattttttaagaaagaaaaaactagagagggaaagaaaacaaaaccacctttgtagattacacgattgatactcagactcaccaaccagatatctatagcctttacaagtttatgttaacctggtcgcttagtgtgtttgttcttcgatttagttacctccaggctgcgctttccattcacctgttagttaggacaaaacatttcacaaggttgtctttgaccttaatgacacatatactttgggtttatgtgtttattctgccttaagttggtatattttatcagtccaagagcttacaattgttggcaaggctagctttatatgtggaacgaacggtcaacttaaataccttaaatttattcaagcctatttgcaacgggtttgaccatccctcaaaaactaaagatattttctgaaatgagaaatagagaaataccttagcatctctgttattggaagttgaattagagttgtgcaaattctgctgttgtggggaacactcttcgcagtagaagttatctggctttttagcttcctctattgttgttcctatacaagaaggatgaaacctgagccaatgttagtttgctgtaacatcaaaggcaactgacaaagacattcgaaacaaaaaaccttaatcctctctttacaaaaaaaaaagtaaaaagattaagcttaacacttaacagttccaacttccaagatcaaacgatcactatttgtttcagtatgacttcatttacgttacttgtgtcatatagcaagctaacatgggtgaaagacccaaggcacaaactaagaagctgcagaaaaacccaaaccttaacagcgactcaatcagtaacgtgtaagaaaatttgaaaatccgcaacatatacattagaatgttaatcacagatattacaaacgttcagactagagtatcagcttatgttcctattcatctgcagtttccacaatatcagataagacaaaacatgaacatgagtaaggaagagcatcaccgaagtaaagcatgacaaaagcattcatctcaagcaacctcaatagcatatcaactaggacctcatggatacacgaaaaacatacgagcaattccagattgtgactcaagaagattaaaacagagtttcaaataagtgaacacttaccactcagaacactcctcgcattgcaccatcaagtcatctgggttatacggcatctcacacttgcagaacctgcaaacagaaaaaatcaatttaaactcaattgattacttctctttgcaaaaacaacttcatgaaaccaatttagatgacaaatcaatgaattattaacaatcaatgcctacactaaagcaacacaatctaatttccaaaaaagcctcaattcaaccgataatagttccatcattcaatcagtattttcttctcgaataaagtaacagagagtcgtaggaacacatacacggtgactctgtcaggatcaaacgcgccggtagtggaattgtactcgaaacgacagaagaagtcgtcgtttccaacagagtcaagtttggtgtagctactgaaactgtgaaccttacactttccttcaatcgtatcggcgctttgaaaatcgaagtggtcagagagaaaaacctccttggctccatggaattgtctcctccctccgatagattcctcagggcgataataccacctcacacgaactttcgcgtgcgatccacgcgcgtccgtctcgatcgcctctaccctcgctacgtacgacggttttccaggctccgacgaccgcatcaacacagcatctccctctttttaaccacaaaacaacatcgaacgattcactttcaatatccacgaatttcaaattgaggatgaacaagtcagacgtaccttgaatactcttgttgatgtgtttgagtttataggacttgagctgcttccttggagctttttgcttgggcatctgaaactgaaaggtgagtaatggacgatgatgaagctcaaggtttttgcgaacagtttttctcaatgaatacagtcaagaatcatcaatcgcatgtctcgcggagtacggtaagaacaagtcatgaggatctcaggagcgtatgattgggtgtacaatggcaggatcgtgaatatagaggaaagaaagggagaaaatgggtaaatagaatgtcagatagccaattgaccacgtcagcttttaagtggaagcgcgtgtgtgatacgcgcctctaggccgctcccttttgtcgtgaatcatgtaaaattagccacgtaagcaattactcattatgacttgtcctgactttgtctttgtgtgttgcatgttttcagataaataggaaatgctaaggaatattttaagaacctttcaattctatatttattcacttattattcaattctatgcgtacgtatgattacattcgaaaggatttccaacatttttgtcccaataagcaaattggaacaaacacatccaaatctacataatttgcgcaagaaaaaaagataaccacaaaaaaaagacataaaaacagtaaagaaaatcaaaaattggatatgaatgacgcccccacacactgaactgaagtttgtgttttcagtgttgggttgagaataaaaaccaaaggagctactaaataaattgagaaagtgtaagcttcttttttcctaagcaacacaaggtgaggaacagtgggtgctactagagacccttcgacaagggtagtttgagaaattcacattgctgttaatagctgcagaaaatgaagatgaagatgattgcttgttcttcttcttcctcttcttgtaagcctcatcatcatcatcgtcatcaaaagtttgggttggtttcttcagatcctcaaggcattttacatctgagatacatatgaatgatctcgcttttcctgaatagtaccttgataatcctctcctattttacaaccattcacaaaatccaaaattagatagtaatccggatttccataacttaaacaaacaatcataatcaatgaaatcctttttcaggattttactttttgggaaggttgtttcttagctctcccatatcaaaagccaacccacttatgttttccatgataatagatataagcgaggtaacaaaaacaaaataaaacaataatttgggtctctttggcttttgtgggaaaatttaagctattcatttctatatatacacataagaagagaaaaggaaagagaactcatttgcttaattgaagggaatggtttctatttctgggtttatgttttattttactttcatggttctcttactttttgcagaatctgtgactgaccctaatcttttctcacctatacttcctctcctacaaacacttgtgaagagtttgatatccaaacatttacgattgtgtatgtttacatatacacaatattgcaaggtttctacaatgattagatggaaaaattaatggctttccctgattagaaccaaactaacccatctaaagaaggaaatggtgtctatgattattaactaacagaggtcgtaaaccaaacactaaaattccattcaatgaatcaaagcttgaatccaatatataacaacacacaaaccattgagttccttttccttaatattactaattcaggttcaaatgtgacagctttaactagagtttacactagacaacaaagtacgagaataggttaccctttttttccaaagactatgggagaacgaacacattattccccagttaatgtttaggtactttcttagagaagagattcatttgcaaaaccagatgataaaaatttttttactctgaaacagatcttttctggtctactctgaaacagatgctcagagtccagactgtaaaaccaactttcttagaatacaaaaagagaactttttgtttcctgtgtgtacaaaatgatgtaaatttcaagtaagattcacacacacttatgtttcaatgtgaatttgtatttgtaagctaatattaacaactacaatgaaggaggataagtaaagtaaatgcagcagagcatttagaagtacacatacatacatatacatatccacccacaaaattacacttcatacaaaaaatatataaattttataaaatacaccaaaatatagaaatatcacacacatctccccgaccaccaccaaaaaaacatacaaagaaacaaatatatcaccttaaaaagtcaagttttttctattgcaattactgtttataacgacaaattcggtttggtgcattctttatgtccttttttaattatttatctgttagtttgtttttatcttccgttaaggttagcaaactgagtaaacatggctgttccagagtgttcatccacggccgtgccactgttctcttccaccttagcaggaaccggaacagtagccgcttcgttggtggtgactgagggagtgatcggagatggatcagacacaggcaccgagccaggtgtcaccacatcaggcttagcgttctcggtctcttctgctttgccctgagtgaatgcctcttgaagctgaagagcatactccaagttccacagaacatctcccattgttggcctatcgacaccgtagtcttctaaacacttctctgcagcttcagcaaacttcttcatcgattcaggattaatcgttccagccaaatgaggatcaatgatcttttcaagaagtccttttcgtttccattgcatcgcccattcagctaagttaacctgctctcttggtagctgaggattgatggctggtcttgcgcacagagcttctagaagaacgacaccaaaggaataaacatcggatttgtcggtaagttgttgtcttctaaagtactccgggtctaagtacccgaaacttcctttcacggccgtgctgacatggttttgtccaaaagctacatctttagaaagaccaaagtcagcgacttttgcaactaaagcttcatcgagaagaatgttggtggatttgacatcacggtggataatcccctgagctgttcctgtgtgtaagtagtgaagcccacgtgcagatccgatacatatctcgagtctttgtttccaggttagaggagcaaggttctttccatacaagtggtccctgaatggaccattggacatgaactcatagactaagatcatctcagagttctcgtcacagtaaccaatcaaggagaccaagtgtctgtgtctgagcttagaaagcatctggatctctgtctgaaactcagtgattccttgttcagactgtggattacctcttttgacagcgactttggttccatcgtcgagggttccaatgtagacgttaccgaatcctccaacaccgataatctgggatgcttcaaagttctttgtggcttcttgaagctctgaaagggagaaatagcggccgagaccaagtgttgagttgtagaagttggatttctgagaaccacctttgcttgtcatgaaagtgctatcaccagcatgtattggtagcaaccaagaggagaaactatttctcttctgccaatcttgtggcctcttcttccacttgtaaaccatggctcccagaccaatgaaagctccaaacatcatcacaaaccccgcggttgctaccataccatgcttccccatgccagtggttctaccatccactccaaactctccatcaaggctgttcacggaattgctcatcttcagaacctcaacaccgttcaagatcgcgtttttggtccctgtatcttctcccatgggaccaatctggacttggagctcagggcccataagtgttgcgttcacaacgatgtctttgtagtaaggagcagctagattcccagcgacagtggacaaatccagtccagaaatggcagttttcccgttaatgtacacattaaagtacaggtcattgagagacttgctaacgatatcacagaaatgaagccggataaggtagttaaacgatgggttggaggggaaattccaggagacgttaaaattagggtctatggtgagagaattagccatttctacagctgttgcataaaccgtctgtggagcaatcaaaggtgtaacttccggtgggtacttgattgccgaaggggttgttttaacgtcctttgccaagttctcatctttcaagaattccttatcgggtatccaggttcttcctaatgtatcattctgaggcatgatcaagggaccgccgacattgactctataaacagactggtaagcgtagtcagacagacccgagaacccaatgacagggaaaagggcagtgccagaatcagagatcagttcgtctggagctgacacgacttcgatagcgttgatgaacgctgcagagcttttcataggtctgaacctgagggcgaattgagcatctgtcatgttgacgagatactccttctgaacagcagcttgactatcattgttgttgttacttattttgaagttatgaagcagcacatatttctccgttaaaacggaaaaggttgcttgttggagatcgaacttgtcattagggaaggccaagaaatgcaggcgaacccaatgccaaccaggtcgagtcaaatggaatttgtaggtggcttcctcacggaagatccttgcagttaggtagataggagatgcgaccttgtctgaaggcggggctgagacctgaatatcttccttggcttctatgtattggattgtttcttggtcactcttaaagactcttccatcaggggtttttgatgacgatttgcttccacaatcaatgagaatatcatctgccggtttaaaaccagtagcaggtcccacagcagctgcagctaccgcagatgcagaagggcctgagaggaaaaggagaatagccagaaggagagccatggaaggctttgaagaaaaatcaatgacgagaaccgtgaatatgtttggtttctttcttatctccatccctcctgggtgggaaggagagagagaagagagggggatgaggaggaacaaagataagaaggaatgagggagtttgttggatagcttgtggttgaagaaaagagggagaaaaaaaggtcatgaaagagagaaaaggtgagttgttatatgtgtggccagtttttggagtatgctgtaatttggtggaggatatgagcattgatgatattcaatggtctatatttagcaaattgctaattctgttatcttgacaattttaacacaaagccaaaaataaaataactctggttcctatttcaagaaaaaaaaaaaaaacaagctctaaccagaatcataacctaactatcagttttttatttatcaaacaagcaagtatgaagaaagtgatcataattatgtcttcaagcaagggagtgtgtagaaacaataagtaggcgagaacataccagcgaatcttttcaatgccactcaagtgactccaaagcctgctgatgaatgtctgaatctcctgctgcaactacattaaagcctgtgacaaatgaaaaagtacataaagacgtttaatagttcgacattcaggggtatagtgatcttttgttttgacaaatgaatgaaacaatggttttttttttcaaatattaaacatacttgtcgcaactgcactggatgaagcttcccacagaaatcgtttaccagtccaatcggttatggtacctccagcgccttctattacaggcaccagagcaaggaaatcatatggctgacgaagaataacatttgacttcaattagtatgatttgaacgggtagtaccagttgaagattcgtacatgatgcatttacttttgacaagaaattatagtggtgccattctgaaagagaagtattacctttagaccggattcaataacaagatcgacaaatccagaagccaggagagcgtaagcataacaatcacagccgtataagggcactttcacctgttacaatacaatttaacaagccagaatggagtcactagtcactaacattgaaatgaaaagaacagaaaagaagggattcaaaggaagccatagaaaatcaactggataagaagcttaattgagatactaattattgtgagatgcgttattcttctaattctcataaggaagtttcattttcctgtactatgctccaaccgacaaacaattccaatttagctaaatcccatgtaagaatatatatattacacaaatagataagaaccttgtctctaactcgagaatatgccttttctgcctcttcactgaaaagatgtgggctagtggtgtatctgggcaatcaaaatgtgagaagagaaaacagtgagatcttagagtatgataatgaacatgagaatgctatttgctttcttgaaacacgaaactataaaggcatcacatgtcattctaggctatttccttcaaaagtattgctattacgggtcaatggacgcaaacttacaaatatgcttgtgataatttggggcaagatcgcgttgagatatcctccccgtttagtttagttcttcttccattcattcctatccatctctcttttagaataggctgatcaatcagtcctagaatctgaaagtgaagacaaggtcagttagtaagcctaaaatgcaattcttcagaatcagaaaagtagttaaaacacgttcaataagaattcccgatctgacatcagaatgtgcttataatgcatacaaccacaaacatgggaaggtcgcaaacaacaagagagtctgatgtcttaccggtttacctttgtagagcagagcaatcagcgtaccaaacacgggtttccctgagacaaagcaattgatagcacaatcaaatcctcaaactcttgaaaaagacaagaaaaatgctaaatattagaataaagaatccacctgtaataaagctctttgttccgtcgattgggtccaaaacccaaacatagtctgcagattcctctttgcatctccaacccttctcctcaccatatctacagtttcagcttttaacatatgaataaagatgaacagatggactgctagatgctgtgaagaaacagagcagttttcatatctaataatctactgaagctcaaggttagagagcaatcaatctgtctttatatcatatatagaagaagaacaacagtcaaattttcaagggaaaaactcacatagcatgagaagggagattctggaatataatggaaaccattgcctcttcagccatttgatcagcgattgtaacagggcctgcagattatccaaatcagacacacaaacaaacgttggctaccaaacctacgattcttcttaattcggtacctaacaatcaaacttcaatcaccaatttctatcatcaatttacccttaaaaaaaacaactagaaaaacaatcgagacttactcatatcatctttatcaacaatgtcgaatttcttccggaaatactttctgataacctcgccggaagcgtcagctaatgcatttcccacagcggcgaatcgatccagctcagtgtcgctaagttccgaaggagactcgttgcttatgttaggccgttttgagtttgaagccatagtcaggcaaaaccgacggcgggagacgggaacagcaattgcagaagaagaaagaaaggataagcggctgttactataagaagaagagatacgaagagaaggatttgcagaccgcaacgccggagactgtggcggaatcagatcgaaggacttagagaagaagtgcgactgagctaacattttgctatgagtgggaagttcacggaacagccagtcatcaacgacggaaaaggtttgaatagagagatcacgattatgcaatctcatccgttggatcaactttacatctctcaaacttggttcggttcggttcggtttgatattggaccgtataatgtaatcaactttgaattaccaacaacattttacacaatttctttttttttttttttttttgttcccaagaaattagaacatgattgtgattacacaagtaatcatgaccatccgtatggaagctttcaaagatcattatggtggccagaaagtttctccttaatcttcttaaagaaacccttcttctcgtgaaccgatcctgatcctgatcctgttacggtcgcagctgatggcttgtcgacgcctagcttcgattttgtttcatccgttatattagttttcctccctactccttcgccattctcctccgtctacatttttatacgtaccatggacagtgaatcttgataataatttttaaaataatatacacgcatacataaataaaaatgaaatggatgtagaatttctactcgcaaactattagacaattgcgttcacatgcttttagaacttacttacgagtgatacagatattgaatctcaatacaactatgtaatagatatttaatcgtaccgaactggtgccgaaccagcggagatcatggtcttgaagagggtcgtgggacacggaaataggttgtgcgtggtgaggagtattggtggtggtgactggggcagtgattgggtgtggacctgtgtagctgctctccttcaggtgaggaacggtggttgccacacctgtcaaatgcatggcgttaccaaactcgtccatgagctgagctggctccccgtgtgcgtccgtgagatatatcggatttcctcgttcgtctttcagatccgccattctcttttcctaacactatgcgtttgcgtgaacattatatgtactaaacattaatcatcattcatgtgcatggtcatgacacgtgccgcagtaacgaatcaagatgcgtagggtattgccactaagcacatgcatgatctttaacgaacgaccgtagtcgataatgattgcttgaaatcgatttctctgatttctatataacccgtgtttcaatatttgcttaatattggtagtagagaaatgatggtgtaataattcacgtataatattttaaaagcttatcgatctgtctatttattacaatcaccaggaatagagggagaaacaaatcaaaatttacataaaagaagtttgattgagaggtcaagctggtagatataatacataacaaactatacccaatcggctgccttcagagcccagttctgatctatgcatagccagaacaaatcaatagattaatgatccaatgttttttttttttttgtccccaaccttgtaatctaaatttgtaactttacatgtgtgaaaatttagtattcattaaaaaaaaaaacaatgagaagactttgttgagcaagtgtgtaacagcaaatagactgcttttaactgaatggtatcgtgccccggtgtgtgtcgacttctatgcttcagacagcagtcaaagtacagagcacggcgaaatctgatacaacaaccacaaagtcttacttgcgactcactgatttgattttcaagtttcaactatatatatagcaagaaaaagagacagagagagaaaggcttacaagttcatattttgctggatttggtccagaagaagcctttctttttcacaggaagattttctttaggggatttatagttacttctggacccgaaagagaagtgtcgagccaagaaaggctttgctgaatagcttttagcactcgaacttgagacgagtctagggctcttgcttgctgctgctgctgtcctgtggctgtggtcaaacattacaaaatcatcgcaatcaaagtcactgtccaaaactcggtttctgagtcttttgttgtgtctcgctttcaaatccatctctactttcaacgctttctctgacagcttcgctgttttcttctcacccattgtacatattgggcatgaagggtcgaatttatcaatttccggcgtcatctgctctaaacactccccatgatagacatgcccacaagctagaattgcagatacagagagctcgttggtcataaagatcttttggctgctccacaaggatttctccgacaagggtctagagcaagcaccgcaggtatgctgctgatgcttggacatccggttgccatgatggtcaatcttgtcacgttgaagcccaaaacaatcattgtcataattgtcataagacagagccttgttgctgcgagaagatgacatcatttcagaaaaggcttgtagagaccaaccttcagatggtccagactgagacgaatcatatctcgtaggagttccctgcctctcttcagttgctgagcttctacttagtgagttctgaccatagatttgaccatctgagacttgctttgatagacgagggtgctgtgtcagtttaagtgtagatgaacttgcagggtgcaagtagctttgggacgaaagtggtgacgtagggaaagatgatggttgtgaagctagtgaaagagacaactgtgcaggagatagatatgatggtgctgcagactctgttgaaacattttctttctgtaagatacataaaagatgcgaaagagacgttaggcatcgacaatatgagagaactcagctactgatgaaacaagcattacctgttcgaagactgtattcatggaagaatttcttggaaaagatagatctgccacaatagaatttgatcaagacaggtgaagaagcaagccaagaatcagaagacaactcttatcattaaacataaccacgtctttttgctaatcatgactctagaggggcattaacaggttctgtgaaaaaaaaaaatctaaagtcccaagtgagtaacaccaagtagcatgtgcttccctcaagtttacaagttccactaaaaaagctgagccagtgaagaaaacgatttttaatgttaactatttcctaacaagctgaaataatatacctgaggcaggagatttttgcaatgtctgtgtccgaaaactgtccaaaggggacccttcagatgatacgaaagcagattcaaatttgatctcagagccatcgttccgactaataccatcagataaccaactgagagaagtttcttcaccagctacacgccctctattatcccaccggaaactccaagacggagaatgcctgatattgctcctctgcaaattctcaccagctgatgaattaggcaccaccattttgtctcgagcagcaacacaacacgcattccccataactagcacctactaagcactatgcaaagacagtgcttataaattatttgacgagagacacttcagtagaacacaggcacaacaatccctttctagctacaaaattaacaagcaaaaaaaaaacacaaaatcaatttaagaaatgaagatacaggaattcaatcagcatcatcaatagctgagaaaccagaaattcaataagacaatcaaatcatcatagagtcaggagatccccaatcaaagactcaggttgcaacacttgcaagcaaaaattagtagagcccccatgttactactaatcatggatcaaataaggaaatatagaaaaggaatcatatcgatctatatactgctgctcactggaactgccatgactctcttcactaagagaatccgtaattaagaaaaaaaaatcaggaaatcaaagaagtagtaattgaagtaacaattagcatcaaacagatccgagattaaggccggagaatctgcaaaacatgttgagatgacccaaaatagatacaaaacccctaaaatcaaatcaatacccgaagaataaaattccgaaagagacaaaaggataacaaaacaaaaagcaaaatactagatgctaagagagtcacgaacatcgaacctgctcccagaacttccaaaacgtcgccggagaagaggaagatgatagtttcacagagagagagcgatggatgggtctgttagagtgagaaagggagaaaaatgaaacgagagcactgctttgttccttcctcctttagagagagagagagagagcgaagagagggaaagagacgaatacaagtcttttctgacggtttacttcacgccgtcaggttccggtaggtgtgtgtactgtgactgtctgttgtgatcagagctctaaaaccgtaccaaataacaaaatcaaatcaaaccgaattgaacagatactggttatttcgatttttttatatagattttcatcaatcatgcaaagtgaaatagtcatatacatagataataacttctcaaattcatcaatcatgcaaagtaaacccactacgtccgggtttatgtattactatttacaaattgttttatataatgtctgttcatataaaataaagttgaattcatcggttttgaaacataaatatgatttgtaattgtttttgaaaagtccaactatattagttcatctgaaaaatgaatgtgtttgagttattttttattgttgttctagattctcagtttttttttttaatttatatattcttatctttttgttttattttaaattgtgagacggtaaaattttagaaaatttatttcttacactaaaaatataacatgtctttattaaccatgtttctgcatattcaatctaatcatattcaacttgatgttcttagaaagtttagttaagttcttatcataatcttatatcttaagtattagttataaggatagctcctcaaacatctttcaaattacttgttttcttaacataaatctcgaaaagcttagatatatttaatctgcatattcatttagtttctttcataataatcgtctaatttttaggcaaaaaatatgtgtaacatgtttggattttatgatcactttagctacttaagtggatctcaaaattaaagaggatacattgaattaaaaaaatgtagaatgagtgatggttcaagttctgattaattatatcctcctgttttagttgttatgttgaattaattactaattatgtattcttatcttatgaagtttaggtgacaagctttcatgtgctaatgtgtcaagggaaagaattagcctatatgaaagatttaaaagaaaatcaaagaacagttttgccatgatcgaaccaagataagccggtttgtgtaaaataacccaagataagccggtttagatgtgacgccgttagagttagcggagttatagtgactttacggtgagtagtgccacgtcacgttaaaggacaaaaagagagggagaacgaataattaaccggcaactttccgcagtgacgtcgttagatggggccgtttagaaattaaaaaattagattccagttttataaattaacaataatagagggaccaatttataaaatcccccgtccctgtctattactatatcttaccggatacgcaacctggagctttgtgaagccaacacggaagaaaaagatccaacgaaaacgaagaagggaatataaagacgaaaccatcacttcccataacaatatttatttagtgttgaatataaatacgaataaaacaatattaatcgttacaatacattcaagaattctcacaaaacctgattgttctgtttcgaaccgatagattcgaaccttggtttaagttgccggcttcgaggaatctccggtgtggactttcactcctgtttcttcttcatgacgcaagctgttttctctagaatacgctttcttagaaccctgtaaaatgtttagctgagtttcagtatgttatgttagagagccaagactttatttttgtaatatgactcacctggaaaacgttacccagcttcctcaatcctctagctctagctcgaagaacatcctttgaaacacttggatctttaagcacctgagaacaaacaaaagagatgacaagatcgttactattacagtgagattatagtggatgtaataaactaataatataggatcattaatgtctgacacaaatcatggtgtatcttaccgcttggcagacacgagataaggttgattcgatgtcaacaacatttatttgccaaagggattgaagcattgcatcctttttagcttcaatggctttctgaatattctcttctttgttctctccctgattcagcttgctcacttcatcctgcaacagaagtaagttgaccgcacctacgcgaaaagaaaaaaaaagatttccgtttgatcctccgttgttggaaatcaaaagcagaccccaaattcaacttaaacattgttttttctttagcttttaccagaagcagccatcacttgagattttacttggtggcctttgtcacgaacccattcggctaaaaacggtactttcatgaaacgtttatcctttccgagttctttagcagcttttctagtgtaaatgtaaccaactgtgtgaagcattgcctcaccaaaacctgacagtaacacggatacaaccaaaagtcagtttatttggtttgtcaggttaccaaagtttgtgcctttcatttacttgaggagaaaaaaggcaaacttgatacagcaactgagaaagaattgaataccagctgttgaaagccgttttgcctctgcggtggcccaatttacaaattcatcggtttgtccttccacgaatggttcaagtttgattttcagtgtagtgacgagcttgtctactctgtccttttgtatcgcctgcaaaaaaaatcccaagaaaacatagagaaatataaacattaaggcataagaaaacagtaaacagagagggaaaacaacctactttgatcttttcctgaagcatctgttttctaatctcaggctcatacgattctaattcagcatcgattgaggctgctgaagcaagggcaagttgcccaacgtaatcctcaaagagctcgctaccaaagagcataccaaacacagctgcaggatcaaccattgcatccctgcaagaaaatggaagtgaaattaacatactatagcaattataccaatcacattctcaaatgacatataaacatcacagaagttatctctaggctttttatgtggggaaaaccgaaaatcttcaaatgtagaatgaatcatgaggaatgaaagtgtgaaaacttactgttgaaccccttcttttccatatttgtcataagctgtacgcttctccggatcgcctagaacttgataagcttcacctagtatcttcattcacacaacaccaatttataggttagagtgatccagaatatcatccaatcaaacactccttgaaaacccttgtgaaagtcgttaagcaaactaataaacatagcaatagagatgattctatattttaaggtgaaaggaaaaaatcacctgaaagtttttagcagcttgaggatcaccagggttcttgtctggatgaacttgccttgcctgcagaaaaaatgagagccctaaaatgatcaaccaaaattgatcttacaatcaaaacctaaaaagctaccaaatttggaaacacaacaagtttcttatcaatccattatctgattcttagcatcataatcaaatctacgaatttaaaagcttatgcttggagtctgacaatctacctgaaactcatagagatggaaatctgacgataaaacataaagacttacttgaacataataagctttcttaatctcagcaccagaggcgtcaatcttgacgcctaatatgtcgtagtactcactctccttcaccatagctcaactctacaaatagacgcaaaaaaaatgttagacccctcgagctccctaataaaaaccattaatacaggaataaaaaaaacaaaccttgaggaaatgcgaaacaaacgaaatcagaggagacagaagggaaatggtaaaagttgattacagatcttaggaaattttgaggaattaggaattgtaaatcaaattagaacaactttgcatatgaaaaaaaaaacaactcaaaatctaaaattcataatctggaagctatagattcatacagagacttactgctgttcgcgaagcacaaaaactaaggatttcagatttggtgagtggtggagagaataaaattattaatttaaacttgttgctttccattggaagagagattactgagtcagccacgttttactacgggtggatttgggcttttaaatccaaaaagtcatttataaattgggctctctcatataaagcataatttcattaagcccgttaggcccacgatggatgtaaagcatttaagaggttgtgatgtggggtgtgagagaatcgaaccctagtgcaaggtcaaaaccaaactcgtagacaaaataatagaccactagcctgcacgatctgcttcattaactttgtaaatttattttgatttatcaatgcgataatagacgcagattttttccggccaatcttctcctccgagtagctaaaccctagcgacggcggcaacaatggtctagattcaacgtatcgtttcgtggtttatcgggtatttctagtttccaattctcctcatcaaagtttcagtttttaatcaccgttgatttttctattcaatggtacttgaattttctctggaatgatattcaattgttctgttttgattgcctgattgattacagtattctccttttttttttcttttccttttctgtgaatttatgagtttatggatatactaatatacatatatatcttgagatctgccattggtcttgtttttggcctagtataatggtttgacaaaagctccttctatcttgtattgaaggtgacactttggtgagagggagagtatttgtgaaagaaatcaatggatttagattttgatgatcaaccctcggatcatgctgcaccagcaggtaattggggttttcttttgtccactttcattagtttcatggctttttgtttgatgtggctgaaacttatgaatttggatttaatagttagggctggtgcaaggtttaaaccaaaaggcagaccacaacccaagaagaagcaagtctctctttccacaacccaaacaacactctcccctgatgttgcccaggaaaaactctcaacacaaagtgaagatctcgtccctctagacggatcatcggagattcccagcagttttgtttcttccctcaaccaacttgtttattattatatgttgttctgaagttggcagtgttttaagatgtggattctttctatttgcagatgctttaccttctgagactaatgtgccggatagtggaagtattaacaaatctaccattggaacattatcagaagaggtaaaagtgttctatgtctaccttttgaattgctttttagttgtatgttacatgtctttgaaaaacgtttttgtttcctacagaatgaagatgcattcccaagaggggttcattggtctgtgaaaccatctattcttcgtgcttgtaataacgtgaatttggtgggaaatagacgtgatgatggcatagaggcgacgacttcatttcctgatgatcctagaacacaagattctgcaatatttggagattatgttactcctgaaaccggggtattgtgaattctatctctaacaccatgtatcacttgttttactgcacattttgaactgattagtaagtcttgatattgttacaggcagacgagggtcgtgtggacatggaaactcttgatattgtacaggaggaaggcaccaccagttcatatggtaattttaaactctgaatgttgatatttcatatgatttagttctgtgaaaggttgataatgatatagctgtttctgtgtagtgcaacatactggaaagttgcaaccaaaacctagattactcgagactgtggttgaagaacctgagcctcattactccgctggtgatactggttattttccaatgggtacgaacgagtctgagtttatggccaatgtggaatcaagaaacggtttcagtacttatgaagatcttcaagaagaagaacttaatattcctgaagcccccagagaaacggtaagattggcaaattgggttgcttttttgaggtcatcgtttaaagttagcaaatttgttaataggttttgcttgtaattttttaatcaggttggtgagatggaggcgcaaaatgcttctggcggatgggaacaagaagaacagggtgtatcgccttgcattaacaatacagttacaggagaagaagaaaattgtatggggaatacagtagaagaacagtctaaaagagaaagcaaaactggaaaatcgaagcgagctacttctcgaaagcggaaaaagacaagtgaagaaccaaataagtctagcgaaaaaacagagcagaagaagttcaagcattcaagtcgtcgacaaaaaagaacacgtaactaactaactaaataactgatattgtcatctagactatgatcaactattttctgcatattgattcatgtttattccctgtcctagtggagaaggaattgcttgaaaccccggatcatgaaatcagatctctgcctcttagagatatgcttcgccttgtcgaatataaagaatggatgcaggtaagaacactattcatctgacctcaacatgttctttggaaatttagctggatcctaactgttccttgatgttaattattatacagaaaaaggaagcaaagggagctggtgtgcaacctagccaagaaaggtattttcattagaaaaaaaattgaaagtgcgagatgataaaagcagattgttttcttttttcgacttatgggagtgtgttgttatgtgcagtaataatatgaacggatcagggagccagtatcattctcaaggttttgacgaagaagatgaatttggtgactttggtatagagtcgagcgaatatcaagaaaataatgtagttaaaccggattcaccggttaactatcaaacctacatgaacaagacttcaagaactcgatggtcaaaggaagatacagaactcttctatgaggtaaacttgacagcctctgattcttaaaagacgggttttactgtttcggaccattgtcacaagtctacttaagatagaaatgaaactctaggagacaataaatcacctttgttggtaagtatttatagatcggattgcctttttttattttcgtagggtattcaagagtttgggagcaatctctcgatgatacaacagctgtttcctgagagaacgcgtgaacagatgaagctcaaattcaaattggaggaacgccgaaatccattgaagcttaatgatgcattatcaagtcgctcaaaacgtgagagaaatccgttcactctctctcgctcttttctctgtatatagaaacctgaaagttttgttgtttttgcagattttactcatttcaagaacgtgattaagaagcttcaacaagaagccgcggctgcaaaagaaggcgaagaagaagaagaagctggagcagaagcagagacaactgatgttcccgagaatgtagaatcccccaactttttgtttgcgccataatctgttagttttgttaaaaagttaacaaaacattaaaacgctgtcgtttttctatatgtaggaggagcctgagaagtctgaggagacggagcgagccagtgatggagtagcagctggagttaaggaatcggacggtggggatgttgagaatggcgtgagatcggacggtggagatgaatgcgacgatgatgaagatttttggaattcttataagagtgacatgtaaactatagtctttttcttcgtgattgagatgaaaatatacgatgttagtaataaatttgctaattattcacgtttaatcgttttgaatataaaattgctaaaaacaatgattcaaatgtaagtattaactagggaattgttttctaattggtgaaaataattgaaaagggaataaataatttccgacagcaaatggccaatgactgttgactcatcgtttaccgctccgttttgtcggcgaaattctcatcgatcttttttttaattcctttttaactttttctctgattctgacgttacacagagccaacctatacctatcttagatccgttaaattttaacctacggtcgttagcgaccgtcagatcttcgtcggctgttgacaaaaagcgaatctcttgtattattacttttcacttcatactactttttataaatttctagttacgtcccaatctcatgcatatttattaatttcaggccatttatgagattttattacagaagttacctcgatttctacattaaatgcacaaccacgattccttgtgccaaatctctggttgttgttgacttgttgttggtgtttcaaattgatgttttgtgcttatacaagtatctgcaaaaggcatgcaaaattagctatgaacacttttgtaatctttacgaacagtaaaacaagaccataactgaaatcaggaaaaacaattatttaatcaaaattgttttaattttgattgatattaaaaagaattaagtttggcgaaatttgaagtaagagatctgaaggaataatagtgtggggttcacaatagaaaaagagtgtaaataataggactgtcattaaataaggagtaaataaaattttgttgggaaaattagatacaaatatcagaggaaataaatctaagaaaaaagaaagagtccagagtttgctccacttttacctttgaaattttgtttcctttttaatttttgcgaaatttcaggagtgtttctggttaatgtgagaaagtagattcgcaagaaaccaaaattaaaaaagtgagcgattcgtgttcgattgattttgtggatgatccattatctttctccaatatttttgatttgagcgagagttttgcttcattcggaatcttaagatgtcaggtcccgttgatcgattcgcaataccatgtaagtgtatcagatctgtttattttaatctctggatccgtcggtttctgtcaatgcgattttgctagggttttattcgagtaatgagaagcgaagttctatgcaatttcgtttttttttcctagtgggtactgcttagggttgtgctatttacaagcctcaattttgagaagttgggtcgtgatttcagctgccaatagttcagtggttgatgaaaaatgttttcttttttataggttttgagggaatattgagcagtgatgagaaaaaggaaagaaagtctgattttgagaactcagaagatgagaggagaacaagaatcggttctttgaagaagaaagcaatcaatgcatctaccaagttcaagcattctctcaagaaaaagagaagaaaaagtgatgtccgggtcagttctgtctccattgaggatgttcgtgatgttgaggagcttcaagcggttgatgagtttagacaagcattggtaatggaggagttgcttccccataaacacgatgactatcatatgatgttgaggttcttgaaggctaggaaattcgacattgagaaagctaagcacatgtgggctgatatgatccagtggaggaaggaatttggtaccgacactattattcaggattttcagtttgaagagattgatgaagttctgaaatattacccgcacggttatcacagtgtagataaagaaggcaggcctgtgtatattgaaaggcttgggaaagttgatcctaacaaactgatgcaagttactacgcttgatcgatatattagatatcatgttaaggagttcgagaggagttttatgctcaagtttcctgcctgcactattgctgccaagaagtatattgattcaagcacaactattttggacgtccaaggagtgggactgaagaacttcacaaagtctgctcgtgagcttattacaaggttgcagaagattgatggagacaattatcctgagaccctccaccaaatgtttatcatcaatgcagggcccggattccgtctgctttggagcactgtcaagagttttctagaccccaaaacgacttctaagattcatgtatgttaatacatgtttttgctttttatttgtacctctagttaatggcttcccttaattaaactactcctgagattcatcattgactgttcaacttttttaatataggtactcggctgcaagtatcagagtaaattgcttgagattattgattccaggtatgtagcttgaatttctaatccttttttcccctccagaattactcaattcttctgtgttttgcttacatcagtgatgtttctttcatttgtttcagcgagttgcctgaattcttgggaggggcttgtacctgcgcagatcaggggggttgtatgctttctgataaagggccttggaagaatccagagattgtaaaggttacttatttgtcctttactgatctctttacacactctagaattgaaacaaatggtttactgttgttgcagatggtacttcatgggggagctcaccgtgcgaagcaggtggtgaaagttctgaacagcgacgggaaagtcattgcttatgctaagccgtcttatccatggataaaaggaagtgacacatcaactgcagaatcaggttctgaagctgaagatattgttgtgtctccaaaagcagtaaagagttattcccatctccgcttgacccctgttcgtgaagaggtatgatatattttcacactttgtttttatagaatacatgattcgtggttttgaatcgtccaagtgattattttgcaggcaaaggttggttctggtgaaacgagttttgccggtagttttgcaggttatgatgagtatgttccaatggttgacaaagctgttgacgccacctggaaggttaaacccaccgccatcaaccgggctccttctaaaggtaatatttttatgctttcacttgtggcatcaaacactgggaaaagaaattgaaactttggtctcttatgtatcttttcgcaggagctcatatgcctccaaatgtcccaaaggatcatgaaagcttcagtgctcgtgtcctagtaactttcatggcttttgtgatggcgattctcacattcttccgtacagtatcaaaccgtgttgtgaccaagcagcttccaccgcctcctagccaaccgcaaattgaaggaagcgctgctgcagaggaagctgatctcctcaattcagtgctgaagaaattaaccgaacttgaggagaaaattggagcgctccagtcaaagccatctgagatgccttatgagaaagaggaactgcttaatgcagctgtctgccgtgtagacgcccttgaagctgagctcatagccactaagaaggtaactgaataccatgttcaacaattgaaacccaccaaaattagaacctgagacgtttcacgttctctaaaaactgtttgttatttgaagcaggctctttatgaagctctgatgagacaagaagaattactcgcttacattgaccgtcaagaggcagctcagcaccaggtcggttttttcttttaaacctttaaacccgagaatccaaatttgtcttcttgaatcttattcatttaaattctttcaaatgcaatgatggaataaaccatcaatattgtttttgtttccagaagaagaataagaggaagcaaatgttctgtttctagaagatgaagaagaagaatcaaatgtttgtttctagaagaagaagaagaagaagaggcatctctgctttctctctctcccttgtaggtttccattgaaacagaacaactctcatctcattttatgttaaaagctaatcagttctttctcttttatgataatgattagtttatgatgatgattatgatgatgacgaatgagtcttttaagtttatattaacaaaacaattataccaaaaaaaacacaggagaaattgagagtccttagatacagacaaaacatgacttcatctttctatcttctccagtatccatattttaaaagattacagtaaactggaaattttgatttattttccaggcttcttagcctctgatgcagtcttctagaataataagaactgaaaatgcaagaaaaaaagtagagatattatttcgaatatagcaaactacaagcaataaagtaatcagtaatcagtcttaggtgttttgttttatgtgaatttctaaccttccgcttcttcttctttttcttctcgatgaaagccattatctcatgttgcctcgtcattgtctcgtctagtgcctaagtttttgaaaacagagcaatcacaaaacagagcaaacagagcaagagactagcgagagagaagaaaagctttaccttgttggtttcagacaactgaagctcgagctggtcaatacgacgaagtgcagcgtctagagtcttctccctctccatataaaacgcagcctgagcttccatggacttacatttctcctcaagatctgttatcttcttcaccatcgcaatatactcctgcttcgacataacagtcactccgtcctggtagacggcgctgccttcacggctataaacatttgcctcggtgagcctccttggcatgttcttggttagcctcatcactcccactatccccattagcaatgccatgacgctgccatataagtaccctttcctctccaacggattcacagctgagtacacatctgaatatagagtttcacggagtaagaaacttatacacaagcaagcccggtttggttgacgagaatactaacctttaaggtcggtagggtttttttcagccttgttaagctttgtaggccaatcagcagccgctgcagcatccacattcgtgtcgatgaacttcttctccatctccgcagcagattgcttgtgagtctcttctggttcgcatttcttctaaaagttctcaaaagattagattttactgaaccaaatttcagagaaaaacattcaagatctttgcttcttacctttgtttcgttgttatactcaaagattgtcttttcctcgatccctgacaagctccttcgcaggcatctaccttcaccgttctgaaccaactgtgtataaatagtttacatattaatcccaagttacattgtaatataacgtttttgatcaaggatttcttaaggtagttagttctatagaactaccttgaagatctcagggtcgttccatggacctttgtctgaacgcatacatccacctttgtctgcgcaggtgcacttaccacccaagaactcaggcagttcactaaacaaacaatgcgaagagagagttttgaataacatatttgaagataaagctacagtttcaaggtcaagagttatcaagttcttacttggcgtcaatgatttctagaagtttggtttggtatttgttgccaagaacctgccattaatgaacataaagagtggttttaagtgaggccaatatgaaacagagaaaagttgggatgtctgaaatgagaagggaagctttacgtgaatctttgctgtagtctttgggtcaaggaaagatttcactgtgttccataaaagcctaaacccacaaccagcattgatgatgaacatacggttcagcgtctacaacgaaacacaaacacagaggtcatgttgctgcgtcagaaccattatagaaactcaaagaagaacgtccaaaaacataactaaacctcagggtagttatcgttgtcgattttctgaatactctgaagaagatcttttgcagctttgttgaagttactaagcccctgcaaacacacagagattgaatcgtccttacagagaatctatgaggggaatacatttgtatagcttaattgaacacataccacgccttgaacatccaagatcgttgtgctctgatcaatgtgtcgtttcgcagcgatggaacaagcagggaatttgacgttgaaagtcttctcgaactctttcacatggtacttcacgtacctatcaattgtggtcactttcatcagctttgtggcatcaacttggcctagcctctcaatatagataggtcttccttccttgtcaacaccatgatatccttgtggataatacttaaccacttcttcgatttctttgaaatcaaagtccttgaataagaaagagatagaaacattagagagacacagagacaaaacatagagtcaaaaaagtgagcctttgatgtcacctccatgatcgtgtctgcgccatattctttcctccagttaagcatatcagaccacatttgcttagccttttcgagatcaaactttcttgccctcaagaacctgatatatttcgattgatcagagcaatggagaagaagaaaatcaaaagatcaagaggaaggacctaacctaagcatcatgtgatgatcatcatgcttagagggaagtagttcgtctaaaataagagcttgacggaaagcatcaaccgcttgcaactcttctgtatcgatttcatcgacgattgagacacacgccacacggctatgccttcgacctttcttggtcattgagtgcttaaacttgttcgtcgcatttatagccttcttctttagagagcaaagctttgttaatctcttgtcatcttctgagatctcaacatctgcaagattcttacttttatataacgtctggctttcatacaaaaaaaaaagattggcaattttctcagcttacctatcttattatgtcggtccatatgagcaaccattgtatccgccatgatttaaagtcctatttaatcacacaaagcaacaaatgaaaactctgttcttgttccttgtctgacaatcaaacaataatattaaacaaaacacaaaagaaacatttcatcgaagacgttacattccaaccccaaacaaattacgagaaacaatcctttaaagcttatgagaattaacataaaccaaaactttttgtgactagagactgaaaccctaaagactcgagattcaataagcgtgagattcaaagggtttaggtgagatagaagaagagacttttattctttacctgtggattaaaaaaatgaacactaaggggagaagaagaaagagagatctatataactttctatctcacaccccaaattaagaacggttccaaatttacaacgcctaaaatcttagacaacaaatccagagagagcattgacaaggttttaccttttcttgatttctttcatacaatttagcgtttttctttttgtctacatatttttagctctaatcttatattggagaaaccatttttgtaaataataattgaggattttttctttccttctatatttctatctaaatctggtcttattaatatgcgaattgagtaaataaaacagatttattgttacaattatatatttcgagaacaacaaaaaactggtgtcataatggtttacaaaaaaagaaaatctaaaaagtatatatattcccttctatatatggaaaataataataagtatattcctaaatagtttgtagaaacatatcatcatggatacttttctttttatattactcaccaatcaccatcaatatacttccaaaattagtttttttgtgttgtaaggttttcgaaaaactaaagagcatttgtattatggtgaacatatcatcatggatacttttcttttatataatctggtgaacataaattatcatggagcatttgtattagtaaccgatcaatattcttccaaaatgattatttgaagatcacaacgcagtaagtgttataaaacatcttataaatttagtatgtttatatatttatatataaatttagtatacacatataaatggtgttatctttatataaatttagtatcaaacaaaataaaagaaaaaaattaaaaaaactttaaaaattctgaataaaaaacttggttactaaaatctacataaagatgatttgaaaacaagttgaatgtttggaatcgctaacaaccgaagctggatccaaaatccggttagtttcatatatctttttgtaaatttagtatcaaacaaaataaaaaataaaaaaaccaaaaaacttttaaaaatccgaataaaaaactttgataccaaatctatataaggatgatatgaaaacaagttaaatatttggatcactaacgaccgaagctggatccaaaatccggttagtttcatataattttttgtaaatttagtatcaaacaaaataaaagaaaaaatccaaaaaaacttttaaaaatccgaataaaaaatttcgataccaaatctatataaaaatgatatggaaacaagttgaatatttggaatctctaacgaccgaatctggatccaaaatccggttagtttttatatacatttttctttatgtagatttagtatcaaaacacaaaaaaataaaaataaaaaaataaacataagaaaaaatctttattacagaaaaagaaaattaggaaagcacaaaccttggttctcgctggtgatcatgattatggatcgatcgatgaaacacaaattcgtctgcttcctccgcagtcgaattgtagttttaaagccaaagaatctgccaactggtcgtcaatttcactatccctctcttggccatcgtccttctccgtcgtgtaatcatatccttcgccgccgttgaaagaatccttgggtgaaagcgtttcggtggcgagatctttgatcgtgtgaaattagggagtcacgaactaaaaagtgaactcgattgattgaagattgttgtcacgagagaaggaaagcacatcagtgatcagtctcgcagggaaattgcaggtaaaaaaagaaagaagaagaagaagaagaagaagaagaagaagatcaaagatggtattttggtttttgatttctcaacgaagaagaagaaacgagagttggagtatttatcagcaaacgctccattgaaaaaaaaggaaattgtctcctttattatgttttgcgaagaaaaggaaattgatcaaggtaacaaaaagtcaaattaagttaccgttacaagaataaatacgtagtttatttgatgtttagaatttagagtgattgttgaaagagatagaacatcaaaagtcaaacctagtcatgtattaacataatgctcgaaacagaatgaaaaatatgccactagcacaatcttactcaagctacaagcaaattcacagcacaacacacacatctcctcactacctttccaagcaaaaattacgtagaactcgccacaagcacaagcccccataaccagttgctctgcttccgtttgtaatgacatggtcaatgtcaatggcttctctagtcggcttactctcactttcgtgtatctcatatttgaaacagacaagctcaccattcaaaagcttgtttagctgaacaacactcaaatgtatcaccgtcgcttactccaactcatataggaacctacctacctaatactagcttctcaatatccaagcaacaatgccggatgatggaggaagaagaagtgagattgatgggaactgtgtagaatcttaggcattgtcacaatggttccttaaattcctctgttttgtgtgtttggatttgagcaagtaacgaaacagaacaaaatatccattgttctgagggtatagttgtcatttggcacaatctacggtgacgtggaatagttcaaaccatattcaaccgaaataaccaaatcgataaaaccgaatcaaattttagtaaatagagagatgtctctcatataacataactagataagcccgcctatttaggcgggtctaagatacaaaaatcaaattttatcaatagaattttgtataataatcaatttatttttcttgatatttaatttaataattattggtttaaacaaactttcaatcttatccattctattttaattatacacactcaatcttatcaatgatatttgaattttaaaaagtaatcgatcatcattctatatgtaatttagtatctagaaaagaaaaagaaaaaattaatttatatcttacacattcaattttgtaatacagtttaactatttttgtcatcataataaactcgatttaaattctacacacttcatattgagtgataatattttcatatcaaaataatatttatgacatatcaaatctatatcctagttagtattaaaaataattaaaaattaacaaaacataactaataggcctaggcataataccccaaccctaagaaccgacccgaacccgaacccaaaattttcaaagacccgagcggttctaaacttcaaaacccaaaaaacccgaacccgaacccgaataggtatccaaacatatctcaaatataagtatatattagttatatttatacttatatatagaaaatattaggatttttttggatattttagttatttttgtttatttttagatatattcaagcaaaactactcgtgttgttttggaaatattttgaaattttcaagtaatttaatagatttgcacacaaaatttgatattttaatatataaataaactcgaacccgaacccgaaccgaacctgacctgaaatcttaaattacccaaacgggtcctaaacttctaaacccaaacccaaaatagccgacccgaacctgactcgaataccaaaacggttagggctaataattaattaaaaacacagaaatccacaaaaatatttaaaaccaaacattgttgaaaatatattttttatatatgcggtaatctcgtaagttaattttacatcatgcaaattaatattaaatgagttaaaattaataaatgaaaatattctcattaaaaataattgaaaagttaaatcctataagctaagctatttttttctcaaaatgttctattttcacttatgattacatgagtgaaaattcttaaaataaaacataggtatagtatcacatcaaaagatgcaagacgctccatcatacgatgagttaaaattcttagaataaaacataaatattcaaaattttattcttataagttcattaatattttgtgttttgatttaacgaataaaaacattgtattacattgacaaatataattttatccaactaaaataatgattagaaaattatattactattttaaacttcaatggtctttttaattagtattattatccatactaaattatatttttaagaaaataatatgtgctacatttaaatgaccaataacacatgtaaaaacaaatttgataattttccttttgttgaataaatgttaattgtttataaatatatagacatataaattagtatatgtaaattaatatgtgctacatttaaagaaaataatatgtgctacatttaaatgaccaataacacatgtaaaaacaaatttgataattttcgaataaatgttaattgtttataaatatatagacatataaattagtatatgtaaatttgtttactttttaagattttctatttttttaagagaataaaaagttaaattttgaatgacacatgtacacatctgatcgtttgacttgacacgtggcatgatcctatgagttagtaaatgaattagtatatgtaaatttgtttattttttcagattttctatttttttaaaagaataaaaaattaaattttgaatgacacatgtaaacatctaatcgtttgatttgacacgtgacatgatcctatgaattagtaactttaaaaccatactttatataataagatcatgtatggatccttttcttttgctataacttccaatttttttattttttttgtaaggttttcgaaaaactaaagatactatataatctggtgaacataaattatcatggagcacttccaaaatgattgtttgaagttcacaacgcaataagccaataagtgttataaaacatcttatattatatatttatcaaaaattatacaaagaaataaaacaaaaaaaatatctaagcaaatatttatgccagatttccagaggctttaaaagaagccttttagtataacaaacactttaatatatacgtgaatgctatttgcataaactactgtctttttcatttttttttgcttattctttgtatttcatctaaattatacaaacctattcatcagtttgatttcttctctgtcttgcaatgaaagactcgatcttgtatcgaagttcatcatcggaatcaaatctctcagcagatgcatctgtctctgatctcttcaatcttccacaagaactcttctccaaaaccttcagattctccgacttgcttcgttggtaactctgaatttgcctcttctctgtcaagttctgtttctctatcgtcatagttatgtccttatgctcaacttcgctctgtttctctctgttcacagaagtgctctgttttgtcaacttctcaggtttgctctgtttcactttcttctcagaaatgatccgtttcgtcttcttctctgttacgcttttttttactctgctctcggtgatgctctgtttctcttcgttctcttttgctttgttctcggttatgctctgtttagcctcgttctctgcttcactctgtttttctccgcttctcatctcatcttgtgaaaatccacctctccttgagctctccagaacaaaatcctcgtaaagatcgttgcttttgcacttgggatcatgttcttgattcaagagaataccggatttagcgatcagagcgatgactatcgcgtttcctatgacaaacgcaagactacggtttgcgagaataaccgatgcgacactagaatcctcaaacgtgacaacgagctcataagagagcttagctaatgtaaccaaaaccacaactatctcgatcgcccggaaaaacagatccaagattatctcaactcgagactttttcgcaagcctcttcttcatctttcttgatttaggtttctgagtactaaacgaatccattggcgtggagataaccgaagaagaaggaaaaaaaacctcaaaaaaaaaaagaaaacagaggattttgagttgctgattcttcagatctcgagaccaattgggttcttagtttagattcatgaaaagaagctgagaatttaaagagagaataatatgtttttccctttattctctcttttttctttctttcttttgctttggtttcttgaacggatttagctttgctatgtgagagtatatatacagagtcgttgagtgcgcttcatatggttactttcgttttttgagcactaaaatgcatggtttatacaaaaaaaacagtactgcagcatcaacgtaacgcgcggtttgactaaactttttattacacttctttaaatgtgaaacgtggtagatattttctcgtcacagtaaatttcagacaacttcattaaaaaaaaaatctaaatttaagcaatatatttaggggaggtcccaaaaactacataatttcctttgaaaattttctgtaattattattttttatttttgaatcaaaactgcaattaaattatttatgtgaatttccgtaaataatgctattttatggaaaatgtggtattgtacttgtaccaactaaacaagctgtagcatgttaactttgttatttgacacaattaaaaaacatgtctttatataagatactattgttcatggaaagtatgcacagctcctatagattttgttagttaaagagccctgtctaataagtgtctagtatcaaatatcataattactctgttttttaaataaataataatacataactactctgtgaaattagatttatatgagtaaagtagttttagtggttaaaaagtaaaagtttactgaaattaattttaaaaaatctgcatgattgattaagttgatcacttaggagaaaaattctagaagaagatttaagaaattgttaattccaaaattccctttttataaccaaaatcatgctgcttatgatagattcgtgactatattcatgtaaatagctgaaatatatgtgttctttctttaccgaaaaaactattatcagatttttaaaaaacgtttactagtatcccaaaacattataaaaaaaaaaaaaaaaaaaactgtagcatttaaaatccgtatcgtttcatacaacatattctcatgttaatatgtagttttgtccaagaatatattatacgaggtgtaaaaaaagaagaagaaaatcctctaattggtcgaaaaaggcaacatcgcactatattcgtgactttgtccatttgtaattatttactcgaccggtaaagcagctgccttgatatcgacatgtccatttcatatctcctttaaatttttgttataacaaattaatatgtgaaagtaatttgtagcacatatttttataataaactttatcgtaaaggtttttaggacttgaatgatcagtacaaagctttcccactgtgccgaaacaaattattatcgagtagaaaattatgttgtatttaagtttaatttttggaagatatataaactaggacttttgtttattagggttgtatgggttgccttatattatttttgtctcaatggattaggattagcttatattattgtaagaaaatattattactttttctaaagtacattttttgtatttcatgagaaaattataaattcaattccttcttcactaagagatggaaaaatggcttgtaggtcaacaaatttttgttatttctttaatgtcttgtctctttctaaccaaaagcatacaagaggtggtctcatgatttcaaatttaaattttcattattggatacactttgacaaaagccccacttcttttctgtaaaaagttgaaatgaagattcattattggtgtatcataatattattcagaacatccacaagcgaaacgtgtcttcatattttgatcggaactttcgtattaatgccgcagtagtaagaaacaaaaataaaatttgatcacttagacaaaaatgagttcgctacatacgctttagttatagtcatcactcatcatgtatatctaaaataacaatttaaaaaaatgtaagaatttgactcaaaaaaataaaaagggaacaaagtccgacctgccggaatcgaaccagcgacctaaagattacagcaactactacagtcttccgctctaccaactgagctaaggtcggataattattagtatactcacactatagaaatatagcgcttatactttaatatgggcccctaatgggcttgattagaaggcaaattatatgcgtcagcacaatttgaaaagaaccaaattagtcaagtgatgatggagttcgaccctaattaggactcccataaacaaaaatccagctagcggactacatacatcgttaaaagactattggcttgatagttgatactgaacaacaatatgaatttttaatttatttattttttgattaaaacttatatattaatatttaaagacccatccctaatatgctattttatgatgctgctaacttatttaaactaaccaatttagactaatggatgaacaccaagaatttggacttggaccacaaaacaatgcatagtatatttggattcttgattaatcaataaatttgaagttacatgcatgatgattatttatttttcgtcacatgcatgatgattaattaagatggcaaactccacgtgattaattaagaacttggtgcgtcataaatttttttaaaaaatatcaggggtgattcgactaacaaaatacgacgaaccagacatgttttgtttttttttacatttggaatttcgaagttaacttttaagaacccacttgataaatcatatgtacaaattaatgagaaattgtagaatgccaataaaaattgtgatatccaagaaaactaagcaaaatatatttattttctaagcaaaacatgtacactttttgagcaaaatatgttgaaacagcagccaagcgtaggactttgatttcagctgatggagaaggaaattcaaagtcatatccaatttattatgattatcacataattttagctgtaggattttcagataaaattttaccgaaattctcggcatataaattttttagaaatctacaatctgttgtaaagattttataaatacttatctgaccaagtcactagctcgtcaaggagatttcctcttcatattcattttcaaagacaagtgttttgttttctcatcgccacctaagatgtagataaaacaacatattttatttattttttctaaaaccgcgtacaacatgacatgcctagggagttctaacaatgggaaatgagcattcatgggggatggttgaagacattcctcctcattctcctacatgtgatgagatgtgcatcaatggtattttgtattatggagcttttattgacacaaattctaactgaacctgcaatcatgagttttgatgttaggtctgaaaagtttcttcttatcaagggactcgtcaatgccggtgttaactttcttacttcttaagagctaagaagatcttatgaggggcagctagctgtacttttttttgaaaattgagttatttgtatgtttgccttgtgggttttagaagatgttgtgaatgaggaatggtcatacatgagttttgatttctctagtttagctgggttgacaagagacttggaacttcaactgtttagtgcagccaacgcatgaaaagttgtttacgcaccattttgtgtgtatgcattgacatatcatgttgtttattatgatccaaaaaatgaatttacttttgaaaatttgagagagaaagaattatagaaaaacttgttcctaaaaactctcaacctagattgaataagtattattttccacttttagcaaaacacacttacaaattgaaacatcttaggtggataagaaaccaaacaaatagtcacaaaaatatcaaacaaattttttaagaataaaaagactacttttatgtaaatagacgttagactcaattaaaataaagggaagacacaaatttatatggatttcaactttcaataacgttaaatgtgatatgatatgctcatggcaactaggatcagaattccagttgtggcaaccacacaaatttctgagcttcgcagaatccgaatcggtgtttcacctcgtaacttagtcttgaacgcctagaagcaaaccaaatcaatttaagttgtaatattatatttattttgtgtagattgctttaatctgtgtatcttgtaatctttatatttctgtcaaaaaaaaaaaaatagtactatttaaccttttactaaaaaatgaaaatgtgatatgggaaatttcaattgtaatattactattgtagagaaagaagtcagaaattcaaaagaaaaaccaacgtaatgcccaacttaataaacatgggctttgtttttgaaagaggcccgtatagatattgacctcaaacttagggaaaccctaatataagagcaaaccctagcagcgctatctccctcagcctcatctttcacccactactattcgccgttcgcttttccctcgccgtcgaaatcaacatggtatcgttttctatcatccttttctctaactaatcacctgtattcattttcttctttctcttgtctgaatcgttactttcgttgtcatggttacaggcgccgaagaaggataaggttccgccaccgtcatcgaagccggcgaaatccggaggtggaaagcagaagaagaaggttcgtttccgaatataatttaggtttaattggaatgtgtagagagatctggtttgtagtttctgaaattgtgttgtttaagtgaagcttgtaaatggatttgttttgcgattgatgttagattagtgttggagtttgcattgtctttgtacttaaatcgttgctctctttgtttgatggtaaacaaaaaaacagaagtggagcaagggaaagcaaaaggagaaggtgaacaacatggtgctgtttgatcaagctacttatgacaagcttctcactgaagctcccaagttcaagctcatcaccccttccattctctctgaccgtatgagggtatattatcaatctatcaactccttgtttcctcaattactaatccagatctagaaaatgatagttatatcatctggcagtgaattggtttgagcttctattgaatctagtagagaatattgtgaggtgttgataacttgatctactttacctaaaagctgtctgatgttgttggtatgcttgttcaggatatggttctttactttcacataggcttactgtgtgtctaagtagatactcatgtgttatataatgtcaatttggagcttgtcctcaacgtcaagcttattttattctctgtttctcctccctgttttttttttttttctttccataacttaacagatccaaacttgatgtgtttgatgttgttgaaaattcagatcaatgggtcgctagcaaggagagcgattagggagctaatggccaaaggtgtgatcaggatggtcgctgctcactcgagccagcagatctacactcgtgccaccaacacctaagatgtttggtttctttatccacctaagatgtttggcttctttttcttatctcttgttgtttgattcttcaggaacttgttagaatcttttgtttcgtattccgtttttttgagatatatggttatttaaaacgcatcaagacttctaaaattgagtcaatcctttgatatatccgttctagaattcggtaatggagttgttccggtttagttatgcatcaaataatttaaaccgtagttctttattatagggatttgaactaattgaacgaattcattcaaaatattatttgaatgcttggatttattttataaaggaggttatgtaatgtagacatttagattgatggactaatatgaatgaatatgatgaaatgaaaataacgcctacagcccatttgacaagtttcagtgtcccttaatattttgttaataaatacatttacttttcttatttttgtcttctaactaaagaattttagtgtttataattatgctaattggttttgcacttaaagagtaggatttattcaaataatttcccgacataatccatgcgtgatatgtcctttcaatttcgtcttctcacccgttaatcaaatgggcccagcttttcaatccatttgctaatctgatcaaattttcctataacgcttacaaataacaatttgcaaaacatcgtcgtcgatcacaggaaaacttccctttagacatttatttcgccatctcggaagcttagacgttggaatatatatctattttcttaactaaccgctgatttttgtattttcattacaaaaaaaaaaactattgtaatgccatattcaaaatagtatatgctttggtacagtagaaataatatcaaccaattaggataaattttctttccattatataattagtctccctagcttagaggcaaatttgtagtttgtgttacgacgtgtacggactatatagcacctcaaagttgggccaatgagatgaaaatgggcctgggtccacatgcaagcagacaaaagaaatcgacgtgtcccatatgagtctcgtagcaagagtatgggagaaaccagagtcgtccattttttgggttcagtgactgtcattgtcagatatctatagctttgttggtaaaatttcacatgaaaaaattacataataaatagagaagagattttggaagagagaaaatgcaatttagctcctcacgtattagcaatttaagttcttgtcttggtcttccctcgatttcaaacgacattaaccaaaaccagagaactacgaattattcggtgagttctctcattgatacgatcctcttctatatatctccgtgttcttctagcttgaaagcattttaaaagtttttacttttggaggtttcacattctctccctgaacgattttgctttattttgttcagcttcggttctcgtcgaatcttctgtttctctgtcgattcattgatctgaaaatctaaaaatggattcattctgatttaacttttatcttgttcaaactcatttatgatcccaaatttgttcgtttcattctttataaattagaatccttttttgttcttgtggcaattatcttcctccttttctctgttttgaaagatttgttacctgcagaagttaattccattgatttcttgaagatgcagtatctcttgctacttaaaagagttagattttttgtctgatacgttaaaattatgagaggctcgttcgttctttaatctgtgtggtcaaagtttcctactttccgagaatttctttattgttgtgttgttcactttgcatttataatagtttttactaacgagctttacgattctgttcttgtctcattccagctaaaaaaagatggattcttgttgcaactttagcttggggacaaaaactgtcttggccaaagacagtttcaagaatgtagagaacaaatttttgggtgagaagatcaaaggaagcgtcttgaagcctttttcttcagatttgagttccaagaagttcagaaatcgaaaattgaggcccggtgttgcttacgctattgctacctcaaagaatgctaaagaggctttggtaagttcaatgatcaggtttatcaaaacacttgaccacttatctgtggaactagtcttagtgattgccttaaattgattgctttcatgttttttttttccagaaaaatcaaccttccatgtttgagagaagaagagcagatcctaaaaatgtggctgcaatcattctaggaggaggcgatggagctaaactctttcctcttaccaagcgagcagcaacacctgctgtgagtgactatcgattattgatttaaacggtcttcaaaaagaatttgttgtgtaaagtggaagtctttagttttctgattcttgaaacacaattatcaaacaatatttgcaggttcctgtgggtggatgctataggatgatcgatatcccgatgagtaattgcattaacagttgcataaacaagattttcgtgctgactcagtttaactcggcttccctcaatcgccatttggctcgtacttattttgggaatggcataaactttggagatggttttgttgaggtatatatataacaatatggtttcctttataaacttctcagtttgtttctgaatccgatgaaataaaacaaaggtaaaatcttatcgaaacaggttctggctgctacacaaactcctggtgaagccgggaaaaagtggtttcaaggcacagctgatgctgtgagaaaatttctgtgggtgtttgaggtatgaataacttatgatcattttacttgttttatcatacattaagtctgttcctttatgattctttaaaatcgtctgaatctactggtactttttattataggatgctaagaacaggaacattgagaatataatcatcttgtctggagatcacctatatagaatgaactatatggactttgttcaggtaatataatagtaaacattcctcttaccagtttcaaaactagtcttgctaactaactctaaacactatgcattggacagcaccatgtcgatagtaaagccgatattactctttcgtgcgcgccggttgatgagaggttagtttctttagcactatgatgtgacttttgtatgattttggttttaagatgttaacttaatcttgaaaaccccttatgtgaattttcagccgtgcgtcggagtatggactggtcaatattgatcgaagcgggcgtgtagtccatttctctgagaaaccaactggcatcgatctgaaatcaatggtacagttttattttctaaaacttaaatacgtacgaaacagaatggcattgatctgaatatttttctgttgttttgacggttataactgaatgcagcaaaccgatactactatgcatggactgtctcatcaagaagcagcaaaatctccatacattgcgtcaatgggagtttattgtttcaaaaccgaagctttactgaagcttctgacatggcggtatccgagttccaatgactttgggtctgaaattattcctgcagctataaaagatcacaatgttcaagtaaaagaaaaaaaaaaactcttctctttttaaaagaatttgttgagttttatcactttatcacaaacgatttaatcaaattgtcttctttagggatacatctacagagactattgggaagacatcggaactattaagagtttctatgaagctaatattgctcttgtcgaggaggtaagttataaagaggaactataaagagtttctatgaagctaatatttttggttaatacccaaaaatgtttcttacttttgaatttatctatgattcaatctctcaactattgttctttcgttcttgttttacgcagcatcccaagtttgagttttacgatcagaatacacctttctacacttctcctcggtttctaccacccaccaaaaccgagaagtgccgggtagagatctttctctttacgtcgaagtcctctttgtttgcctgttaatctcgagtcttgattcactgattggtatgatcctcgtgatgatttcgcagattgtaaattcggtaatctcacacggatgtttcttgggagaatgcagcatccaacgttccattattggtgaaagatcacgtcttgactatggtgttgagcttcaggtgtaaatccttggtcatagaatgacctatagctgtatggacattgtcaaatgcaaaagctgagtctggtatttgtttgcttcttgcaggatactcttatgttaggagcggatagttaccaaaccgaatctgagatcgcgtctctgcttgcggaaggaaatgttccaattggcattggccgagatacaaagatcaggtatcaatctgaaatcacaatatcttctatgagtttgattcttaaactctgatgctacattttattacattgaaggaaatgcatcattgacaagaatgcaaagatcgggaaaaacgtggtgatcatgaacaaagatgtatgctttcttctccattcttgattctctttgcgttttctgtctttaagtcagtaaagatcaagacttttgagagattcaacatcttaactgtaatcgttttatttctcaggatgttaaggaggctgataggccagaggaaggattctacattcgatctggaatcactgtggttgtcgaaaaggccaccattaaagacggtactgtgatatgaacaaaacgatctcaagaccgccgtggtgattttgaggtgtttggccggaagttaaaaagagagaccgttgtgattttgtcatgtaaattagaagaggagatagaagaatcatacaatttagaagcaaaagcaagtttaagctttacaataagagtgatcagccgatcacctatagctataatagtcactctcttttcataatgatcaataaataaagctatctatcttcttctgttttggcaatttctcaattaggggtttaatttaacattttctaaataattggggttaaactgaatttattactcctctcagtggttttgcgtaaatattaaggggttaaattgataatggaaaaaggttggggtcagataaaagatcgaatagcttttataagtgacgtaaatatataaaaacaaaacgcggaaacaattaaaaataaaatcaaaaataaatcgccgatcaatccatcttcttcttcatttggtattgctgcttacgtcgtcagatctgctcgttttttcgctccatttttgggtcaccattactcagcttccgtaagtgttttgattgtttgttttctccgaagttttgaatcaatgatctgagaaaatttccctgtttagatcgacgattctcaaggtttttgttatgtgcttgttggaatcgttttcgccgattgagtttctagatctgaagttcaatcggtgattacgattgagatagttgctgttgttactaaggttttgattctctggtcagatacattagactgataaacattttatggcgttttctacaaatttgtttgtttcctaggttagttttcttctccactcttaagtagtttcggttgtgttcagaggcgattccgtacatgattttctgggaaaatacatctgtgttcatctcccagtgaaaatacttggataaaatcttctagtgtccaattactattatatgggaagagattatgtgtaatcttgtatgttaggaacaaaacctggggttgttaattgtgtagataaggtgcagagatatgtgaatttgaccaaccaactgttttgttgatcctttaggttttaaatatcacattagatggacgaaagcggaggtgatagtggttcagtggccacacctgttcaacagcgagcacatgaggcatggaggatttaccaacactatcttgacaagactacacctcatgcaaattacagatggattggaactcttgtcgtcgctcttatctactgtttgagggtttactatattcagggtttctacatcatcgcctatggtcttggaatctaccttctcaatctgcttatcgggttcttgtcccctcttgttgatcctgaagctggtggggtctctgatgggccttctctgcctactagaggttctgatgagttcaagcctttcattcgccgtctccccgagttcaaattctggtaatgccatgtcgaattctctcatgagcctttatacatttttgttgatttttccaagtttaccagttgcaatgtcaaattcctttcatgatctgtcgtgagttttaaattccttcatgatcttttttttactgcattgctaccttccatggggtcatgattgatgatgattgtagattctgggaatgttctgaatatctctgaatgcatgtctccatagtccattctttgttcattttagtatttttgatgtttgaggctttcacaactgatcctggtagatggagaatcacagatatgtgagcagtaagctttatcttctcattacatattgcattctatacagttacaacatcagaatccctgtggtggtatactataaaaacgtaagataccattgtcttttggctaatgaaggatagctacttacatgtattgttgtctcaggtactccatgacaaaggctttctgcatagctttcctcatgacattcttctcggtgtttgacgttcctgtgttttggccaattctgctgtgctattggatcgttctctttgttctcaccatgagacgccagatcgcccacatgatcaagtacaaatacatccctttcagcttcggcaaacaggtaaaacttctaactgattgcggttttgacttgcaagttaattcatccatttgtctactcatgcatgttacattttgcaactgaatttttgatagctacaccaacttatccacattcatatcggtcgatacaagatacttgatgaatagtgttatagattttgagattaattaggctacttccaaaaagtctttgttttcttggtaataattgttggtttgtgtggcagaaatatggtggacggagcagcagcggctcacgtgcggattgatctgaccaatttgctgaccattagctactttttttgtctttgcaaaagagaaagaaaaaattgttaagaatatcattttggaccatttttacattgacaaaactatgcagagctataaggaagaattataggcaggataaaaaaggatggaaactaaacttgatttagctcggaagaaaattgttccctttagttgtttatccatgatttgcaatatgatctataatctgttgctttactaattagacccgaaagcagactactacttcgactataccggctgccgcttctaaacccgtgaatactggaccgtgtagtaaacgatgatacatgacactaattgtggaccaatattaaccggatctaaagccttacattcaaaataaaccaccacttcggtttgattagccggagaaacagacaggttaatagccacttatttaaaacccaaaatacaaattgtggagagtcattctcgttaagcactcagctttagacatattggttgaggatttcatcaacagtagtgtatttgacatcagggtaaagctcagaagcttctaccccgaaagaaggttcgatttcaaagcttgtgtgtcctcctttcacgaaaacgcagtgacaaagggatagcatcacgttgagtgggggtgatgattctgcagaaaaaaacaccaaacccatcaatggacataataactagacaaaattgaaagaagaagaagaaaggtttaggatcaaaacctatgatctgtttgaggagttgttcttctggaacgtagattctttcaagtgttttgccaatcttgttctcccaaagcgagacaagatcattgaatgagtaagtgttcattggtggcctaatatataagatcttgttcaaagttcttggatcatctacggcattgattgtgtaagttccgatgtcttcttccttgttgaacacagctgcaaaatatcaccacaataagaagggagtaactggacaagaaactgcggatgtttcagataattgaaacatagtatcctttgatccatgttataaggttctgacaaagacctttcagcttcactttggtgttttttaaaccaaacataaccatattactctaagagaatttggatctcgatttgtattataagaaaactaagagtagtcttacctttggggttcccatcacctaaaacaatgaccttatcccgtggagcagaagtagcaccaggctgagctagagttgggaggaagtagccagcgaagaagttgcatgagacataagtgtatgggattccttcggcctcaattgttcgccggattttggcctttgtagcataggctgacttggccggttcgacagtgaaaacacggtctacgtcatttccaaactcggagggaaagaatctctggtaagacaggtgtgacggtagtgcatcagttggagggtcaatttgatatcagagtctataaaattgttactcaactctatgcttagtacaacatccaagttcattgattctaaaaagtatcacagaagacaccaaaaccaatgcattgcaaactacattgtcaatacaagaagtaacaaaattcatttgtaggggttccaaatgtcatatgagactaagattaagactaaagttgattaccttaacattaccggcttctttaatggcggagatgatcttgtattgatgtcccaagagggagtgcccaacagtagagatgaccacatccgcttgctttatcgaattcacgagactcgtatggtcgtcaaggtctccctatccagttttagtattataatcagaatcagaaaatcactaaaccattgaagtaaacatttgtacggaggatcaaaggaaagagaagagcgtaaagagatagatacgtacgaggagaaactgaacgccgaggttcttgaaattctcgatggtggaggatcgtgaagggcttgtgagcgtcgaatttcgaacgagaactaaggttgggtggccagatcttgcgctcgcttccactatatatttcccgatataacccgttcctccgatgaacaggattttgcttttactcgtcatttttagactcggattttgccggagagagaaaaagtacggtggctggtgcctggcgggtaacaacggaatgaatcacagatgaagaagagaactcttatgatcccaaaattgcggctttttaattcttctcacccgttgcttccttttacataaatagtatgaaaccaccacactctgagagagagagaagaggcttatggagaatctgacaataataccctctgtagtcaacacttacgtttactttttagtcaaaagttgagacgtggttggtgaaattggcggctttttatgactcaactttctttgagacgtgggctgttatcctaatagacgttgtaataatgtttttattgggccatcgtgaaaggcccatattgttaacattattataataaaacgatgcgtttttcaccacttgttctgcaaggattaacagcgtcttctcgttgtagctgattactaaaactaaacaagtctagaacctcctcttctcgtttagaagaagaagaagaaggagacgaattgaaagatctcgtagaggtaaaattaatcatgaagctcttattcttgttcttcgatctctttccttgcttgtagttaggtggatacggataatggatggtgatgttcagttcaggatttgaaagaattttgtttggaatcgttgagttttttttgtttagggttctactttgacaatttgattgtgtactttattgttttggatgtgctgctgaacctgaacaacaacacccgacgattcatttcggtttttgttctagtttgtaaacaattatctctactcttttataatattgaatgtgcattttgggattatgaattttctggttgctaagtgtcgtttacttgggttgaatttcttgttcaattattttgcaggtacaaatggagacccagacaaatcaaagtccgaaaccggccatgacttcatgtaggaagaaggtaaaggatgatgccactttctttgaggacgtgaaagatcacattgatgactttatacatgcctcaatggatgaacacaagtcctgtttccaaaagaccatcaaaaaggttctttctcaactctcttattatagcttagattttttttttttttttttttttttttttttttttttttttagatttagtcctcgaataaactctcttagctggtattcaatgtttcagaccccatgtactcactcataggagattgttgaatacacttgctacaaattgtgatttctggcgtcaatcaatttgctctttacagctccatttggtgatcatctgtctcctaaacttaagcttatgtatgttgatttcagatgtttggattgtcaaaggcggtcgcagagaagcaagctgtggaggcaaagggagtcgagagtcaattgcctcttcagacgacagtctcggagtaaagactagcttctttccttctgcgtttgatgtcgtttctcttgtttaacatcacatataagtttctttgtaaatcaacttttccgacctagagaccagatttgaattcaaacatttcaaatgttattggtttgatctttgttaaacaaacagctggtaacatagtttctattaatcatacaatatacttgcatacataagagtcgtacaacaaagaaacaagagaaatatattgcataacttagcccaaagttccaaaagatatctatattaggttctggataccaatatccaataaagcctcgtatgttgtttgtttcatcttgaacagaacaagctgctccggtacacgtttacagatatgattttcaagcttgaagctgcaacatacaagaacatgacttatgaatgcccatctcaacaaaaatataccatcacacttaatctaagcaggataatatctgaatgccattgttacaagacataccagaacaagtatcaatccaaaattaatattatgaattcatcacaaagccaatgtcattggagtcgggagcatacctttatcaaactgttacagttagacatcgtacaatggtggaaggttctttcaaggtaatgacaatattagaccacaggaccgtcccccaaatctttcctccttccctcctttccaatctgatctccgtgcaacagattttggttgaacccttctcaaggttaaacataatcgcaagatttcccccgagattcgacattctcgagccatcacgcttgtcaggaagatcgtcgagacccttcaagcgatcccaaaccatggcaattggatcaaacacccatattctattcttgctaccaaaagtgtaaatctttccatcaatgacgcaagaaccaacactccattgtgtgtccaacaactcatcagtctccaacgtaccttctttaggatcataaacaaagctattctttcgatccataatgtaaatcttatcatctatcgcaaaacttctgatggttaagtcatgcatttccacattattaacacccaaaccagactcccaagtttgagtctttagatcaaaagcctctacccaattcacagacagagggttacaacctccgattacatacaatttcccatcaaaaaatcccacggcggcgcagccacgtgcctgcttcatgctagggaggagacgacacgtgtgagatggacattcgacgacaaacccagtggagaccaattcattatcaatgcatccaccaaggacgtaaatttcagaatcaatagcgacaattgacattccccagcaaggaatcgaaggaaacgacggaatcggaaccaatctatggttatttgaatcatttccaaagggtttgaaattgagagtgtaccatcggggagtttctgtagcgtgagatctaagcacaacataaaggacacgctcggtgcggcgaagtaatgacctttcaacgtagatctccggtgaagctatgagacgcctaaaggtcttggagacgagtgaaatcaccgggtagtaacatttcggcaagcgtgctaagcaattcagaatgatttcgtctggaagtagtaacagatacgatgaacaggacggcgatggatcatgctgtttctttggcggcggttcttcagcgattgagcttacggagctcgaactcgcggcggaaaaaggcataaccgctgctatgagctgctttttttagtcaaaagttgcaaatgaacaaaaccgatcatcatgtcttctcgcagacatacaaatgggttgagtacttttatcgaagtaaagcccaattatgtttttaaatttatatttatattttaaattaaaatttagtcaccctgatgggcttaggcccatatttctctattaatgtgtactttttataaggtatcttttatactttctcagtttcccgcttttattatctttaatcacccaaatgggcttaggcccatatttagataaaggcctcaatgtgcgattttataagttttatctttttcgcaagcatcaaatttcccgccatgtctgcgtctcactttattggaacaagtttttcgtttttaaaatccccaattcataaaccctgatggtgtttcctaatggaatcaaagctcgcgattactaatggcagatttttcgaggtagcttttttccagctatgtttttgctttagttattcattttctaagacaatgattcgtgatgacgttggagttttcattacaaataaccttaatacagattcatttgttaaaactggagaatcgaaagatatggagtcctcaaagattatgggagaaacattggaagtaggaatatagatataaacaataattcgcaattgacagggttacgagaaaaatcgaccggtgaatcctcttttattctcgatggttttgatttactgcagcctcatgtttctcatcctgcataaacaaattatgaatcagattggtgtctttggcttggattgttttgtattcttaattatagcagaatgtgtcttttttaggacaatacataccttttttcctcctgactaagcctgccattagtgcagcctccactagtcctgtagtttgggaatggaacatgaccgttctctatgctgttgatgtcttgcactaagagttcgtagtgtctctttacctcctctgttgtttttccacccacgactttggcaacattttgccaacggttaggagtgtcctggtcataggttgctagagcctgctcaaaggctttgttctgcttagcagtccacgagccagagctctgagaagacattgagcttgatgccatgttgagttatagactaatataactggttagaaagagattatttaagtatggggagattacgagtcaagaggatgatatgtgcatagatgttgcagaatgcttcctatttataaggtgagtttcggtggtgccagatgtagcaaatatcttgcaaaaacgaagagaattttaagtcattgtctccatagtaatcgactaatgagcaaaaagagaatatcagcaagtattgtggagatcagtatatgatacttggcagaaatatttcttctgtgttttttactgctgtgattactttcatgtcttcttgattgagttagagacgtgttaccgtcagagcaggttttctcattcaattctagatttaagtcttcatctactttgggaaactctggcctaacgttatctctgatatacattgactacaacagtaaaaatttgcaaatacattggatctcattgactatcattgtttctgatattaactaggtggaacttttcaagggttcaccatgagccatatagcttctctttaactaaagtccttgcaggaaagttggagatcaaactttattgttgattggacctcagggatactctgtcttgaacatcatatcaagatacagaagtctctttgaagtttggcaacgttgcttttcttggtcatctatattattatttgcattttggtcttagatgtcatactaaataaatggtcactacttacttcaataactaacatggtatgattcatgcgcattaattctttaacatgcttacgagatttagtctatcttgtggatgtgcaccaatttgtggccttgcgagatatttccatttgtggaattgtggtacaagttttaggttttaagatattgatgttctgagaactcaagagactgccatggttttgggataaactactttacaagaaagaaaagttcaaacaagacaaaagaatcttaatcatgagactgatggctcaatatattctagaggtatagttgctagttgctacgggattctacaagtaggcatttcacgatatatattctcatcattgtttccttcttacctaggtgttaaaatggtaaaaaatatacatttcactttcagcgtcttgtaatctcttgagctgtgagataatagtttatgtcagaaacatcagaattggttgttatgcaatatggattcgctgcatctttacttttgtgacatgaaaagttacatagggtaagatttggtggatttgattccatatctccatcttcaagttgcatttcctatagtgaaggtaccggccattttatgaaacacgttgcttagctggtgatgattggtgtaaattgccactgtagctttacaagaatatgtggggaaaagaaaggaaagggtaagcattatattcctcaactagtggtagctccttttgcaacttgaggaactaaatcctgatgtaatcttaagttcctttgtagacttagctgttgtagctcaatgaagatgcttatttctatggggttgctatagtagttcataataactttgttaacaaatgctaagtttgtttttttcttccaagcggtgcagactgttgttgtcacttggagagtgagtaaacagagcattgctcaacaagcctacacattttacaagagacaaaagtacacatattgtagcatatccaaagtctcatctatgtgattttattgtttgtttaatagtcattttatggattaggatttacatttttggtttgagctcattgggctacgttgacgatgatatcctttcacgataaaaagatgccgacaaaaagaaaagtaacggaaggggaatattcgatgaatatcttgttgtctatatattctcagtcaaaaatttaaacagaagatactagtattaaatacccaatgtccacattggatcggcgcaaaactgagtgacgatcattttcgataaaatagcactaattattggtaggtcaaaagttaaagaactaatcaatttcaaactatagtaattattgataagaaaatcatttgaatcctttagctgctgttcgattaaatacatgtgtctaacaagataaattatttgagggaaaatctcgaatctggttaaaaggaaacgttataaatttagtaaacaacacgcgaattaacatttcgttccagacaaagaagacttaaacgaaactgtttcatcaaaaaagtaaaccaaacgaacgataaccaaaccagaagtggtgacacaaaaccaaatctaaaccaaaaacagagcagcagcacgcaaacaactctatctttgattaccagccgccaccaccgcctccgtaacttccaccatcaccgcctccgtagccacctccctcacggcgtccaccaccaccgtatcctcggccaccaccgcctccaccagatccgtaacctccgctacgtctctcgtaaccaccaccgcctcctcctgagtatccgccgccaccgcctcctgagtatccaccaccgcctccgctgcggtaaccaccaccgcttccaccacggcctcctccgccaccgccgctacctctcgactgagcctcgttcacggtgatgacacgtccatcgagctctttaccgttcatctcttcaatcgcatccctcatggctttctcgtccttgaaggtgacgaatccgaatccccttgatcttccactctcgcggtcgttaatgatctgtaaacaaacaaaatcatacacatcagcaaaaacaatcgtggaaggaatataaaacaaagcgatgaatataaagcaaaaatcgatcgatctccgagctcatagaagcaggaagatgaacgtaccgatgggacaaattaagtaacagtaacaaagaacgagagagaacatagtaacagtaatcgaatcaagtaacagagaaacagatcggaatcagatccgtcgaggatcagaatcatcggaatcggctcgatccgggagaccgatctctcgtgtaacagaccttagaatcgataacgtcgccgaactgtgagaacgtcctttgaagatcttcatcattggtggcccaggcaaggccgccgacaaagcaccggtactcaacttcagacatttttttttggggaaaagaagagaaattagggtttcaaaatgtaagagagagacttatgtgatttgaggtgataagacgcagccttaatttatagaacaggtgtgacgtaataactagggttaaacatgttttctagggtttgctgaaagatttgtttcaacttactctgattaagatgtgtggttaattgggttagtggttaggcccacatcatgtgagcattttcgataactaatgattttttctcctcgtttcgagcaaaaaatatctttgtaagaatatcttttattccttaaatgacaattttgtccttcgtctcgtcgtcattatgtcatacaatagttgggtctgagtttcgtttattgggcctatctaatttaattggaaagattataacttccggcccaatgaatctgacggcgaaattagtaaaacaataaaatgaaataatatgcaaagactatgacgataatgtgctatggatttacatatttgttttgtcattaattatgacatgcaataaattcatatgaaaagattcttatcgcaatagcatcgtggacatgttacagtctgtaatatccaaactttagcatagacgttttttgttgtacaaatattttggtatgttaagtgatattcaaatgaaagctagatgtgcagatatgtgaacatataaatctttcaatggaattcaattttcaatcattgaatatttggatacactcgctctgtacttgaaatattttgactgtctgaatattatttttttacaggattaattattttgtataccaaaattagacggatgaagaatgaagatgtagtagttatacaaagtcaattacaaatggttcagtatcttgatttcgatttttgtgctgaaaatgctgactaaagcgtgtagaagagctttttcaacaagaaataacctggctaagatttttttaagaaatctgattattaatatatcgcaggtaatatgaaaaagtatcgtcgactttttataagagtgacaactaaatcattttgctcataataaagccacaattattattagtatattttggtcgttttaatacgaggaaaaataattgtcatacaaaatttacagaaatggagtagcatcgtagctcctaggaattcaattatttatttgcaaaactactaaaatggtggttatcatattaaacgtcagcagaaactttaagtatttttgaaatgatattaatttaagagttcgttaagctgtcttgggcgggatcgttgagagtcaaactcctcaaacgacgccgtattcagaacttcactttcaattactgtatctgcgtctcggtcacgagatcgaaccataaatcttgggaacgtgcacgtatacaacgaaagatccaccttctctcactttttttattttcttatactttcttctcttttcttcgaacggccgctgttcttgaccagtctgaagctttctctgtccagaacagttctgtaagaagaagtttttatcaaatattatataaaaatatctgtttcgtattatatcagactttccatctttctctctctaaatctaggacaaaaaaaaacatggaagagttagagagagagagaggcagcagaaaatgattggtaaacaacaatgaatcgtttttgattctgaagtgcacagagaaaagtaattgccagagaaagtcgcagaggtaacagagtgaagaaccttttttagtatatatctttgttgaataatcacaaaaagaaagtttcctttattgatcggattcgaaggaaacccaaaaaaaaaagagatttgattatttccataaatcgcgaagcttttttccaattgaatcttaggcaatgaatggctttaagtttttcgaagtactagtcgtcaccagggtttagagaaaccatggtggttctgaggaagacatccttgttggtcttcttcttattcctcctcttgttgttagagtcaacgtttgagcaacagacaagttctctgaatgagaaatcggcgcttctgctgttaaggtcttctcttgggttacgaagcagagattggcctgtaaaaggcaatccttgtctgaactggaacggcatcaaatgtgatcagaatggtagagtaactaagatcaacatttcagggttcagaaggacaaggattgggaatcaaaacccggaattctcagttggttctctcgtcaatctcacccgtctagcttccttcaacgcctcaaggttctatcttccaggtccaatcccggctttgtttggatcgagtctgttgactttagaggtgttggaccttagctcctgttcaatcacaggaaccatccctgaaagtttgactcggttatcacatctcaaagttcttgatctttcaaagaatgcgatcaatggggatattcctctgtctcttacctctcttcagaatctatcaatccttgatctttcctcaaactcggtgtttggttcgattcctgctaatattggggcactctcaaagctccagcgtctgaatctttcgcgtaacaccttgacttcttcaatacctccatcactcggagacctctctgttttaattgaccttgatctcagcttcaacggaatgtcaggttcggttccatcagatttgaaagggctaaggaacttgcagacattggtaattgcgggaaatcgcctttcaggatccctacctcctgatctgtttagtttgctgagtaaacttcagatcattgacttcagaggcagtggtttcataggcgctttaccgtccaggttatggtcgttaccggagctcaagtttctagatatttctggaaatcacttctctgacatgctgcctaataccactgtcagttttgattctactgtctccatgcttaacatatccgggaacatgttttacggcaatctcacacttttactgacaaggttccaagttgttgacctgtcagaaaactattttgaaggtaaaattcctgactttgtgccaaccagagcttcattgagcaacaattgtcttcagggcccagagaagcagcggaagttgtcggattgcactttgttttattcaaaaaagggcttaactttcaacaatttcggacaacatgaagagaagaagagttctaaaacttcctggttaagccacacgaaaatagttatacttgctgcagttggagggtctatattgcttatgctcattctcatagtgttaccaataacagtgagtttctgtgtccgtcgaagaaacagatcatcaacaagtaatcatcctagaggaagacacaacggtgttggcccattacctcctgatgaaacacttccctcaagaggaggagtctctataaactttgggagtcttggatcatcatttacctatcagcagttgctcaatgccaccaaggagttcagtgattcaaacctgatcaagaaaggacaatctggggatcttttcaagggagttctagaaaacggagttcagatcgttgtgaaaagaatcagcttggaatctacaaagaacaacgaagcttatctaaccgagttggatttcttcagccggtttgcgcatccgagaataatcccattcgtagggaagagcttagagagcgcaactcataagttcttggtatacaagtacatgctgaatagggatttaccaagctcattgttctataaatccaattccctagttgacaacggattgagatctctcgattggatcaccagactgaaaatagcattgggagtagcagagggacttgcttacctgcaccatgattgctcaccatccgtcgtccacaggtatgaaaaaccattccttttactctttttttactttcaagccaccattagttcattactgatcttgagtcttccaatgttcaataagggatattcaagcaagtagcattctcttggatgataagtttgaagttaggcttggaagctttagcaaagcttgtcatcaagaaaacaatggccgtccacggaaaatagcccgattgctcagactatcccagtaagtgcctctgattcatcatataaccaattttgatttaaacatctaacaaacaagcttgctactgtttccctcttcaggtcttctcaagaaagtgttcctggtgagtttatcttcaaatgcataaaacaagcttgctaatttcttaactattctaacaatccctaaaattcccagggtctgcagctacagcaacatgtgcctacgatgtgtactgcttcggcaagatacttctggagcttatcacagggaaactcggaatcagctcatgtaaagaaacccaattcaaaaaaatcctaaccgagatcatgccttacatttcatcgcaagagaaagaacccgtaatgaacattctagaccaatctcttctggtcgacgaagacctcttagaagaagtctgggcaatggcaatcgtcgctagatcttgtcttaacccaaaaccaacgagacggccgcttatgagacacatagtacaagccttggagaatccactgagagttgtgagagaagacagcagcgaatctgagagattccgtacgactggatcttcgagaggatcttcgagtagcggtcgaatatttggtagttggagacagagcgtgtctgatcctgtcgcagcgggaacaagtagccttctgtctcaggcggagggtttagcgactggatcgtcagcgagaggaagtagccgtggcgcgtcgagtcgacggagtatgaaagatgtatagaaagaaagacacacacacacacgatcaatatttattttttgacgtcaatttttaattattttttatgtgtggttatgatttgatctcttgttgataaaaaattcccgttaatttataatatttttcgatgatcaaaccagaccagtcttttgagttttgatattctcgggtagcaaactagcaattcgttttgtatggggtgggaatcgaaatgttttatactttggggcaattatataaaaaacgaaaagtttctgtaatgatgtgtgaatgaggctaataaatgggctgctgttatctaaccacgttgcatctttgcacttaatgggcctcttggcccagttacttatttatttgatctaagttcttattccttacatcgtaaataccacctcacaaactttataccatacaaaaccaaatgctaagtgaaaattaaatttgacaagccagattgcaattaagagtatacacatgtttaagatggaattgtcaagtccaataaccaaaggtagaattgtaaataccaagagataatcaaataaagtatcttgaatcaaaaagataaatcaaaatatcactcatattccaactcggcagatcggattccgtttaataagatcgagatccacctgcgacaaaataatgacacatggattgaatatatatatttccaatagaacaaagaaatgtttacacaaagttttcttgataagtgaagattttgtgcataccttgtatatacaaagaaagaccgtatgttttttctagcctctcgtcgaaagcaatattgaaaatctcctagagtgaatccgagtacttgatgttgtatacctgaacaacccacgatctaagatgaacactcaatacataaattttaccttgtattatacccacggccgaagatagtttgtgggcttctagaaccgtcgaacggagatggtttctcacatagttgggataataaatggcttggaatgtgttccacaattgattgcatcgatagttgagccgttactcacatatgttgtttgaagtcagaaagtgggaccaccggtcacagtacatacatattttcagagtcaccaaatttcttttctaacgaaaaccactaaaaccagcaattccgtaaagcaacaaaaaatacgtctttcttaacatttaattccgatcggacttgatataaaatttgaaaaatctattttcgttggacggagggaatattacctaattattatatgtactgcatcttaattattattattattattatatatatagctttgttacataatctgtgttatctagattcaataattacaaaaaccaaaacatcacgtaacaccaaattaattgagaaaaaaaatataaatatagaaaaaaataaaaaaaatatatttaaaaaaatctcaagtaaatcatataaagcaaaaacaattacgccaatgtcgtcgtgcacaatgatgagttcaccgcaaatatccagcagttacaacgttgttaatgtttaaggaaatttgatgttgagagctgcttggaccgtatctcaatacttatgtatgtgacaatagattggtaccaatggacattagctacactagattctattgggccacattggcccattccaaacatacgttttctcccacatgttaggtgctgttgcgattgattctaaaaatatatgccattggcacaagtatagactatgcatcctaaatatgtatgccattagtacaagtacaaactttataccgtacaaaaccaaatgctaaatgaatattaaaattcgacaagccagattgcaattaagagtgtacacacgtttaagatggaattgtaaagtccagtaaccaaaggtagaattgaaaataccaagagataaccaaatagagtatcttgaatcaaaaagacaatcaaaatatatcacttagattccaattcggcagatcggattccgtttaataagatcgagatccacctgggacagaataatgacacattgattgagtatatacatcaacagaacaaggaaatgtttatagaaagatatcagaataaattaatatctttgtgcttaccttgtgtccaaacaaatctcggatgttgtcgataccgtataatatcattgttggtctgtttaacgaacaaaaagcaagaaagaatcagcaacgaccctgagatgttgaagggaattaaaaactcgtacctttcaagagagagaccccaagcgatgactctaacatcctcggggagacccatcggtagaagcatttcgggtctgaacatcccagagtttccaatctccacccacttccctaaaccttcatggtagctgacatccaggaacaggcaaagtttaactttttctctctattcttacgcaatttagatgactatatttttttaccaattacctgaaaatctccatgcttggctctgtgtaagggttgtaagctggcttgaaacgcaatttcgacatccctgaaaagtatgatcccgtaaagagttagtatttctctcttgagcctaagcgaaccaaagttaagattcaatagcgaagagtttacctaagcgtgagaagaagtcttctaatacaccaatcaggtctccaagtgtaaggccccgatcacatatcaaacctgatccaaacatgagatcatttaaccgattatgaataaagtttgacagaagattatgctaactttaatataactccccacagtgacaactctgaccattagaactataccttcaatttgatggaactctgcaaggtgggtccgatcaacagcctcgtttctgaagacacggtcaatcgaaaagtacttcttgggcacaaaaggtttctacagtaagatataaatctaattatactactgaattttggaaaccaacgtctcaaaacctgtaagctaaagtctagttgaacctgtgctagtgcataaagcatcctagatgagacagccgttgtgtgggtacgaagaagattcttgtttgcttcttctcttttccaatcataattatacctttattgcaaaaggccatgtcagagtgattgcaaattaattattatttattcaaggtggtaagaagatacaagtcaattaccctcttgatccataaccaccagactcatgaacacgtttcaccctctcaacataatcttccggaagtgttcttgtagtagagggaactacattcaaagatttacgtcttaaatgtaagagttatctattctttgagatgtcaacaagcaacctagaaatagctgtcctaaacaacaaatttagtgacaaaggattcaagatttgaaccttttagaaagaaggtgtcatgagaatcacgagcagggtgctgctgaggctggaacaaagcatcaaaattccagaagctgtagcgtatatgaatcagattaagatcagccaacaaatagcaagaaaaggatgtataattagatatccttaaagcctccatggaaagctgaaaaccaagattcttaataactagaggatacctgctctccacatagttgtttgttggcatctcctcaaacctatgaccacataaggctcaccattaattttagcaatcaacagaaaaatggggaattacaatatatgtgaagagtttctctcaccccatctgaacaaatatgtctttaaactgcttccgcacctaaggtacaagaaaagtaatataaataaaaactatagaggtttgataaagaaacaacaagcttacactaaagggatacgacaagttcattttttgtgtcatgttaccttgagaagagcgtgaagatgcccagcgtcaacaggcgctcctttagctttgaagttatactccttaaactctaactctttccagctgcaaatataccaaattcctctcttaattgcatattcaacctacaatagcattaagaagttgaaaaaaaatgcaaggaataggacaaacttttgaagattttctcgagtcaaatcggtagccactttctttctctcgggagcataattaggacctttctttacggaataccccttccatatcctgagaagtagtaaagatatcagctattgataatgatgtctctcaataggaacgaaacataaaagaaaagtagaatcaattactgtggtactatgagttttctggctttaagagaattgatactttctttgtcaaattcctgaaggggaagagagagtgatgctccaaattaatatgaatcattaaggtaaatacaacagaggaactctctactgaaataacatagcacaaaccttcccttgttgtatttgtaaaagctggcctttcactttatcttctacatctttaacctacaaaaaaatggttcagattgatgcagactaaacaattgaaatgattcatacactaccaaacatcatccaaaaacggaggtagcaaacagaaagtaaaaacaatctagcgttaccttcctcgagacttgctttcccatttccacccacttgttttttccagcttgagaacagccgatcttgaagactgcaggagctaactttttctgaaatagcacgaattttacagtagttgttttagcatatgactaaacaaatcccacactatatacatctacatatccattgcaatcaataacctggagctcatcttttgatatgctgccttcttcaggaacagctaagaaaagttgaacctctggtgacccttctgccgcatatttcttcccttcatcagtcagaatccatgtctcctttttaatgtcctgcagagaatagtcaacccatgtgactgacaatgcaaatctagtccactaaaccttgttaatgatagagacttatggcaaactgtgagattcatcagtggcattcatggaaaagtacaaaactttcaaccagatatcaaaacgtcttactctaacaccctagaccaataatccaaacccttttatcgaaattccagcacgagtacctgaacatcgatgtaacgaaaaccatggagacttttgatgacattgacgagttcgttgtggtcgatgttgaactcggcagagaattgacccgaatcagtgatctgttcattgttctgaaggaaccctagtatcgcctcttccgccataagtaatctcttgaagtgtttttttttttttttaatcgaaagagctttgccctactcttctatctcctccggtcaaaaacagagagtgagtaacgccgcagaatagtatttgcattaaattggtttttaagggtttgactttagagtgcgtttttaatagtctccaattacttttgaaattgcaacatagacccaaatacttttaaaagaaaaatgaaagctaaaaattttttcactatagtaaaatatgtaagttatgggaggaaagcaaactccaaacgagttaatgaacaaataaaaccaaataatagtccttcttgcacatatcagtgaatgatcaactaattaaacacatgtctgataagccattgcatcaaacatcaggagcaagagcacgcactaattgatttttctcatcggttataaagacaacgtcagaccacttaagcaacccccaaatctctccttgatgttttttttcaataacaacttcttcacaccagattagtttcttcttaatagtcacgcactcctcccacaaaagaactatgtttcctccataattcaccattttaacaccttcaccacgaggattcataatcgacctgcgcacgaatcctttcaaatttttccatatttttctacatgagtcataccattggagcatctcgtaactataacggtagaacacgttctctatcacacaattagagaaatgaaatccatgacttaacgataagtgtggctctctccatctacctttgtgtatctcgtaagtcatgaaagttgcacgattattttctaatgaacttacgtggatagcttctttataccctacgattttgtaattaaaacctctgcatacctcttcgttaggaatctgcaaaaactcccatgtttgggtcttcgtatcgaaaacttcaatccaatttgttgaatcgagattcttgcagcctcctattacatatattttcccattaaggacgcaagtagatggaaagtcatcacgtgccacgcgcatgcttggagcctcacgccatgtatgagaacggcagtccatgaccatgaccttagacgatgcactattatttaagtttcgtccaccaatagcatagatatcagaaccaaccgctacaacacctgatctgtagtcaaaaggagaatcaagagatgatattgggaccaaaattttggcgctgctacttattttttggcggagggtgaaacaaatttgtctgtaatcagtattcgtacggaaccgtaaacacacgtaaagaccactgctagtacaacctaagaatgatctaagctcttgaagctccgttgaggcaatgagagaccggaatttcttggaaacgaaggaaaggctagggtaatacactttggaaacacgggctaaacagtttaataccaaatcatcaggaagcatcgaaaacgtcatctgtgactcatcttccttcgacattaacataattgtgggatacgtgaacgaaagcttcgtacgtacgttttcgcttcctctcgatctctaataataatcctaaatccactgccacaaatacagtatatatgcacaaaaattaaaactcgtatcccttggaaagtggaaaaaactaatttgtattaaaaagatttaatttacaaacgatatatgacgaaaaaaaaaagatttagttaacaaattgtactgttacgaatatatagattttatctaaaactgatttacagggatggtaatattttatagttgacaaaaataaaaaaaggatgacatgataatattttcttatgtttatttttaacgcacaaaaataaaaactagggagggtgtataatgcataaattaaaagttagagggcaaatttgtgctacttctgcaaaacttaaacgatgccgtttgggttgtagggtttagtgcatccgtgctctgttcacttgttccatttcgctgtgtaagaaaagaaaaacgaaactttcggttgtgcgaaatcttaagatcaaagatggcatcgttttgcagatcagcgttaatggcaggttccagaaacttagtatcaagatccagaaccgtaactcaaaagtccctcaatcttaaacccacaactacttcatctcctttcgcttcaatgtctcaatccatccctcgcgcttcgaggtaactacttcacctttcagctgattcaagaagtttaactcattttctcttatgctcaactttggaaaaaggaaatttagagaaaatattcagctcgttttaatcagaaacattttatgtgaagggttctctctgctttgggaagtgttgaaacgatgattccacttcacagtgccgttgcttcagctcgtctccggtcaagcatcgctgctgattcctcttgttggagcttgctttctcagggtatcttttttcctctatttttttgctgttttcttgcaaattatccttaaatttgttgtctttttggtgggttgattctgttttctgctttatctgttgtgcatttggaaagtttttgagaataagattgaaacaggagatcaatttcttagtaagcttgaatctctcttatgaaatgggatcacaactcttaaaaagatagcaagtattagatgatattcttgaatagcagcataattgtggcaagagatttttcattagtctacactcgttggattcaaagtttttttttttagctcaaacaatactgattagatgtgaaactggatgatatctgtgaaagatatgttttttaagtgtacaaaagattgtggcttcactagatatagtttcgactgggacaaagcctgataaagatcaaaactttgaagaaaggaactgttacttctcttatacaatcatgtcttgttgagatatatgtctagttggtcttagattatttagttgctccttctgatttttctaaaactttgcttctttctctgacttgtggttcttctacttaatgcgataggacttgcaacgcctttgtgaccccggtctgctggatcgatataaggcggaaataatcaatatattacaatgaatgaacaagaatagtgtttttttttctagttcgaactctatcgtcaatgtattgttgtgtggttcacaaggacttgttgtttcaaacttcttgcaatctatctattcgatatttggatccacacattttggggcctttttccttcactaaagtcagcatttgctttcttttgttcatgcacattgtaacgaggaacctctgcatttttcaatttctgaatcttgttcactgatcctcttcccatttctctcatctctttagaactgggagttcctcggtgacaccatcattagctttggtcttggtcttgaagcgtccatgggttgatacttgatattgtactgtttaagactacttgtgacgttgccagcttcttagaccggttttctccggtttaggatcaggttgtttcccaattttatgttatcgtttagactttagatcttttttgagcatggaagggagtttagcatcattttttaagtattctagcgaattacataagaattagtcattctaacgaacttaaaacccgaccaactaataattgtgaatccaaattttcttgcagtgtactcataaactcattcttggtcaccaactatgtatataagtaagtaactatataatattgatatttttgaaacaatatactaccaaacatattcgagagccccacattcaccagacaattcgtccaacgccaatctcgccagcctttagcttaaattaccaaagggacaaaaaaaagttaaagatgaagaaaaaatataatacaatttccgttaaatttacttataaacactaaattgctagtcaaaatttcattacctatgaataatatttagaaaaaaaatactgtataagttggatttcttatacaaagatacatgactcagccttccgttacaaatagtcggaaccaaactaagaatttgctccataatctcttacttgtggcattaattagtcatttgaacgtcatttctattaagtggagagtaaaagtctgatgctaaaaaaataatcgatttactttcgcctttgtgtctctttgtatccccaccacctccttatctagttaaccgcgtaacgagatggacgggcacaactatatacatacaagacgtgtgtgtgtgtgttcatgcctatataatagctaatgttcttgtaagttataactcgaacaagaaacagtaagagaacttataaatagagaaggctatatggggaattgtgcactaaagccaaaagttctgtcagaaaccggagctccggcgccggaggagctcaaggattcacttcttgaataccataagatggacgctgcaaaatctcttagcaacttgttccttcaagtaagtcactataaaattaaaaacaagcacaagaaattatgatgttatattaagttatgttattctttgtgtctcatttgtgttttcttttggttaataggacaaggcagataagataacgaaagaagacgagaagatcacaccggaaaagataccggttactgatgatctgaaaacagctttggaggaggaaaatactccgaccaaagaggcaaaatctccggcaacagagacaaagtattcggtaacagagaaaagagctccggctgacaagaagataacaccggaaatgatgccggttactgaagatctgaaaacagttttggaggaggaggcaaaacctcctgcaacagagacaaaagctatggttgatgatcagaaggtgaagaacgaagtggccgttcgtgaagagaaaatcattgacctcgtgactgtgaaagagaacgaaacagaggcgaaaacagagtaggtgggaaaagaataaacacagtgaaacagccttgaaacgctagtttctgcgttcttgatagcaaaatgcttgtttttgtttagattatatttttcctcgatagataaacgcaaacgctgtattctttatatgaattgaaaacttcaaatttcctattgaccgatccgtcaacccaaaagaatgtcaatgtaagaggctacgaagaacgtgtttttccgttttcgttttctgcgattgcgtttcaaagagaatgcatgcgtaaatcggtgcccgttacaacactttcgaaagttttggtttggactttaacgggccgatacgggccgtattataaaaaatttgtaaaataagcaacagtttaatggaccgaacttcgtcgatcgagatctaacgggcgagtaagaaccgggtcggaaatacggatccggattctgagcattaaattgtgaaacaactaactcgacaaaccttttaattgcagcaatttaagaggccaccgaactctcgcgcctcgacatctcaattatacatgtagtgaacagccaataatatttagccacgtgttcatagtttgttggtagttataaacttagactaataaactcgaccacttctaaccaccaccggttcatggacgaccgacctgacctacgaaagttaaagtgagttctttaataaatgtgagaccaaacgaagaatttttgttagcatcaaattaagtccaaaacatgacttttattgatttcatatgattcaattataaagcagatcagataagtgatgtgtaacgaggatgaagacattaattgttatggcgagttcggtataataattcgaattttatcaacaacgtccaaccagatttatccataatggctttaacttcaagtttgaaccatgatgatgtgaattataagaagaagaaaaaatcacaacctcgcatagtcatatattccaaaaatagagaaagtgaaaaggacatcttaattatacatcatgtattttttctttttatccatagctaattgacgtgctttaaaaccgtgagagtgttatatgccagtcataaattcccagcaaataaatcggccatgcaagaaaatttgaaatcaagaatcaagggcagtgaattcagtaacgtgtcaattctgacagtaattttttctctctttttttcaaaaaaaaaaaagaaaataatcgcatacaaaacaaattatatggctattttctgttaaattttataaatgatagtaattttagtcaaccataatttaaaatgtgattttgttttaagaatttttccctaagatggcatttcagtcaacattcatatatggtattatatataatgaaaataaataactttcttaatttcacgaaatggaaaagtttagtatagaaacaaatctttagtctcttaatttactggtggcagcaataaaagggatattaatatctctatctacttctctcaactgtaactgcccatatatgtaccactccctcgagagtatcacacaacataaacccaatctctcactcagactaagacagagtcagaaacaatggcgaaatctccagaaacagagcatccgaacaaagtctttggttggggtgctagagacaaatccggtgttctctctccttttcacttctctagaaggtttccttacttctcatcacttcttcttgtttctttaccacctttttcttttcctgtttatgttaaagaaatctaaatttggtccgagatctgttacaaagttttgctgttcgtttctctgttgtctctgatgattggtctaatttttactctgcagagacaatggtgaaaatgatgtgacagtgaagatcttgttctgtggagtttgccacactgatttacacaccatcaaaaacgactggggatactcgtattacccagtagttccagggtaatctcgaaacaaaatttcaaacagagatatcgtatttaacaagttttctattatataacaaaaccttgtatattaattaggcatgaaatcgttgggatcgctacaaaagttggtaagaacgtgactaaattcaaagaaggagatcgtgtcggagtaggagtgatcagtggctcgtgccaatcttgcgaatcttgtgaccaagatcttgaaaactactgtcctcaaatgtctttcacatacaatgcgattggatccgatggaaccaagaattacggtggctattcggagaacattgtggttgatcaacggtttgttttgcggtttccggagaatttaccgagcgattcgggtgcgccgttgctgtgtgctggaatcactgtgtatagtccaatgaagtattatggtatgactgaggcagggaagcatttaggggttgctggacttggtgggcttggtcatgttgctgttaagattggtaaagcttttggtttgaaagttactgtcattagttcttcttctacgaaagcagaggaagccattaatcatcttggtgctgattcgtttcttgtcacaactgatcctcagaaaatgaaggtaacgagagtgattttaaacttggtccaatccggttcagttcagaaagtaaagagagtgactttaacttggttttgttttgtatggaaaacttaggctgcaattggaacaatggactacattatcgatacgatatcagcagtacatgctctgtatccgttgctcggtttactcaaagtcaacggaaagctcattgctttaggcttacctgagaagcctctcgagctaccaatgttccctcttgttctcggtaaagaaaaaaggaacatcagaaaacttttttctgcaatatcttttttcgtgtaacacaagttaactcgacttactgttttttaggaaggaaaatggttggaggaagtgacgtgggagggatgaaggagacacaagagatgcttgatttctgcgctaagcacaacattacagctgatattgaattgattaagatggatgagattaacactgcgatggagaggcttgctaagtctgatgttaggtacaggttcgtgatcgacgtggctaactccttgagccctccatgaatgatccggatctaagaattgagcattgaggaggctttaaatctatgtcataatcttggtgtttgtttgtgtctctcgagttatcttcgttttctgctttcggtttgagaatcggtttcttctcagacaagttaccttatttcgttgttttcttctcatgttctgtttcctgagagaaactctttctgattccagataagactttgatccattttcagtttgctaataatataaagatgggtctaaaacctaaacagctttaaactctttatgattttaaagaatctcaatatgcagaatcattggattgtgatcatttaaacatgagcgtttattaattgatatgaaagttactatcaaactattttgggagacggagccggagaagagtcgccggagtttggattctgacaaaagccacgaaggacattagcttcctcaggcgtaaatccgagagaagtgagcatcgccggccagcaattggtggtgatgatgtctacggattcgcaacaactaacaccaagttttgtttcaccgttgaggaagaagagaacgatctcgttggtgcatgatttcagctcgtataatgcgttccagcattccatcagtcctccactttggagcctcgcagctatgttggttgatgactccgctgggagatctctaccggagacggtggtgtttaggaggatgatgagaagtgtgacggtggagaagaggaaagtagtgttcgaagccattggtgtggtttttgtttggaattttagtgtgattagactagcttgtgatggtttggtatttatagtgtgtttgtggaaggatttgttgtgttagtggatattaaagagtaattaaaaggtttattagtggggagggataagtgaaagtaaatgattagtggtggatggtgcgattaaggcttctgatgaagatgagtaacagacaatgcatacgaaaggttttacttttaatttaaatatgtatttgatgcagcaagagcaacaaaagtggctgtagtttagtggtaagaattccacgttgtggccgtggagacctgggctcgaatcccagcagccacattctcttttggttttttgaaaagaaatttttttgggcctccaaacttttaattttaaagcgttttaaatggatctcctttgcagataattagtggcccactatactttcctaacagcccatatattggtatctttttttttttttccacatatattggtatctatatatcttatcttacactttaccaatattttcatacttaatcctatgaaattctagtttttctggttatggcactaacttaacatatatattttatattttcaatgtttttaagaaaatgaaaatagtaaataataaacaagagtaaataaaagaaagcaaacaaaaaaagaaaatagcaactgaaatgagaaacaagagccaagaataattaaagaaaagtacgtaaaagtggtaaaaattaaaatagagttcaaaaagaagtgactaaaacccatactacaactctataacctcgtttgggtctcgctagttggaactttgacttttgatggctcaatcattaggatttatgcctaaccttaattagttaactcctatgattggatgatctaattataattaatcggtaaaggcacttttatcattggaattttaattaaataactgcgtacctatattagtcgttacatgtgattactgtatcagactatcagtgataaacataggtttttcttttttcttaacataacaacatggaaagaggttaagcgccaaaaataaaaaagactttctaatcgtaaaatagctagtagctaccgacagattgtgagtgcgaaacacacataacacagtagataaaataattgaaaagtagttaaaatagttctcttctgttttttttttgaaccagttttaacacgaaagaaaaagacaccagtcattgacctatcataataatatacacaagatttggcttatttaaatgtaatcccgaagagcgaatattaaatactcctctggatagcacaataattcgattctaacaataaattagaatatattgggaaaagtttaacaataaattagtactaactttttcctgtggatagcacaataattcgatcctaacaacaatgcctgtctattttagtcgccagtttcaaaatactgcaatacagtgaaaacattttaaaacacatgcttcatcttatctttttggctattcttcacagtggtaagtttccgtcggtgccgatattatatgtttgtgctattaattaatcatgaattgtataaatttccagatttgttggtggagccttgtaggccatcaaaagcttttgatttttgaacaaataatggcccatatatcgaccgacgaatatttgtactcccatgaatacaacaatctagtttcaagtaaaaagtgttcaaaatatttcagatttttgtatcgtagttttaaaagactaaaccaattgtataattacatttctattttccagctgcttggccggctgatatggcaatttttagcaacatttatataggagcgtattgtatatttttgttcacctgtggctatcttgtattcattttgatagaaagactaactttgtaccattcaaataatgattcggttatcatttcgccatcaaataatcgatttatacctaatactgcgaagatagagacattttaacaatactatttacgatagttcggtagaatatagtaatctatgcattgatgacatcgtcggctctaatcagcttttataatgcttattaacatcattatggcatattcataatttaatcgaagtaacctagtttattttaatgcatttagatcaattagatgggggaaaaactatgtgatctttcaaatgttgtttgttcaaagcagaatgatttatgtgttacgaattcgccagaataattttaatttagccaaccaaaaaaaacataatttgtaaactttttccacgttttaaactatttgtgaaatgtctccaaaatgaaagaaaaaggttatgccaccgacaatattttctaccttgtacaaagaaacaaattgtttattcaaagttggtttggaaaagatactgatccaacggtcacggatttgaataacattgtttagttaatacaaccaaattattcttatgctatgtgtacctacttagaagcttacacagaaaaaaaaaaaaaaaaaaaaacttctaaactttggttttcttttttttcccatcatttataatattcacgtgttacataataatttggatgtatataataaatgatccaataattaacaaaataaatctgatcatccaatcataataaagttgcgcatactaaacaatattttattttcctaaacacaacttctttgatatatggattggtcgataagaataataagatatgggttttaatagaagacaatcaatcttcaggggctttcttgaaattacagcgtggtaaaaaacaatgacatcaatctggacccgatcacgaggacccggatccgtatcgataaacagtgtagctttcactaccccattttcccagaaacacctctcaaaaatttctcaagaacttgtataaatatctcagtttcgttcacgcagtgtcttttttatttttgtatttcttttttcattgttcaccaactcctcttgaaggtgggacagagtccagctccaccaccaccatagccatcgcgtcgttttctccgggacccacttatttcgtgacgtttctctctttgtatatacatacaattgttttcagtctcaatttgctgtccacattttaacacaactctatctcaggggtggtgtctgaatctcgtctctctcattcctatttatcccaatctaatctatcacaaacccttccacattgcttttgtcagtctgtaaaattctctttgaatcagtgaatcactcacttaaatccaaaacagtttttttttctttctttctttatttgcttgttgtggaatcaatagctgtctccgggaaaattcgttttttttctccttcgggatctctttttttttttttttggttttatttaataattatccccgagccaacatttattgtcgattcggtttatttcgtctccttcgtcttccactcttactagtgcatgctctgaatctgtatgtaatgggagttcaacagtctggatccattatcctagccgggtcgggtcaaggtctttgagtaagagagacaattcgttttgattcggtgtagaagacatcatgaatactggtggtcggctcattgctggctctcacaacagaaacgaattcgttctcattaacgccgatgagagtgccagagtaagaataacttttgtatgaatttgtgacgaaaaaagtttaattttttctctttctttgggatctagattatgagaatctagatggaatattttgatctgaaattggaagtttctagggagtaatgccgcaacccacatgttctgttttttcttttttcttttcttcaagtagtgttgcatgattcatacgtgtcggcagagatgtcctgagaaccgaattcaatgttgtagcagtagcaataagttcaaagaaagtccatttttttatattactaattctgttcttggtttatttgagctggtctttattgcatttcacctggattcagatactaataactgtctcaattatgtaaaaatgacaactttatgaaattcagtttcacaattatgtaattcataatcgatgaatgttttcttgagtctttatcatctttaggatttgattaagatgcaatttgatgaaaatactaaaaagactcatgtgttctcatttctctatgtagatacgatcagtacaagaactgagtgggcaaacatgtcaaatctgtggagatgaaatcgaattaacggttagcagtgagctctttgttgcttgcaacgaatgcgcattcccggtttgtagaccatgctatgagtatgaacgtagagaaggaaatcaagcttgtcctcagtgcaaaactcgatacaaaaggattaaaggtagtccacgggttgatggagatgatgaagaagaagaagacattgatgatcttgagtatgagtttgatcatgggatggaccctgaacatgccgctgaagccgcactctcttcacgccttaacaccggtcgtggtggattggattcagctccacctggctctcagattcctcttttgacttattgtgatgaagtgaggaatccaaattgtttgttttctctgacaatgttgttgcttagatgattctttttcttattagtctatgtgttttcaggatgctgatatgtattctgatcgtcatgctcttatcgtgcctccttcaacgggatatgggaatcgcgtctatcctgcaccgtttacagattcttctgcacctcgtatgtgtttacttttatgattcctacaatttttcttcttatatgatttggtcaccttctaatgagttatgaaatggttttgtttgttgttttcagcacaggcgagatcaatggttcctcagaaagatattgcggaatatggttatggaagtgttgcttggaaggaccgtatggaagtttggaagagacgacaaggcgaaaagcttcaagtcattaagcatgaaggaggaaacaatggtcgaggttccaatgatgacgacgaactagatgatcctgacatgcctatgtaagttgttaaaatctaacaaaagttcagatgaaatgatgctctgaaattttgtgttcaatggttttgttttcttattgttgtttaaacatttttcgtgctaattcaggatggatgaaggaagacaacctctctcaagaaagctacctattcgttcaagcagaataaatccttacaggatgttaattctgtgtcgcctcgcgattcttggtcttttctttcattatagaattctccatccagtcaatgatgcatatggattatggttaacgtcagttatatgcgagatatggtttgcagtgtcttggattcttgatcaattccccaaatggtatcctatagaacgtgaaacatacctcgatagactctctctcaggtaacataaacctgaaaagttcttgtctgcaaatattcattttttacattcccaaaaatttttgaaactctatttctcttacataaggtacgagaaggaaggaaaaccgtcaggattagcacctgttgatgtttttgttagtacagtggatccgttgaaagagccacccttgattacagcaaacacagttctttccattctagcagttgattatcctgtggataaggttgcgtgttatgtatcagacgatggtgcagctatgcttacatttgaagctctctctgatacagctgagtttgctagaaaatgggttcctttttgtaagaagtttaatatcgagccacgagctcctgagtggtatttttctcagaagatggattacctgaagaacaaagttcatcctgcttttgtcagggaacgtcgtgctatgaaggttttctttgctgctttttctctttctgagtatatcctatcataaaagtgttgtttcaagaatctgatttacgttttttgcttgtttgtttgttgcagagagattatgaggagtttaaagtgaagataaatgcactggttgctactgcacagaaagtgcctgaggaaggttggactatgcaagatggaactccttggcctggaaacaacgtccgtgaccatcctggaatgattcaggtaatgatgagtttgattgaataggcaaaaaaaaagcggtttttgtcctcttcactttgttttcctggatctgttaaattggaatgagcactctagttctcaatatatcttcagaccgaagcctttttaagagattttgtaaatgacaggtgttcttgggtcatagtggagttcgtgatacggatggtaatgagttaccacgtctagtgtatgtttctcgtgagaagcggcctggatttgatcaccacaagaaagctggagctatgaattccttggtaagtataatgtgtttctttatttatgaatctctcttttcggagccctgacttctcataaactaaaactcatcttacttcttcttgaagatccgagtctctgctgttctatcaaacgctccttaccttcttaatgtcgattgtgatcactacatcaacaacagcaaagcaattagagaatctatgtgtttcatgatggacccgcaatcgggaaagaaagtttgttatgttcagtttccgcagagatttgatgggattgatagacatgatagatactcaaaccgtaacgttgtgttctttgatgtatgtgtccttatctcttttgctttgtttctgtttatgttttagtgcttttcctcttttctcatttgatattgttttggtgtggaaacagattaacatgaaaggtcttgatgggatacaaggaccgatatatgtcgggacaggttgtgtgtttagaagacaggctctttatggttttgatgcaccaaagaagaagaaaccaccaggcaaaacctgtaactgttggcctaaatggtgttgtttgtgttgtgggttgagaaagaagagtaaaacgaaagccaaagataagaaaactaacactaaagagacttcaaagcagattcatgcgctagagaatgtcgacgaaggtgttatcgtcccaggtaaaaaaagaaggaaaaaaaaaacatttcttatttggtttctgtcttgttgaaagtctaagtagatccttttgattgttagtgtcaaatgttgagaagagatctgaagcaacacaattgaaattggagaagaagtttggacaatctccggttttcgttgcctctgctgttctacagaacggtggagttccccgtaacgcaagccccgcatgtttgttaagagaagccattcaagttattagctgcgggtacgaagataaaaccgaatggggaaaagaggtagaaaacattacaaagtttttcaacttctgaaaactagaaaagttcttgtgatctcattcttgctgataatcacacgcagatcgggtggatttatggatcggtgactgaagatatcctgacgggtttcaagatgcattgccatggatggagatctgtgtactgtatgcctaagcgtgcagcttttaaaggatctgctcctattaacttgtcagatcgtcttcatcaagttctacgttgggctcttggctctgtagagattttcttgagcagacattgtccgatatggtatggttatggtggtggtttaaaatggttggagagattctcttacatcaactctgtcgtctatccttggacttcacttccattgatcgtctattgttctctccccgcggtttgtttactcacaggaaaattcatcgtccctgaggtaacttaatgataatctctgcattttcggtttatattactcagtttggagatgttctaaatgttttgtgttttgctttgacagataagcaactacgcaggtatactcttcatgctcatgttcatatccatagcagtaactggaatcctcgaaatgcaatggggaggtgtcggaatcgatgattggtggagaaacgagcagttttgggtaatcggaggggcctcctcgcatctatttgctctgtttcaaggtttgctcaaagttctagccggagttaacacgaatttcacagtcacttcaaaagcagcagacgatggagctttctctgagctttacatcttcaagtggacaactttgttgattcctccgacaacacttctgatcattaacatcattggagttattgtcggcgtttctgatgccattagcaatggctatgactcatggggacctctctttgggagacttttcttcgctctttgggtcattgttcatttatacccattcctcaagggaatgcttgggaagcaagacaaaatgcctacgattattgtggtctggtctattcttctagcttcgatcttgacactcttgtgggtcagagttaacccgtttgtggctaaagggggaccagtgttggagatctgtggtctgaattgtggaaactaagatcctcagtgaaagaagagcaaaggagtttgtgttggagctttggaagcaaatgtgttgatgatgatgcaagtgtgtttgtagacgaagatgtgcagtttttactttttacgacttgttaaaccttttttgttacccctaaattaattcttttgttatcatggttatactaatagaattgtttgtttttcttttttacatgtacttttagttattccgtagttattgtataatactgataacgatcatatatacacactttgttaataatggattttagtgttgttttacaccttctttgtaaattaaaacttgtgttaaacgatcatttatatttaaatccgtctgttgcggtgtgtgtgtgttacggatataactgtttcaaaattgtgatgtgatgtagataaaactttttgttttgaatgttaaattaaaatgaccgatttgtaaatttgttcgaaatttcttttgttcatattcgatcacagatcatcacacatgaaaaaatatgattggaaagaactgtttcaatagtaatttagtaatcttagaatgattttacttaacctgatcgaacggctgcgaagccaccgcatgtcccacagcggatgatgatgcgattgagatgagaacacgtggaatgcggcaaaagggccccaagacgtgtttattccttatcgataccggaatggctttgcatggaccccaccaaatcgtataattgaagtcaaacgcatctctctctcttcaaaaaaaaatggaaattttgtaaaccactaaaccccaccatataagtaacagacaaagtcgcaggagtcgttggatcaaccaaaacaaagattctgaaacttggtcaatagttttgacggttccggatcgtaattaaaatatactcggttccattgaatcaggcatggtttattaactttccatattatcttccttttgcaaaaccgacattgtagtttccttttttcattatttccattttcttttaaagggttttcctttttgcttctgttatataaaagacgacaaaacgaaacgatacaacaaaaaacaacaacaatacacgtaaacgtgatcaaagtggtcaaaaaggagacaagataaattcgatcgacaatcagatattcgaaaatgatcaatcaaatggagaagatttgtttttctgaagactcgggggttacgttttcggagacggagattgaggcggcggagcagctagtgcagttgagcgaagaggatacgttgagctgtagcagcggcactggctgtagcgtttcgaccggttacgacgggtgtgacgggaaaggatcagaaggcaataatacgaacatacaagatgatgttgttagttcaaaggttagagatcatatggccgaagaggcgcaaaacgacggcgtgtggaggatcaagaatgttacgaacggacagagttttctgaaggcgatgatggagacgaggacaggcatacataagaagaagaagtttcggtctcttgagagcatctacagagcgacgaacgagatgacgagagattaattagtcttaaggggatcatggctaaataacgtttaatgacgtttgttagaagcgtgtgtaattatactatatgtcatcgttttctatggttttgtaagtaatgtactagtatctattagcgttgaaccgggagaaggtgctagaagaattgacgctttgcaataattttaacacacattcttatttaaacattaatgcccctgttataaattaaggtagacgtaaatgcattttgaaattacatcgatagttatagatactatagtgttcaccctttttttcccaacaattgtgttcaatgttgatactatagtatagatgccaacttttttcctttccatataataaccaaaattcaggaccatgataaattttggacagtttgcgaagaggcagatattttcttaaagaaatatttttaaagcggttacatgattaaaatcgcaagctcaaagctttgagtttgatcttatatataatgtcaactggtgaagtttaattaactcgcatgcatacaatcttacaatcatgtatggattctcacatatcatactgttcaaacttcagtttaataatcttgttatacgtacataatatcatgtttaactcgcacgtacacaataatctttgtatggattctcacaccaattatctagaaggatagtataattaataactaacaaagaataacaagtcacatcttcctactacagaatatatcctaacgttcatcaactattatcatagttagttacctcattaaaaattatatcactatcacatatttacatataaccttttttttacatataactatttatttatttcatgtagcatcttactttcataatttcacaactaaaatcactctaaaagattataaattaataatagggttttgtgcaaaaaaaaattaactcatcaatttatacaattttatcatctatttctaacaaatgaaaaaattaatcttatgaaatctaaaataatatgcaatatgatctttattgtgtttgttatagttaacttgagttgtgttaataaagaaaatgctctcaaagtaagtatttatctcagcgctttgttataagcccgttttgatacccaaagaatacaccaaatattatgggccgaactaaaaagcaatcaagcccattatttactgttaacatctcgattgttctactgacgcaccgaaccaaaaaaaacaaaatagatctccaccgttgatcgtgtcagggaggacgaaaccctaatcatcggacgcctcttctctctcactatataaagaccgcatcctctacttcttcataataggagcctctgtaattttgtagtagtctgtccgattcttctcaacgatttttgtattcatcgagtcaattgttcctgtgttttcattgattagatcttgtgaatatagtctttatagctttggttagagttttcttattggttaatgatgataaatccaaaggcttgtttttcaaacattcgcagtggccgcctaagagctttcgcctttcgccaggcttgagagttaatgctgttttatccttccttggatgtctgaaacttttgtatctaaacctgtattgttttgttttctattagggttttagatttgggactaagttattcaatgtcccattagcagaattgatttctcttagtgcttaataggattgaacaaagtccctcaaatcttgatccatctgtcactttgtcagcagtcttaattggtttcttgctgatcattatatgatgggaaataacatataatctcgattttgattaattggtagaattgcttaatattggtcgatgaggataagatgaaggcttgtttctcaaaacattcgcagtggccgcctaaggctttcgcctttcgccgggcttgagagcttatgatgtttttatccttccttggatgtctgagaccaattatgttttagttagatgattgttgctgttagttttcggttgatgaggattatattaaggcttgtttctcaaaacattcgcagtggccgcctaaagctttcgcctttcgccaggcttgagagctaatgcagctttatccttccttggatgtctgaaaccgatgaatgttttaattctcgtttttatgtttttgtctgtaagaaagatcaatgatgataaacttaaggcttgtttctcaaaacattcgcagtggccgcctaaagctttcgcctttcgccgggcttgagagttaatgcagcttttatccttccttggatgtctgagatctttattcactctatcgattatcttgtctgtttaggttattccttctagtagattattatcgtctattttttgtgttgaatttgcaggtaatttcttggtggtagcttcttcgctttactggcttttggagaaagagttccttacgtttcctgtaatttcctttaatctgtaaaaatcattgtcagatttatttacaatctgtaaagagttctttgttgtaaacaattttgttcattggtgatgaaattttgttctcattatgaattttatttgtgatgaaataccgtgattcctttatttatcaactttgaaagcttattactgaaaactttgtttgagcttcaaagaatcaatgatctctgaaagctgtaatccacattcaacaaataacactcttatatacaaaaaaaaaatactcgaaatttagaaattctatgtttacaagttacaatagttaggaaattgtaatttcaaatcaaataagctaaaaagatgttattattaaaatgttcagacgaattaaaccggacctaatttgcttggtcttttggccgctgaccttgtctgattgatcgggatttttgtacggcgaatcaaaatccaccgaacaaaccggaaggctaggatgctcaagctt

SEQ ID NO: 688 - DNA, 129047 bp, Arabidopsis thaliana
attagggttttagatttgggactaagttattcaatgtcccattagcagaattgatttctcttagtgcttaataggattgaacaaagtccctcaaatcttgatccatctgtcactttgtcagcagtcttaattggtttcttgctgatcattatatgatgggaaataacatataatctcgattttgattaattggtagaattgcttaatattggtcgatgaggataagatgaaggcttgtttctcaaaacattcgcagtggccgcctaaggctttcgcctttcgccgggcttgagagcttatgatgtttttatccttccttggatgtctgagaccaattatgttttagttagatgattgttgctgttagttttcggttgatgaggattatattaaggcttgtttctcaaaacattcgcagtggccgcctaaagctttcgcctttcgccaggcttgagagctaatgcagctttatccttccttggatgtctgaaaccgatgaatgttttaattctcgtttttatgtttttgtctgtaagaaagatcaatgatgataaacttaaggcttgtttctcaaaacattcgcagtggccgcctaaagctttcgcctttcgccgggcttgagagttaatgcagcttttatccttccttggatgtctgagatctttattcactctatcgattatcttgtctgtttaggttattccttctagtagattattatcgtctattttttgtgttgaatttgcaggtaatttcttggtggtagcttcttcgctttactggcttttggagaaagagttccttacgtttcctgtaatttcctttaatctgtaaaaatcattgtcagatttatttacaatctgtaaagagttctttgttgtaaacaattttgttcattggtgatgaaattttgttctcattatgaattttatttgtgatgaaataccgtgattcctttatttatcaactttgaaagcttattactgaaaactttgtttgagcttcaaagaatcaatgatctctgaaagctgtaatccacattcaacaaataacactcttatatacaaaaaaaaaatactcgaaatttagaaattctatgtttacaagttacaatagttaggaaattgtaatttcaaatcaaataagctaaaaagatgttattattaaaatgttcagacgaattaaaccggacctaatttgcttggtcttttggccgctgaccttgtctgattgatcgggatttttgtacggcgaatcaaaatccaccgaacaaaccggaaggctaggatgctcaagctttacggattgacttagagagagatcgatttgaactgtgtcattttgagcatggtttctagaagaggctccgagacaaaagcgattgtctgtgtcctcacggatagaattaggatctctaatcaatgggtttcgcatttgtctttcgctggtctacttggtgttgctggtttcgtatttgcccaacagcacggtctattccgcaacttaaacaacttaaaactcttctccggtagagaaaaagactccggagacgattcttttctcgtacctggccttcaaaatctcggaaataactgcttcctcaacgtcatcctccaggtaatactttgaattaattcttctttgagcttgcttttgatctttttgttataaatctttggattgtggatttgactttcaggctctagcgagctgcaaagattttaggagttttcttcaatgggttctagaggatgcgagaggttcgttagcaggagaacaagaggaacagcttcctcttacttttgctttgtctgctttattacaaggtataattgtagtatcttgtgttgaaagttggtttatgataatgagagtaatcttttgttacttgttaccatcagagctcggcacagttggaagtagacgatctgtatctaaccctcgtaaagttatggtgacattgactgactatgccaaaaatttcaatttgacaagccaacaggttaaatttatatttcttctataagaccaaaagtatacttgagttggtggtcgtcttctatgagctaatgatcttgttgaaacataggatgcagcagaagcccttcttcatcttatatcttctttgcaagaagagattgtagtttgttatcgccctagccaaagtagtaatctttcggatatacttttctctcgcaacttgagaatgcttgcgcctagtgaaggcctccatggtttgatggagctcaagagatggcataaacatttgcgtggaccatttgatgggattcttggtagtactttaatgtgccgaacttgttcatctcaggtaagggattagatttctcaatctcaccagtaaaaagtggctcttgctatagttaaatactttttccccatgtgatattttttgcttttttccagatttctttggagtttcagttttttcatactctgcctctttctcctttactccatcacggtggttacaacattgtatgttacggaaggttcattctcttgttgctatattgttttgcttttggcaatatgaaacttctccagaaatataagaattctcaatatatttttccttttggaatgctcttagatgtctggatgcactttggagcattgcttgaagaagtttcttaacactgagaaagttgaaaactacttctgctatagatgctggcatggtgctgcactgaaatatttatctgtgataggagcagctgaggtagttaatctctctcagcttttaatgttattgtacttttcctttgtacatgcttcgcgactctatttgacccgtgtgtcctggaaacggtttcaatcagacggaaatcgaaaagctcaggagctgtggcggagaggaccaatgtgactgtaaaacttctcttcatcttcaaagaatgccttggtcaaatagctattcccatatattgaaacagttaatcatcgcccgtttcccaaaggtatttgcttactcattgaaactagacgtgaaagtaaagttgaatccattacaatatcaaaatctcttttcttttgagtcccattttgaccctgtctagctaaattgttacagctcctatgcattcaagtgcaacgcgcttcgtttaacatgtttgaggaattcaaactgtcggtatgagtcttgttatctctctttcctgtctacatttcatgtctcgagttctattccttctaatctcagttcatctgtatagggacatatcgcatttccacttgtcttgaacctctccttgttcacaccatcttcaataggcgtaaacatagaagaaaggattgagatgtcgtcagagtaccaaaagccagaagcatcaaaaaatcacggcatgtacaggcttgtaacagtagtggagcattttggtagaaccggaagcgggcattatactgtatacagaagtgtgagagtgttctcacaagaggaagaagaagaagattgtgatgaggatttgagctggtttagtatatctgattcagaagtttgcagagtttcagagagtgatgttcttggtgctgaagctagcttgctcttctatgaaaggctttgataaaagagaaattaatttagagcttggttttcattggattgatcgagtgttctaaggtttcttttctgcacttggagaaattagaagatacgtgagtggagttgtttttgaatatattttcgcctatagccaaacactactaaaataaccttgtaaccaaacactcttttagttccaggattgtgttataagtaaatccaaacagtccttaagcttcctcgataagtcgatataatgtggcgcgctcattagaatcagtttcaattatatctccgccaaaccgatgtaaattgatgggtctttttttctttaaaccaaaccgaaccgaaatttctatctattatccatcctatctacttttactccaatacagttgagtttgtttgcctcgatactataggaagaaacccccatctaatctctttcatatccacacaattagaatccgcttatgttgttctttgggtttaaattatcaaatgagttaaaaatatatacgatggaaagtggaatagcctacaataaaagttggtaaaagatgtttttacaaatactcaactgtggattgatgtttttagaggtatgttatatacaaatgctctaacatatgattgcagagcacacacatgcatggaaaaagggttgcttcatgaaagattcaaaggttgggaaggggcagtaaacagagacagaaggtgaagaagatcaaagagcatatttacacactgatgatttgttcagacctgtacttcactgtagttaccttctgatgatttgtcaaaatgatcttcaggttctagacacatgcttagtatttacctttcctgtcaataaaaacacgcagaaagtgtttgtgtgacaattagttgaatttattgtaagatataatgatatcaataaaggagttgtaagaaaaggattccagatattttttagactttgttatctttagtagtattgattagtcgtacttacctgtggaatgattattgttcatgagtttcaatgcttttgaagctttattttcttttctaaaggctccatttcctgcaaatcttttactacagcaccaaagcttacgctgtctccattagcaaactttcgcgatgaagataagccgaaatcaaatggtccccgtgattcagcctgcgttgtcagattcaaatccaaatggtaaaacatatctcaacttatttgcccaactcgtgtattttgttacagcaaatatatagtcttagagaaatgtgaagcagagaccacacagttagaagaactctcacttacccacttgattcctgataatccgaggctgctgtcttgattaaacaccgaggaacccaataatggttttgcggggttcgattcatcaatctgtttctccttctcaacttctccacttacctgccaaattttcatatcccataaccatgagttgcaagttctaaacttctgacaatagcaatatcggaaatgtttagtgataaaataaaataaacacgcagcataacttgagaaacatttaacctgatcgtgaacctttggtgttattgtggtacgctttcgaaatgaaaatgcatggcacgtatcttctgcatcgagtatagacgaatgtgacgactcaggaagaggggcatggcaaggagctcgacggttatctgtttggttcacgaggaaagcatctaatgaatcagagattagaggtaatggtggttgtttgatagctctccttgtttcccatgttttgttacagtcactaatccttccttctcctagaattgatgcttcagatagtaagcctcctatacttccaatagactgaccattatgagctggttctcgttcattgttcatatgccatctgtcttgtaaagaagcctcagaaaatagacctccaatgcttatgttagtaagattgtcttcccagagagttgcatttgcattccctgcgtttgaatttttacaatgatttccaaagtttcccttcaatgatacttctgaaagcaagccaccaatacttaggcttgttaatccatcatcccaaaaaagcaatgtcgggccagatccatcgtttatcttattctcctatataaacaaaagtagtcatgatctcaggtatactgtgatataagatttgaatccaaaacaagagaaaaagaaaacattatttactgagcataccgttgactcaacttgtccatcatgcggtaagttttccaagggaggtgtgtcagtcacttgatttggagaggacagcatagtcaatgggttctctgaacctaacatctgcgttcctgtacctggagttgaaggagatggcggttcattggttttattttcagtcgcagaggaccacccatacctaaacgaagtaacaagaatcgtcaaacgtgtctacgcttagaaatttgcttcaaaaggtgtatagatacaaaccgtaagcggaaaataaatggagctccaatagcttcatagacattgcctgtagtgatgttgctgtttgctacccatttatgaccagaagcaagtaccgatgtatcataagggtacaacgtgggatctccacgagcaatctctgagctgccccacttactgtgaatgcgttgaagcactgaagaaatcttcttccgtgagctaagagtgagctccaagtatgggtgaaagccgtcctatgaagtaacataaaataataaatagaactcttcaccagaatatatataaacttagtgcaagtcttgtggtcagatcttcagctctaccttttccaatccttcacgggtatgagcatccaaaggaaagagctgcagcttcatttttccagaacgtggaacgtccttgctcgaatggatatcaaggacaggtactttttgagtttggtcttcagtatgtatcagcctttgctcttgagaagatgaaggctgagctgaacatttatacttctcctcttttccactattatgttttcctgatatatgaaaaatccaattacaatgccaaaagatcgtagtttaagactatgagctaagatattataacataaattatgatattcaactagattaccaacaactaatcttgtggtaaacgcctttgatcaaagtgaaaattatttagaagatttaacaaactattaccagattgatggatattcttagtagttgttttcatagacttcttggctctggtgaattttcctttcgctttgatctcctttgaggactcagttgcagtttcagtcttctttctagccattctgaaaaagaaaaacaaaaattcggtatcaaaactcaagagtcaaaatattcttttctccatactatttcacagagatttatagcaaaacctccaaacacagattcaaaccctagaaatccaagtgtctcacatatctagattcatccgcaaccgaacgaaacttaaaaacaagcccaattaatctacaaataaactcatacttgttaatcaaacacaattacagtcgcagaaatataaaacaaaatttcaatatccagatctaaacccagaaactcaagcgcttttccaatctcgacttaatcaaaaccgaatgaaacttagagagactaattagattcggatttgacataaataaacacagctatagtccaattattaagttgttcggaagattttacgaaaattcaaaaaacaaatctcagactcatgctgatcggaaccctagaaatcgagccaaacttccaaacctagatgattcatccgaacgaaaaaaacaaaatccatagcatgaaaaatcaatcagtcatgaataaattcaaattgagaccagaaatcactcttagatatacaacctagagcagaaattctccaatcaagcaacagataaacgatcggtggagaaaagtcaagagataagcaaagaaatcgcaaaattcaaagtctctgagagagattgtaaacggttaaatatcactgatctagtctaggacgcgaggggaaaagcttactaaacgagagcagacggagcaagcagaggaagatcttcgaaaagagaacgacgacgaatcagagagaaaaatcgcccagagagcagagaggagtgaaataaccaggcgggaattttttcgatgaaaatttgttggaaataaaattctccctccattggcttttccatataccgtgtcgtttttgcgaaagattattttaagggtaaattcgacatttagtagagattggcagttggtttgtttttgggcctacaaatgttgggctgttattttatcctagtccactagctttcttagcgcattgtgggatgtgtagtgggccagaatacacaaatcaggtctgatctagtcacgttaaagctaagttagatatcaaaatcggaaacaaatataaccaatcttgttagtacataaccaaaatcgggttagtccataacaacatttctaaatgattgataagaccatgatatatggcctagtggttaaaaaatatataagctgcttcatactttgacgtactaagtaggaaaataaaatgtcaaaacatgaattaatttgaagatatagcaaagtcatttgagtttctttcgccataaattatctaaggtttttaaaattgaactctcttctcgaagtgactacttctccttctgaaattgattttttgtcaagtaccagtacgacgtcattttcaaaaatcgtatccatagtcatggtttttgttttcatacgatctatatcattacatttacaacgatgatctctatcaaaaatgtaattttttttctttcccgtcgttaacttactattataaagtttgacaacattttagatcccaaaaattagctttatgtaatggtattgaaaaaatatcatcgtataaagtctgtcgaaaaaagcggttttgtatctggtttaatggtgttggtagatttgacaatgaattcggcattgatggatttgacgtttgaagtcgtatgaaatatgtcactgaaatagcgatgcacttggttgaagaatttggctttaatggatttggcgatgaatttggtgttggtggatttgccgtttgaagtcgtctgaagtatgaacaatgaacactttctttttcccaaatgattatcagatttttttattaaatttcaatttaaggttctttgtcgttacacttaaattgatgatttctatcaaaaatgcaaattcttttttaatttcaattttgttctgttttttgtttttatacgattaattcaataggggaatcaaatacacttggttgcaaaacatttcaagttttcaaagaacaatcatagtatttttttgcccaccaatcatagttatatatatatatatctcaaatttagttggaacataagtaagtaataagtaagtagataagcaagtagataactacaaaacctcaaaagcgtctgatcaatgataatcattttgacaatatttggtggaatcaattagcacttctaaacttttgatccaactattttcgttagtttcatcatctagtgatcatacggaatccaccactataatttttttctttcttataactgaaaaattaatgtgtcaaaactgtaaaattagatacaaaacatgtatcctggaacagtggtactatacgagtcagtagatgtgcaccacttaactagtatcatgaatctaagataatatcggctgatatctaagtgaaaacttaccctaaaaagagaaacagttcacatgaaaagcatcgaataacgacaataagaaatagatacttaacagagctagaaaacacaatacttatatataatttaaaataaaaagaattatatatacgtaaaaacagtataaagaaagaaagacacaagaaaagtagtctgttttggatctttaaccaaacggaacctctgtctgtgtccccgcattgtccttttgtcgattataaaaatcggtcacgccttttcacttccatactcctcattttccatctctatactctaccactttttctagattctctttttcttttcaaaaacaaacaatttaatttccgataaaatagtaaaacatatttttactgatctatattgttcagaatgcattttttgcgatctatccgatatatttaatttgtagaaaaaataattagtgaaaacgtcgaattggtgagtaggaacaagtggcttcttgacaactaacttagtggtatcgaggattgcgaccaggagacaataaacaggggtaaaacaaactttgaaagacgaatagagtttgtgctcgttgtatgattttagacaaccggttgcatactattttggtggctatgtgatatgacgttgatagtcttataggaatcagacaattcatgtgactttaatttgctctatctaccgagaaagcacgactaaaatgaaaaaaaaaaaaaatgtagtatgttgtaagataaaaatatatgtaaataagttggtttttcaacaaaaacgcatacattaaccaaaaaccatgcatttgtcttctcttttattgcgagaaagaaattgttaatatatgcttagatcttgtttgctattgcataaattgaaacttaacaacaagtcaacaacactgtatctcttaaatatttgcatttcatcgacgaaaggagcaaacctgttgagagtacgggtaagtatgagaacatcaccatgaaagtaaataagtaattaagtaaagttgagaaattcatacaaacaatgaagcaactcaagcaagtcaggtcatacataagttatcaaactcttttaaattcgtagaaatttgttttaagcattaaaaaaaaaaagatattaaaaaatcaaatatcctatatctatagtgtaacaaaagaaacactgtatattaacacaaattagatttaattgttttgcttgaagaagaaagtgagggaaaatgaataaataaaaaaggttttaaaaaaaagagaaaagattcttctccctgtcctcgcttcttaaatggcaagaaaggagactctgatgggaagttcataactgaaaaataaaaataagacagaaaacaaagttaaaaataaaataaaaacggaagagagaaaataaataaataaaatcactcaaaggatttccacagtttttctttccatgttgatttagcccattcgtagacttcctccgcgccgccgttagacgccgcctcggaagtatcagcaaccgccgtggtgttcgtcgccttcaaaggctcgtttctctcctctctctggtatttttttttttatttctgggtttacttgtgaagattcggttatacttcggagatcattgttataattcacttgttctgatttagtcctacttgtcaaatttctggattgtcgaaattggcaattcattgtctcagatcgtatgattattggatctgattttgaattttagagttagagagttcatgttggagttttgggattaaaatcgtttctatattcttctggatctaaagcatttttagatcgtggaattgtgaaacagctaatagttttttttttttttttttgcgttttgatgattttcaattgcgattgcataggtttgatcataagatctacacttgattctactcactttatttgttgtttcctctaatttgaaaaattgaaatctgcagagatctgaatttgagatgtttaaaaaaatgagtgctactacaagcaagacggatcagaaagcggcattagacattgcatcatggctattcaatgtggttacttccgttggaatcatcctcgttaacaaagctttaatggctacttatggctttagtttcggtgagtttttcttcttttatcacaaactcttcccttgaaatattagtcaacggggttgacttgtttcaactcactactaaaactgatttaagatctgtttcttaatgtgatacagctactacattaaccggtttgcatttcggaacaacgacattgttgacaactttcttgacatggcttggttatatccaaccttctcagcttccttggcctgatcttttgaaattcgttttgttcgctaacttctctatcgttgggatgaacgtcagtctcatgtggaattctgttggcttctaccaggtctgtcctttttcatctcgatgcggatttacgttttccttcgtttaaagttttttttagtaagatcttgaaacgagtgtgttggcattgcagattgcgaagctgagtatgatcccggtttcttgtcttctagaagttatgcttgacaatgtcaggtattcaagagatacaaagcttagcattttgttagttcttgctggtgttgccgtctgtactgtaaccgatgttagtgtcaatctcaacggatttctagctgccgctattgctgtctggagcaccgcgcttcagcaatacgtaagtagtgcctgaaacgttaatctattgtcaaatttggtcagatcttggtcaaattcatcctgatatcgtgatcctgatcccacacattcattgtatatcatctaactttacttgtaaaccgaaaaggaaaatctgttttctaacaattgtaactacaccctgctgcagtatgtacattatctacaacggaaatattcactcggttctttcaatttactggcgcataccgctccagttcaagctgcgtcattgttgttggtcggaccatttctagactactggttgactaaccaaagagtggatgcatacaacttttcatttgtatctctggtaaagtttcttctccgtttctttacaaagtctcctacgattcaaaacagagcaatgagtatttggaacatagtgtagtattagtagtcataccaattcgcatttattccatctcaagaactgattgttatactctgttggatttgtctttcctaagctctatctaacacaattttttgggcagttcttcttaatactctcgtgcagtatcgcggttgggaccaatctcagccaattcatctgtattggaagattcacggcggtgtctttccaagtacttggtcacatgaagacaattctggttttggttttgggattcactttcttcggtaaggaaggattaaacctacaagtagtgcttggaatgctgattgctatactcggtatgatctggtacggtaatgcatcttctaaaccgggtggtaaagaacgtcgtagcctgtctattcccataaccaagtcacagaaactatctgaaacaaacgaatctgatgaaaaggtgtagaagaaagaagtgaatcgcattgacatagaaacaaaaacaagatactcagatacaaacaggtagagttatcaaatgggatattatttataaaccaaaaaaaagaaagggatttaattatttaatttcaagaactataattttcttttcttacagagctttttgtttttatgaatcttacatattggtaaatccttttttggccttttgcattttgcatttttttgcctaattctcccaaaagaaacatcatccatacggagcgataaataagaaaatctcaattttattttatttttaacaatttttgtctcttatgaattattacagtcacctgcaatatccacttttgtaggtattttctttcgtaacgtgaatatttattcttgggaccatatgagttttatcatactaaaagaaatatctgcattcaaaatgaacggaattattcaatggttccttgaatgcaatctttagcatttattgttggagatatcatcatggtcatttacgtaatcttaattttaaaaatatcatcaaccatatcattctatatcaagcacatggattcacccccgttaatcgccgtgttataagggttttaattcaaaaaattctctttttttctcttttgacgtctcttttaattgtcaagacttttaagttaagagtctttaagacaaaagagcgaacgagaaaataaacgggggcgcgcacacgtgtaaagctctgttttaaagaggtcgttgcgtgtggagataaccgaaacgggaaagttctaacgaaaacagctctgcttacgtgtgcgtgtagtgttaaacgggatctctcctcacacgtgcgtctgttatttgacgtttgattgtttgaaggacagaaatgtgtgattttattttttttctttgtgaaagaaaaagaagaagtttatacccgttatcggaggaagcccacacgaatttccccgttttgtaatcgctaaataaacctgagtttgtctctacgaataaagagaaaataaactacaccaaactacttactagttttgtactttaaaaatatattatatagtgtatttgatgttttaaacagaattatttgtagttgtatctattaatactaaaacctaatacaaacataaaacaaaagtcaaacctgtattgagctagcattactcgtcatattttgctacttgaagttgatatacatatgaagacgaaaataattttattaaggagatatgacagacgaattattattcgataccctgacgtacatgttgattttaaatggggtttgggatgcaaatataaatttcatacaaaattctaaactggcctaacaattaggtgttagatagatgttttggctggaaacagctcgggacttaattaaaatttatttgaaaggacacatccattgtcttcattgaccaaaaaacctttcaaattttccaagtagagcaagtattaactattaaggtctttgtattttcatattagcttaacatgtcaatggaaatttaacgataaatccagcagacagaagaataaaacgattaacttaatatgttaattttcaatcatatatggggttcatcatatatatatatatagtctaaataattcctttatgttagacctaaaacgtgggtccttcgtggggtcacttgctgggtcgttacaatagtataaatacaaactatgaaacaaagtagatagagcgcgtaactacgtgattttgattcatacgaccagcttaagagataaggtttttgaagattacgtgcaaaacatacgtgattcgccctcgttgatatatcacgtcatgttctctagactccagaaatggtttcaggtacttaatcaattaatcaaaacccgtctttgaactataaggagtttcaacccaaaaaaaaatatatatataagacatgttatatttaatttattataagacatgttacatacggcttttaatttggcaaaaatatgcaattgaatgtgttttgcttataacaattaacaaaaatgctaatttagacagctatttaggttaagattggcggtcaaaggttgtgatgtaatttaattctaaatcatatcatgaaaagttgaaaacagttaagatattcgaaatttgtgtttgtacggcgattttcaatacaataattaatcaatagttttataatctggtccaaatacaactgcatacgatgtattgagattattgcactttaggaaaacaaactattattgtttaccatcattacatcatcaaaattgatatattatgtaatgaatttggtggtcttattacatatagtttaccagtatacagacacacatttttcgtggataatttgatttctcaaactttcactttaaaatatccataatttaatatatttagatcaatacaattgttctgattttggattattgatttataaaaataaaaatatgtgcggaagatcttgtaggcttgtagaaaattttcagataatggcgatacggtgaactcttaccacattttgagttatctaacttgagcgttaaaatgattttaatatcatatcggtgttttagatagtaacttttaagtgtttgacaagaaaaaaagataataacttttaactatttgtctatttgccattttgtgataaatgatatatttttttaatctcctaaagattatcccaagctaaaacaccaaaaacaatcctaaatctacacaaacaataattaaaatttgttgcataagctaaaaagttagggaaaaagaagaaaaggaaaggtagtgaggagtagagagatggccgcaaaaagccacccgcttatctcccacttccattgaattgtctcgtaactttgcattctttcttattattgttgttatctaatcaaccaccactcattagctcacccacacaactatctggatttagctttttagttcattttattgtaattattttttcgaaaagatattttgtaattgaacgggaaaggaaagacgtaaagatattgtaatttaaaatttttatgtatataattttaaaactataatactggagatttcaatacaaaataagatacataaaaatgtctcacttttcaactaaaaaggtattattttggtaggagcatttcgtataagttcatgtaaaaatccaaccttaaattcgtacaaaaatatacactggggttttaaactaaaaaccagatagttcttacaaaacatataaataaacctattgaaagaaacgaagacgaaaatccaaaaataaaagatatttaaaactgaaaatgttcaataattcggaacaaacaaatatgcgatgtttcgtgttgtcacgcgtttcaggaggatctggaaaccattgaaagtactcaacaaagctggcttctcaaattataagacaaaacattatactttaaattattattgcatctatgcatcagaagaaagaagaagaaccaatccagctttaaaacattatcgattgctgttttcacttgtcagtacatattatattcaaatttcttacatgatttttttcagttttatggagcaaaagttaggtaacatttaccgccacaaaaaaaaaaaagttaatgagaatctgtatcataatgaagaaaatataataaaaccagaaattgggagagactgatggtcaaaagacgacatatcaacgtgcgaaattttgccacgtcatcaacctggacatgagcacgtgtagtttcttagctttggtgggtcccagaaaactgatcatctattcacgataatgataattgttctcattttttttctttgttacgataatgataatttccagtttattcttttaaccctttctgtgaggatttttttaaatttaaattaagttctaccctttttaaaaaacaaatactgtattaaagaaagagatgaggcccatcaagagtagggcctgttaaggaaaattatcgtccaatgggtcccatatacttctgtataaatagatgtaattggcttgactgtcgagtcagcatttcccttttttttgtggttcggcaaaattcattattgcattttttatttcggtcgccataataaaacttgcattagcagaaattttgtatactgagtccacattattaattgtttatagaaacgtttttacttgttttggtacagaacggattcaaatctaacaagaaagagatcaaacgctacttttaagataccaattaaatttattatattttcgggcttatttttacatgctaaaacttagttagaaattgactgttgtatttaaattttgtaatagtaaattccaaattccagtcgatattatcattacttactattaagacacttggaaagtggtaactagtgataaatagttaaattttaccaatttacaaaaaaaatgaaaagaatgagatgcatttgtcagttaaaaaaaaaagtaaaaggaaaagaagaaaagagaattttgttgtatggtagtaataactctgctgaagagcaaaaagaaatgacttatatgccctctattaggtcccaccaaccaaaatccaagggccttttcgtatttacatggagaggaagtgcaactttcgtcactagatttactgttagattacagatacggtagtgctacattagatttaccgacgatgacgagaatatagctaaaattcagtatatatttaccaggttaaatcctgaccgttgagataacatcaatggctaagatttgtttcagaccgttgtggggtccatctcgtacagtgtactacactgctaacatttacgaacgtctgtgttagtcacactttagatagatagacacactctctctctccaccaatcgcactcacctccatgagcgcgtgtagaccacgtcgcaatggtggctcgatgtagaaacaacgccgttttgtgttcacgtatgtctgacgcgcgagcagagagcgtgggtgatttgtcacacgagcgcttataaatgagagtgtggggaggacagtttcgtcccttttttggaagttagaatcattacactattttggcgttttgcttgattatgatgacattatagaataaaatgttctattatacgaaattaatacatcactaaacatacttttcattcagtttgtatttaaaaagttacttgtaccaatatagtattctatcaggttgtttgtttttctgttcaattgtacttatacaaaccttccaaaaaaagtgttacacttgcgatagatagttacacaaatgtcattctctatgatcttccttctttatttgaaaatggtatcgcagtattattcgctgaaagttgaaccttcaaaccagttaccattgcagacgacattttctctacaaaagttaaagtgatagtaacatatctcgaatttaattgaaaagtttactactcaagtagtcaagttcctgttacccaaaactatgtgtataaagtgaattttttgttaattatgtaactatgtatacaccgggtacagctgcacgtagggtttgtacataattacgaaatatctctataaaactgcgacagaaggaaaaaataatagaataaggctttaagagaagtttggtctatccgtctatgtaagtgccagagaaaaagaaagcagtttaaaagtgaaaggagggattaattagtgggaaaaggtttatcgaaaactaataataatacttctctgattattaaaaagagatggaatctgccattaattgacactcatgtcccaatcgtctctcacacgtacgttcgtttttttttttgtttctcttttgcaaaaagctatagagacaatctctcctccactttatttttagtttttctttcagatacaagtgagagtgaacaagagaagagtgttaatgtgaaatgtttgtggttggtgtgaaattcatgtaaaaatatgtatgtattaccttaacattaaagtaaatttgaactctttcaaactatcacattgaatgctccaaatcttgttgtatatgagtatcaatataaaagaaatttagatgcttatactatgttccatttttactgaacactacttaaccattagtccataaatgtggaattagttagttgctggcatctttatatcagaatcaaaagttttgcatattgggtgacagtgagtgcatacaccaataattcaccgatcaagatccaaccaagtaagaagaaaaatataacatgaattatcttgattttttttttaataaaaataaaaatcaatgaatatatatgcttattataaaaaaaaacccagcactaaacagaagatcagattagacttgtgttttaaaaatattgagaagagaatcaagagataggtggttgggggtaaaatgtatacaaatgttacaataaagtcttaagaagagtttaaaaagggtaagtaggatatgtagcttgcagaagacttgatcccatcccctaatctcacgttaattaaacacctctctcatgtacagacaaaatacctcatttctttaacttaaacttaacaaaagctactatgagattaaggattttgtgatgccattattttatttatttttagtatcctcttgcattaattaactttttttttataaccacatacaataattaaaagtagtattatttgtttgtatctgttatcgaaattgaaattaatatatataatttttataataatcagaagaagaggtaacatggcatgtgagtgcacagctgtgaccactcttcccttcaccatttgataaataccttcttccatcttccttcttctgtcttttgactctcttctctctctcctctctttctgctttcctcaatctctctctttctatctctagagcttccacttcctctctaatggtggaaccaaaaccctagattccccctttcatcttctctacttcccacacttttctctctcacaaactcttgagaaatgaagactttttcaagcttctttctctctgtaacaactctcttcttcttctccttcttttctctttcatttcaagcttcaccatctcagtctttatacagagaaatccatcagcttataagcttcaaagacgttcttcctgacaagaatcttctcccagactggtcttccaacaaaaacccgtgtactttcgatggcgttacttgcagagacgacaaagttacttcgattgatctcagctccaagcctctcaacgtcggattcagtgccgtgtcctcgtctctcctgtctctcaccggattagagtctctgtttctctcaaactcacacatcaatggctccgtttctggcttcaagtgctctgcttctttaaccagcttggatctatctagaaactctctttcgggtcctgtaacgactctaacaagccttggttcttgctccggtctgaagtttcttaacgtctcttccaatacacttgattttcccgggaaagtttcaggtgggttgaagctaaacagcttggaagttctggatctttctgcgaattcaatctccggtgctaacgtcgttggttgggttctctccgatgggtgtggagagttgaaacatttagcgattagcggaaacaaaatcagtggagacgtcgatgtttctcgctgcgtgaatctcgagtttctcgatgtttcctccaacaatttctccactgggattcctttcctcggagattgctctgctctgcaacatcttgacatctccgggaacaaattatccggcgatttctcccgtgctatctctacttgcacagagctcaagttgttgaacatctctagtaaccaattcgtcggaccaatccctccgctaccgcttaaaagtctccaatacctctctctggccgagaacaaattcaccggcgagatccctgactttctctccggcgcgtgtgatacactcactggtctcgatctctctggaaatcatttctacggtgcggttcctccattcttcggttcatgttctcttctcgaatcactcgcgttgtcgagtaacaacttctctggcgagttaccgatggatacgttgttgaagatgagaggactcaaagtacttgatctgtctttcaacgagttttccggcgaattaccggaatctctgacgaatctatccgcttcgttgctaacgttagatctcagctccaacaatttctccggtccgattctcccaaatctctgccagaaccctaaaaacactctgcaggagctttaccttcagaacaatggcttcaccgggaagattccaccgactttaagcaactgttctgagctggtttcgcttcacttgagcttcaattacctctccgggacaatcccttcgagcttaggctctctatcgaagcttcgagatctgaaactatggctgaatatgttagaaggagagatccctcaggagctcatgtatgtcaagaccttagagactctgatcctcgacttcaacgatttaaccggtgaaatcccttccggtttaagtaactgtaccaatcttaactggatttctctgtcgaataaccggttaaccggtgagattccgaaatggattggccggttagagaatctcgctatcctcaagctaagcaacaattcattctccgggaacattccggctgagctcggcgactgcagaagcttaatctggcttgatctcaacaccaatctcttcaatggaacgattccggcggcgatgtttaaacaatccgggaaaatcgctgccaatttcatcgccggtaagaggtacgtttatatcaaaaacgatgggatgaagaaagagtgtcatggagctggtaatttacttgagtttcaaggaatcagatccgaacaattaaaccggctttcaacgaggaacccttgtaatatcactagcagagtctatggaggtcacacttcgccgacgtttgataacaatggttcgatgatgtttctggacatgtcttacaacatgttgtctggatacataccgaaggagattggttcgatgccttatctgtttattctcaatttgggtcataacgatatctctggttcgattcctgatgaggtaggtgatctaagaggtttaaacattcttgatctttcaagcaataagctcgatgggaggattcctcaggctatgtcagctcttactatgcttacggaaatcgatttgtcgaataataatttgtctggtccgattcctgagatgggtcagtttgagacttttccaccggctaagttcttgaacaatcctggtctctgtggttatcctcttccgcggtgtgatccttcaaatgcagacggttatgctcatcatcagagatctcatggaaggagaccagcgtcccttgctggtagtgtggcgatgggattgttgttctcttttgtgtgtatatttgggctgatccttgttggtagagagatgaggaagagacggagaaagaaagaggcggagttggagatgtatgcggaaggacatggaaactctggcgatagaactgctaacaacaccaattggaagctgactggtgtgaaagaagccttgagtatcaatcttgctgctttcgagaagccattgcggaagctcacgtttgcggatcttcttcaggctaccaatggtttccataatgatagtctgattggttctggtgggtttggagatgtttacaaagcgattttgaaagatggaagcgcggtggctatcaagaaactgattcatgttagcggtcaaggtgatagagagttcatggcggagatggaaaccattgggaagatcaaacatcgaaatcttgtgcctcttcttggttattgcaaagttggagacgagcggcttcttgtgtatgagtttatgaagtatggaagtttagaagatgttttgcacgaccccaagaaagctggggtgaaactaaactggtccacacggcggaagattgcgataggatcagctagagggcttgctttccttcaccacaactgcagtccgcatatcatccacagagacatgaaatccagtaatgtgttgcttgatgagaatttggaagctcgggtttcagattttggcatggcgaggctgatgagtgcgatggatacgcatttaagcgtcagtacattagctggtacaccgggttacgttcctccagagtattaccaaagtttcaggtgttcaacaaaaggagacgtttatagttacggtgtggtcttactcgagctactcacgggtaaacggccaacggattcaccggattttggagataacaaccttgttggatgggtgaaacagcacgcaaaactgcggattagcgatgtgtttgaccccgagcttatgaaggaagatccagcattagagatcgaacttttacaacatttaaaagttgcggttgcgtgtttggatgatcgggcttggagacgaccgacaatggtacaagtcatggccatgtttaaggagatacaagccgggtcagggatagattcacagtcaacgatcagatcaatagaggatggagggttcagtacaatagagatggttgatatgagtataaaagaagttcctgaaggaaaattatgagagttagaaacagagccaaagcagattctttgaacatcaaaatcatctaagggtcagtccgattttccttgggtctattttttttgtattttctactatatgctaagtgtatgtatctatgttatttatacataagacggatgttttttttttcgggctcggtcgaattgggggtggtggagaatagaactaagtaataactttgttaagaatatgtaaatatacagttttttggggagggatttgtaatgttttcgtttttagttctatggaaatttctacgttgctaacaaattaaatttataatgaatcatgaagaaacaaagagccaatgtgtattaaatttcgactgatcatgttcatgtaaatgcacgtgacctattaattcattattgtcggaattaatttggggaattcacactgcacgggaatgggaaagtgagaatagatgagacttaaatttgtttttatggatgttatatttacatgaccaatgtggtcccttttgaactatgctgagttaaacgtttttttttttgctatatacttattactgatgaaattgaaccgttggactatatttatatccatctacgttattttttccattactattgattttgttattggcccaagtagaatcaaaagaatggttttttgatgtcataatttgcaatatagaaatgggagggatatgtattgcataataagataaagataaacctttatcgagacataagattgtatgtagatattgaaaatgatagggtgatcaatggattttaaaaagtttaaacaattttgctactaataaataagagattgatatataacatggagaaatggaccttcgcctgaaattaaaacaaagtctgggtttcattcatgtttcagtgagacactgcgccaacatcaccacaacaagtcttacacaaggaacgtgtgcctcacgtgctcttctctttctctctgcagctacgtggactgtcttcgctcccctcgctcttcggatttcgtgttccttgctttcaaattctttcttctttaatctttttgattatttatttttcttttctcactactacccaaactaaaacacaaatcaagtgtttagacttttaataaaacttaaagaaaggtttatttgggttttatatgttcgctttagtctccaatactaatatattaagtggaacattataaatacatgcttcttatatactatatgatcatggatttcgaagaaacattatagaaaaaaaaacttgaaacaaatgcgatacggatacgtgcacatacataccaatacactattattcatcctagacaagacactgacataggcgcgtataaacaaacgcgctgaaactgtggaagaaggaaaagaagagatgagtagctatcaagcggaacacgcgcgacggtggtgggtacggagcacgtgggccaccgtgcatgcaagctgttcttgtcggaaacttcccctaacaacgtctccttccgccgtgggccgccgtccctttcctgtctccgccgaattgacctcttcctctctttccctctctcatctctctcccacgtgtgtttccttctcatccatacacttctcttaattaatttattatcttcctaataaatattcttaatacattttgtttttttcatatgccttaagaaattttatatattattttgacaacttgtcaataatactattcgttacgcggaattattgggtacgtacgtgggtttcattgctctttgtctgatatcaagaaatcaagtcacataaaattaaatacaggaatacgcacaatgcaaaaaaagccactatccataaaaattatacttatactataatacaaaaattctgagttgcaaatgacaaaattaataggaactacaaaaaaaaattagtaaaaacataacacggtggtagaattttgtttcctatcataaattttgataaaattagggcgtacttgaacacataaagggttacgattcaaaggaattaagcaatttgtactaaaaatacataattacaaaaccattctatcattttaggatctttttctttcaatcaaaccaataattcacgtttaaacgtcgtcatgtatctgattatgtacatataaaattgctctaaatatgtaaatatgggtcaagtgcaagacggtccatgcatttagatatttttctgtaaggcatataagtggaggattgcgatgtgtacgtaaatacataatcattaatcaatttatatatgtatatatacctagttatggggttggaaatctgaagttgaatcaatcttatcgtagttttattcattctcgaggcttctttctcacgtacaaaacttcccgcacgggctaaagcttgtttgtcaaataaattgtttagaaactgaggtttcgacgatgtacgaactacacaaagctacaaacaaagaaaataattaagaatttgttttgtacgtaaacatgtagacaaacccatttccacgcgtgtgagctctctgccattcatatacagctaagacttctgaaaacgacgttgattagttaaatgtgtcgtcgtggaaaaaactatgtaaatacgttctctattgactcaaaggataacaatatttctgcatattttttgtttacctgtgatttataatgttttgtaaaaatgtacgtaacgactatcaacaagatattattatttcacatgataacaagcggtcaaagttgttcttaccgagttactgtcaaattgcatgctagagcttattctaatatgtattgtatatatattatcatagtcttaaatcgaattatgtctatgaataatactttctctgcatatatatttttttttgtcaatatatgttatttagtctccatatgtttggctctctttacaacttacaaaaaaataccttaactaaaataaagatatagtgttaaactaatttaatcaaagaaattgttggattcatctcacctaggaatcttccttcttttcacgacgaagagacaaagaaacaaaaagcgacggctcagattttggtaatgtataatgaagtttcaaatattatattcatctcctcgcagcttctcccagctttctcgtttttaattcccagtctcctttcaacaagtttttttttctttaaagccataattaatgtttgggcgtcaggattacgttatcttaactttttccaatggtttgaactgctttaacagagccttgtaaaataattggaaaatttgcttttgataatagctaattagcaaatggaatcagtttgtccataaatatatatgtaatgtcgtaaatcagtatataatagaagaaaaaaaataagaaatttgatgatggcaaatactttgagtaacaacacaattggctatcgtgtcaatttttgagataaattaactaaattacattgatacatagtatacagtattatgaaaatgattatttaagaccttggattaaggtagcgaacgtgcggtccacgagggaatcacgtgggagtctccctcggactcggcggagcaagcgggtcacaacttttcatgtcctcgtaacttatgatttctatttctttaatagttttgttttcttttcgtaataaggtttcgtaatctaagttgatcaacgtattacactatttaaggttttacattacacttttgggaatcgagagagtcgagacgctcacgtgcttaaacgcgcttatccatttgtcgaatttcttggtttgtcacgtgatcgctatattcgtggacttgggtctatcattaaacccaatagaattttcctcgtctataggctcattatggtaatctgtctttattgaacaagtgtaaaatttaaagaagcccattataaggcccatcaatttgaaacatagactcaataagctgttttttggaactcattacaatataattttctgttgactccgtttaaaataagatacatttaaaagcccaccaattacaaactaaggcccaatgaaatatatttcctttagctgttgaaggtatcgttgagcgaaattttgtatttgtctttgctgcgtttttttggagagtttaaatttccttttgtcaaaaatagaaagcattttcggccaaatttttgttagtacaattttaatgataaaaactttaaatttttcgaatgtggactacatttatataccaaataatgtcacacaaaccaaccaacagagtaactataaaatcaattcaactatatattatatagtcctcaatttggaaatggtacattaatcatcttacaaacacaaacaaaccacggtgacatcgtccacattacaaatataaaaacatcgatcatacctgtttcctaacgagaacatgttatatatgtgtaactttttttttatcgagctaggtgttgatgattaatatataatacgataattagtttgaggcaaggcaaggttgattgatttttgatattggttgattcaatggaaatacaaattgaaatcaccagaagaagttggagagaggagggtgcaggtgagaggtggagagagagtcgtcgtcgagatgattagaaggagagtgaaggtgtcttccttcgtaagtagtgattaccattcttgggtcatctgctaatctctccactctcttcttcactctacacttgtcttgtgtgcatctgtaatagctcctgccattcacatattatatatattagttaatcttatatcaaattttatgggaaacaagtcttatttttggttagactagttatagttgaatatagagtgatataatatcaaacagatattaaggcaactaatggaactttatcacaaagctcatgataaaactttacaaaatgagtatacaagttacctaaacaaatcattattatttgtaaatgtcaaatgtcaacatgtgagaaagaatcttacagaaacccaaccccattatgtctcacattctcacataacactcaaatatttctacatgaaattacttttttcctttcttaacggttatattcttttcctatttttctatagctactaatccccagagggacaaaagtttttgttataacagaactgatacttaattacatatatacagagaaacgtaccagaaagattctactaataattttcattgcccttagaaaaatcgtaaatgaatgattaatcattacatggctcataattcactacaaattttcatcatattagtttacgttaaaaacttggaaaaaaaaaaactgatgattgatcaagaccgtaaaattcttatgagaagtcatcattaaccttcaaggaatcatgagaggcaaaaaagtggaagaactgatatgtagtcatcttaattaaagaacggctgagaattgaaagactcggaaccaatttcaaatcataaaattaaattaaattacctgggatgttgggtgtttttgacaactttctggccatactttctccatctatatccatcatctaagacatcaacctcgctaagtgtcttaaagcaaaaccgaggttccctcacttttcttcttgtcttaagcttcttcatcttcagagaagaaactacgcctaatgacgctgtgttatgtttatcatgacgactgggagtatcatgatgatgatgacgaccattatcatcatcattaatgccaccaccatcgccaacctcatcatcattatcatcaacatcaatctcgcttccatggttgtttttctggctgcttccgtatcccgcttgacaactccatgccctaaaccacattaacatataaacattagttacttatatataagtagccgagtcatgtgtgcatcctcaaactaattgaaaattctgtacaataaagcaaaagtaactagtagggaaatatacgagcttttggtttatatatttaaatacttattttgaaaataatgattaattttagtattttcgtaagtaactacttaccatggatttgacaggggtctttgggatgaaatactaccggtaagacgatgatgatcgagattaagaaaaccatcatgatcgtccctttgctttgatgaggacaaagacgagattagggtttcggggagattggtcatgagattgatggaatcttgaggatgacttatgaatgaagacgggttattatgaaggaaggagtttagggagttatgaccaagaaatggagacacaagagaagaaggagaagacgaagacgacgaagatgatgaagataaggtgctgtgactagggaaagagaagaagaaacctagatggttggtattaatagggtttatgacggtttgtgattcatcaaacaagcttattccttggtttatcgcacccatctcgcaaaagcttgacgaaggtgagattgtgtgtgtgagacagtgagagagaaagtttttgttttgctggatattttgtttgattttgggttgagagttgagacaatccaatccatccatgtgagtgtttcgattaatatataaatgttggataatgaaaaggtgcaggtgggtccaattggattggttttgttcgaagatttacatgtgattaaaatgctcatatttgttttgtactcgcctgattttgaaatataatagtgatgaggggtctttttaaaaatgtttgttgatattaataaagtctgtattttggttaaaataactatgaggttttagatttttttttttttttttttttcttttttttttggaaatttagaacgattataggatcaagcgaaaagacttacagttttgtgttttggtagcagtatacaacaatacgtaaaatttttaggtagttgaaatgttataacaatgactaatttgatctatgcatgaaaattattcattaactcaaatatttttcattattatatgtcctatgcagccttgcaactttcacaatatttgaaccttaatttggtctttatcaaaaaaaaaaaaactaagttggtgggaaaactacagacttataaacatttttccacttatgcttttccaaactaagattattggttcgaatttgatgtctaaaagaaagaataaccacatttgaaattaaaaacagtttttttttttgctactccatatatgattaaaagtgaatgtgtatctgttcgtcgaattacatgtgttttctcaacattactattaactaaaatcgtgtagacaaatttgttttctttgttgatttaataagaaaaaggaaaaacgaagaaagatagaacaaaaagcagaaaacgcgtcagggcactcgagagaaagatgaagaggtagtgggagttaacgtcgtgtcgcttaaacggcagccagcttttgtcacggcgtcccgttacgtccctcaaacggcgttcatgtgttctatacacctatttttatgtatttattcaataaaataaattaataatttagtttcttcttgtattgtattttatttctacaaaacactataattcttttttgggaaaaatacaatacttctatttctagcgaatttcgtgttttgaacataaaatccatatatttaggcaggaggatcatatttgaatcgttcaaacgaatagagaaggatagttgcaccattttgtaatcattatttctccaaaataaatccaaatcctctagaagttaaattctgaaatcattttccatggaaaaaaatggctggagatgtgatgggaatatacacacatctatcactttcttgtagctaggatttcatatttgatgtagtactcaaataatttatacgattgctattattttgggaatccaaaaaggaatatatagattaggaggagcaatgatgaaaaatcttaggtgcaaatctattactctgtacctgtatgaggatatcatgatctttgacaaaaaaaataaaaatgaggatatcatgattatgatttgatgaattagcctcctatttgacatttttcgttaaaaaactgtacctaagaaaagataaataaattcgtaaaatatacactagtattaatcatacaagagagaaaagtctgttaccttttgcaagatcgcattttgtaatcgtttcatcaagttccgaaaccccaccgtttctcaaattccaagcccacttattatttactttatgtatatatatatatatatatatatatatatatatctgtgtacatacatataaatacacgcatgataacctcctatcagtatttttatgatatcaagttagttattatatatactatattacacttatatatataaggttaatcacacgtttctaattacaacaacgcacatattaattaattcctccctctaatgcattagtactttcattatccatttagaagactttttttgtttctgtttcaaaaaaccagttaactaaaatttaatttatatgcatggttaaacggtcaacaaaattattttacattcactcgtgttgattttctagtcggtaaaaactaaaaaggaacctcgtcaataatagtaacatcagttagtcgttacatcatgagtaagtatcgtaattggcgccgtacgtttgttgattaaccatacaaaaaaaaagaatgataattatgtgatttcttatacactaactaacattcagtaattaaatctttgtttataccacagcgatataaattatgtgaatgataattatgtgatttcttatgttttgaatccgtaataattaaccgaacatgtttgataatcatatttaacaaaatctttgtttataccacagcgatataaattaaatgattagggacggtactaatattacagttgaatatgtattatagtttgtaagagatttgatgtgcatgtgtttatttatagtttgtacattcattttcccttgagcgtaaggacagcgtcactatgacatcacatcggtccgtgagaatgatagtataacgaatatgcacgtaactcgtaatgacataggtttctttttaaaccgttgatgttcgtgtgtgtttagtatcatatgatttacatttggccaaaacgacggaaattggaatttactaaaaaaaattggggaaaaagttttttttttataagtaataatatgaatctgtttaatgggccttcagaagtggggaagagattggagtgtgggttggcgaatgtaatcatttcgtttttattatatttttactttgtttttgttcgtatatgtatttgaaattttacattattcgttttcacatccatcacctttcttcctctcgctttacacagtttcaataattacattttcagtgatctctgtacaattgctagtttcattttaagctttatgtctaactaggaccgtaactacgactagttttgtccggttcgttcggactgttcccatagatttgagtaaccggcaaatcggataggattgacaaacaaaacttgtggtttgtttacgaaatctagaatcagcaatttggtgcctagacgagttgaaaataaaacagtaataatgagttacttagaaccgtaaacaattcagtttagcgagtgaagctggaggaatgagtccattgtctacacatgtatctaatctaatactaaaaaacattgatctcgttgactttctaacaaacaaaaaaatcggaacacaacatacttataaagttgacttttgggttaatcacaactaatgaaacccaccaaaaagggaataatagaatctttatcgtacaaatttacaacacatatatatgtgcataacaatttataaagatttagtttaatataagggacagctaaggaaagaaaagaagatttttaaaaggaagaagatttttttctgaaagaaatataagagcggggcatgaagataaatgatgacaccatgcggggactctgcgtctgttaagagttataatttgacaacattatattgatccgaccatccaaagctgtcttgtaatgtccttcctctgtcactttatgcgacttctctcaatgcctctcttatttcttctctacgcctatctctttgcatatagttttcttttgtcatatccgtaaaaaaactacagattttttttcgggttcatttaagtccaaaaatatatgttgatggttctacataactctcattgttcctttttaagtaataagtaccttcttatatttatttatttgctctaattaagcaagtaacttcaaattaaaacattaggtaccaacaattatggtcttgagggtaaaaaagacgataaaaaagcctcagtgacaaatgtcaaaacatgggaaaagaattgtaacactaattaatccacaatcaagtgaaactgaaaaccctaacatggagggaccaacaaatgattggacataactgcaccaatcaaaaacttaattctgagtttattttggcataatttagtttggtgatacgcaactgggtcccattttaatatgacataatttagagtaaattatactatgaataaaaaaaagaccttaccataaaagtcattcgttattattacttatgtttgccattacaagtttatatccatttcctttattttcccggaaatattttttcaacgaccaagcagagaagttacgttacagtattatacaaagaacatttacacacattacccaaggaaggtgcaggctcgggccacttatgggccattgaacttgtacaaatatttatttagcccatgtaagaaatatcgaggagatattttgtttacataaagcccagaaagcccaattagtttggttgataattttttataacaaaaaaaacaaaattccacgtaagcacagaaacagacgactgacacggtggtccgtgaaggcgtgaaccgaatcatcgacggaggaaaccaccaatgatttctccatctcacgtcgtcaaatgtttcatcatcatcttcatcatctttcgtacgacttctttttttttttttttggtttttttttcccttcccaatcgaagtagcgatgccttcgcgatagctctctgcttcatctcgccactcatctcaacctcttgatttgggtctctcttgctcttgctcttgctcttgatctctctcaaggtattttattgttctctgaattgtttccctggatcgaatttgttctagggttttaaggttatagctcgaaatcgccgttgctcgctgttttagcatctccttttcacgttactgtgttcgttggtgctgtgattggtgttgagttgggttataagttcgttgttcttattgaattttgatatgtgcttttgcttgtgtatagtgttaagcaaataggatggaaaagttggtgaaggaaggcccaactctgctgcaactgcacaagtgggaaccttctcaatttcaactcaagctatcagaatttcgcgaggcgtttatttctccgtcgaggcagttgttattactactctcttaccactccgaagctttactgcttcctttggttgcaggtaataacttgtttctttcttattcatatgtgtatgtatatgcgtatcattttattagcgttgttcgctgttatcagggaggtccattggcagtgaggtttcgttaagtggtgataatgaagagttgaatagtccttcatgctctggtgggtcagatccagagaaaattgaatctccttgtggatcaggagttggttctggtgagcctggttttgtagataattgcagttctagttgcaatagtttcccttttatctttgatgcaaagtctgttgcttggggtagttgtggggatacttacaatcggcacaaagatcctttgtttagggaattgttgtttgtatctggaaatcatggtgttacggtccacgctttttgctgtacaaaagatttaagtgacaaagccaaaggcaaaccaaatggtgagctgaggcatggggagtgggttgagtggggaccttctaggcttagtcagaaatcagaaccggaaagagtctcttcttctgatggctcaaagcagtggatgcaatcttttttgattgatttggaaactactgtaattgatggtacaagacagtcgaggttccctgagaagtcagcgtttccgggttctgcagaggttgtttcattcagcatattaaatactgatttacctttctcgaatcttcttttccaagacaactccatacttccgaaggataatatgcctgaggatggtaatgtaaatgacaataattttctcgtagcatctgatccaactgctttggatgaaaaatctcgagctgatatgcccgtaaacaatgtcagtgtaaacagtttgtacaggtgcatcaaagttttctccagcgatgctcattctctgattggatttgttatggagttatcggattgtgcatctacgcctagaaggaatgaaaacgaaagaagcaagggtaagagaaatatctttgttgccaagctgtttagctgggggatagaatgggtctcccttgtgaagtttggtgagtcaagtattggacctacaaatgagtgggcagatttccggctatccgataactttgttatctgcctcagtgtttctggtttgatctttctatatgatgtgaattctggggattttatttctcatggggatatcttacagacatgcggtcgtggattgcattcttcatcagataggcaagaagcaactgcagaagcagatcagctaagtgactttcaaaatcgtgctccatccatgtctaagacttgtattgttggttccacggacagaagaaagtttagaaagcttattgtagcttctcatacaccactcatagctgcagttgacgaaaatggtttggtatatgtattatgtgtcaatgactttgtttccaaggaataccacatggccgcggaacctattcctgatttacttcatcttgggcttggaagtctggttgggtggaaaatcggcggcatggacattggccagaaaaaagtgcaccaccctagttcctctgggtctcgaggtgaagatgctttttccaggcgtgatcttagcttttctgcttcggaaatctcgatgtctgacccatgtttggaaagacaacagaacaattttgatcgaagagctggttactctggttcatggttgagtggtttttctgcacagcctaaaacaaatgggctgaaacttgaaaaatttcgaagagactcgcatgtcacgcggaagatgtttctatccgccgaaaaattaggattggatgataacatatgtttttctccatatggattcactcatttctctagaaagtatacaaataaggatgatcgaagctgtaagatttttcattatagtctgcagacgcatatgactgcgagagatgatagttatttgaattacgatgtcaacaagaattctattcaaggtgcagaggagaatttcataggagaatcagttggttgctctttccaaggatttctttttttggtgacttgtgatggtctttcggtttttctcccttctatctcaataacctcaaattacccaactattgaggccattgaatatctgcagccattccagaccactgtcatgggataccggggaagagacgatttggcagcaggggaatcacgttttccttggcaagttgaggtcatagatagagttatcttgtttgaaggccctgaagttgcagatcatttatgcttggaaaatggtacgaaacagtactcatgttggttaatgacgtttttgcatccgtaaagcttttaatttatagagtttaaccttccacagtttgtttatagattgatatttatctcttaaccaacgtggcttgtcatgccgaaagagttttaagtacaagtagttgataattagtaactagtttaccaaaactatgtcatacgggtttgtttgataagtcaatacatgtggaaactagcataaaactgaacttaactgtaactgaatgcatggaatacctaattatatgatgaaatcatgctgggccgtgcattttactttcaaaattcatcagctgtttgtgagcatgagtaaacacttgtttgcagtagttcagtgaatttgttatctctcatttcttcacaattacgttatgatttctgtgtatttgcttgttgtaacaaaataacctcacatattgagacttgaagatgtttatagattcgctgacacttaaattttgttcaataagcttatggtatgttaaatgaatcactgctgtcataggttgggacctcaaaattgttcgtttgcgtcgactgcaaatggcgttggactacttaaaatatgatgacatcaacgagtaagttgctagcaatcttttgtgcttaatctgagaaccgtagtcccccacagcaaagtggctttccttaaacaaaaatattagagaagaattatgtgtggtttgtatggttgggttgacaacttcggtttttgtcttatggtttctatggaaggatgtgactactttagaaaagaaagattgcttgttaaaaatttgtgtaagagtgtaaatatgtttaatgccatcaatgtgatttgtcttgtatcatgaattgattttgattaacatctcctgtgtgggtaggtctttgaagatgcttggtaatgtgaagctggcagaggaaggcatgctgagggtgctcttttctgctgtgtatctattgtcgcgcaaggatagaaacgataatgagatttctgctgtatctaggtgaggatcttctgagtaattagggcataaggatagtttgtttttcaggtctcaacttcaatgaggtggatcaataatgaaacagaagtagtgttctccctgctttgtagatatgtccttacacattagcatggtttttagatttataactatgctgtatacatacatctttatgactgtaactcaaatttaaattattcatacatgttacactttgacttagattgaaggcatgttcagattcatgtaaaagtttctccaggccccacagctttaggattttgtatattgattcattgacatgcaatatttcttagaatccagttttagcaacatcattatcttgtacggtttagtaataccattagctttagtgaccgggctgttttctcgctgacatattcatacttattgctacatggtgaatataggctccttggattggctacaatgtttgcgactgagatgattcgcagatatgggttacttgaatatcggaaagatgtttacatgtttgacagcaaacctaggacacagatactttcacttccagcagtttcacttaatatcgatgtaatggaaaattcaaggaggctgtcagagatgggttatctattggaaatcaccaggaatattcaatcccgtattaccagaaagtttaagaagctaggaaaggtagtatattatattaatacaaatgttagttttatattttttttgtttttgccctagatttgacttatgatatgtgtgttgtacagggaaataatgagaagtcactgaacctggtagacccaaattctttgcaggatgattctcagcttgaaattgttccagatccagcatctgcagagtcaagacaacttgacacttctttatttgataccaatgaggagcttgctttgacgcctatgggtatgatgacagctggtcaaatcattgacgaaagaagttatgcatctggccttgtaccccaagggatagttgaagaaaagaaagttcttcctctggaaaatcccaaggagatgatggctcgttggaaggctaacaatttggatttaaaaactgtggttaaggatgccttgctctctggtcgactccctttagctgttcttcaattgcatcttcaacattctaaagacgtggttgaagatggagagcatcatgatacatttactgaagttcgtgatatcggaagagctattgcttatgacctatttttgaaggtaagcctgcatatactggcttagacagagtgatgtacatgtatgatgtctagcccttgactttcttgatgtgtagggtgaacctggggttgccattgccactctgcaaaggctcggagaggatgtagaagcatgtctcaatcagttggtatttggcacagtgagaagatctcttcgatatcaaattgctgaagaaatgagaaaacttggtttcttaagaccatatgaagacaatgtactggagaggatatctcttatcgaggtataacatttcctaatcattacttgtcgtaagggtatcatggttctgtatgatgctaactttatttaacttcttcgttgcttgaccctgtgacaaaaaagaggctttatcctagcagccacttttgggaaacatatcttgctcgtcgaaaggaactccttaaagctgcactaccttttgactccagtgaaattagcttgcaccttggggggtcgtctttgtttcagcatctcaagattgagtgtggtgaggttgatggtgttgttctaggttcttggactaaaatcaatgagagtgcatctgagcatgcacctgatgaaaccgatgcagttgctggctactgggctgcagcagctgtgtggtcaaatgcttgggatcagagaacatttgatcatgtaagaagttttctatagtcattctttctcgttaccctctaaatgcctgaatatttatctaattgcaccatcccattatactaatacatccgtaccttggggacgttcgaattgatttcaacgtactctgcatgtattggaattggaccagttggattatctcttgatctgtatagcttaacagtgtttgtagtcttacactggttagaggattttgttcagttgttttcttgttttataaagaacgagacaaatacatacgataaggcatctgtgcttatttctcgagtagctaccctctgcttatcttttcctcttaatgaaagtgtagatgaaatgtagatctgtatttaatgattgtgctcttaactagattctatttaatgatggtccttaatcttgggttgcattttatatctttttacttgaattagcacattgtagagcattagagggctgctactgccatctgttagtcctataaacacccttaatttggaagtcgacattattagatttcagtggtgagagtaacagtgatacatttgattgaaggttaaagactatacatatcaacattttttttgttttgttttgtattattccatgaacttactcaggcgaaggttgttttgttcgtttcagataacgtctgcatttgttggtttttgagtaatgtttcttgttgaatattttgtgcagatagtcttggatcagcccttagtcatgggtgttcatgttccatgggattctcagctggagtattatatgtgtcacaatgactgggatgaagttcttaagctgttggatctcattcctgaggatgttttatatgatggaagtttgcaaattgctttggatggtccgaaacagtcttctggcgtaaattattcagtttcttcccgtagcgagtatatatgctccatcgaagaagtggatgctgtacttatggatgttccttatatcaagatatttagattgcctggagatatccggtgctccttgtggctaacaacactcatggagcaggaactagcaagaaaacttatatttttaaaagaatattgggaaaacgctctagatgtagtatatcttctggcccgggcaggtgtcatccttggtaattgtgaagtttcatttaaggaggaaacttgtacgccatcgttagatctttgtttgtccataaagaagggaggagcaaatgttgataccctgaatgctgtacacaagctattcatacattactgcacacagtataatctgccaaaccttctggatctgtaccttgatcatcacgaattggtcctagataatgattcactcagttcattgcaggaagctgtggtaagtgctttccacgtccgtaatatatttgtgtccataagtctgttctttgtacgcctatggtttgtcttttgaagacttaatttttactgagaatgccaagaatctgtccatgtattcagggtgattctcactgggcaaaatggttgctactctccaggatcaagggccgggagtatgatgcttcattttcaaacgcacgctcaattatgtcacgtaacggggcaccaaatagtgaacccagtgttccagagattgatgaaatggtttgtactgttgatgacattgccgatggggcaggagaaatggcagctttagcaactatgatgtgtgctccagtgccaattcaaaaatccttgagtactggcagtgtgaacaggcacactaactcttctgcgcagtgcactttggagaatttgagatcatttcttcagagattccctaccttatggagtaagcttgttagtgcttgtcttggggaagatatatccgggaaccttttgcggaccaagactaagaatggttaagcctggtccaccacactttttcttttattctgtgtatagtgaggacatactcgctctgactctatggtttatcagtcttgtcagagtatttgaattggcgtgacggtgtattcttctcaacggcacgtgatacctcactcctccagatgttgccttgttggtttcctaaggcggttcgtagattagttcagctttatattcaggtatctatttctgttttatctgttgtatgtgctcttctgagttgtacaacactccttcaactttctggaattgaggatctagttgaactcaatacttgcactgtaatcggcgatataacaagtttaagaatttctatgaaataatttgatggttgtgaagaggcagacataggcaaaccatttggggaatgactactaagatttagggagaaaggaaaaacacatcaaatttgttctacatcaatctttaccattttacaaaagaaatttgaggcactataccaaaagtggtagaatggaactgtaactctggtctactcaattattagtgttttttttaggtgctggcttctgtttcgtctatacaattagtaggtattctcctcatgcatcttcttccagattttccgagaatgcatagcttgcttgttgttggttctctttgacttggagaccttgaattaaccctctgatatggcctccttgtgttggttcatcatagcagaaaaatggctgctaataaacttacatttgtacttcttctcattgtccaccccaggggattcacgagcacatatatgttttgcttataattggctactgatatagttacacacctgctcgttattagtagttgaaatatatttgctcaacggaattttttctgatatactgacacagtctattataacggaaaatattctttgtagggacctcttggatggctgtctttctcaggatatcctacaggggaatatctactgcatagaggtgttgagttctttataaatgtcgacgatccgacagagataagtgccatatcttgggaagcaatcatccagaagcacatcgaagaggaacttcatcacacaaaaactgaggtgacactatcaattgatcatattcctattctttaacctgttgacgatactacctttgtagatgctttaactgtttcattttttattagtttcctcttgattttctttcatattaatgtcttctttttacggaattatattgatgaaaggttgtcatctcatgttcatgcaagctatcactgagccttgtatattcaataactggtagagtttatataatcattacttatgtttaagatgaaccgaatttagggaaccgagcttggacttgagcacttcctgcatcgtggacggccactcgcagcttttaatgcttttctggaacatagagttgaaaagttaaaactggaagatcaatctggctcttcgatacatggacaaagaaatatgcagtcagatgttccgatgctacttgcacctctgacgcagagtgatgagtcacttctttcatctgtacgtgccggtcaccttaccattactagcttaaatttcattcgacatatctgcatcgcttttatgctgtctatttatgtctgcatgactgttgctttaccttcaggtcataccacttgctatcacacactttggggattctgtgttggtggcttcgtgtgccttccttcttgagctttgtggtttatctgctagcatgcttcggatagacgttgcatccttgagaagaatatcatccttctataaatcaaatggtaatgcggatatggcacatcagaaatcgctgaagcgctcaatgtttcatagtgtatctagtgaagatgatctaatggggtcactagctagggcccttgctaacgaatacgcttatcctgatatttcaagtgtccctaagcaaaaacagaatccaagtatttctggtagtcaacccggtcttccgctaatgcttgttcttcatcatttggaacaagctagtcttccagagattggagtaggtagaaaaacaagtggatactggctgttaacaggtgatggtgatgggtctgaactgcggtctcaacagacatctgctagcttgcattggagtttagttactcttttttgtcagatgcataagattcctctgagcaccaaatatcttgccatgctagcaagagacaatgattgggtatgcttcatgataattcttcttaccttttcgtttcttacccttgagctattacttgtcctaatatacgtaaatatcaggttggatttttatctgaggcgcagcttggaggatacccatttgatacagtgctcaatgtggtacgtctctcactccttactggtttcagaaatcacaaacagcaacttaatgtgctatgttacaattatatgacacattttcatctatcaggcatcgaaggagtttggtgatcaacgtttaaaagctcacatactgactgttttgagatatgccaactcaaaaaagaaagccaccacatcgttctcagatgacccaagcagaggactttcatgttccccctcagagggtggagcttatgtctctgctgaactctttcgtgttttggcatactctgagaagctaaagaatcctggggaataccttttgtcaaaagctaaggaattctcgtggtctattttggctctcatagcatcatgctttccggatgtttctcctttatcatgcctaacaatttggttggaaattaccgcagccaggtgtgacaaaatttaatgaaattcaattgggttgggtgtaatagtagtaatttactatcttaatgcaagtctatataacattgggcgttttaaactctttttcttgcatgttttctggaataaaaagatgcataacttttttcttagctctaacaaagatcatgcttttcagggaaacgtcgtctatcaaggtgaacgatataacgactaaaatagctgaaaatataggagcagctgttgtatctacaaattccttgccgacggatgctagaggtgtccagtttcattacaataggaggaatcccaaacggagacgacttactgcacatacatctgtggatttattggcttcagccaatagtttaaacatctctgctggtaaaacattttgttctcatagaacagaagctgcagaagatgaaaaagcggaagatagcagtgttattgatgattcgtctgatgagcatgcgtctctatcaaaaatggtcgcagtgctttgtgaacaacgcttgtttcttcctctgctaaaagcttttgacttgttcctcccgtcctgctctctactgccatttttccgtgctcttcaggtttgtcttacattttaacccactatttgccttctctgttttctgttcccggccttgattgtctgtttaaaataacttttacacgatacatgttcatgggtctgatgctgtttgataattttttcaccatgaacatctgttttctttttcatatgttttgctgtgggagaaaaactgatgatgcaattctgcaaaagttctagactaagaatttgtaaaatgctctgggtttttgtcaaatgcttagtttcttctgcctcattttacttttcgtggggtgaatgcagatatcttcatagggttttgagctgtcttaattcttttctgcaggcattttctcaaatgcgcctgtctgaagcttcagcacatctgggttctttttggggtagagttaaagaggaatcaatgcattttcagtcaaatacagccaaagatgtcaattttggggcatcttggatcagcagaacagctgttaaggctgctgatgctgttttgtcagcttgtccatctccatatgagaaaagatgcttactacaacttcttgctgcaactgattttggtgatgggggatctgcggcaacatattatcggcgtctttattggaaagttaacttggctgagccatcactccgggagaatgatcttgacttaggaaatgagtcccttgatgatggctctcttctgacagctttagaaaagaacaggcaatgggagcaagcaagaaactgggccaagcaacttgaaaccattggtgccacttggacatcctctgtacatcatgttactgaaacacaggtaagaaaacttcttgacgcttatcttatacttgaactgccagaaagtttctggcaatttggattctgaaggcctagcaactttaagaaaatcatggtcttgagaccattgaccagtttaggtatttctgggtaatttcccacgctgtttttctttgtctcttgctgacgagttctctttcactgcatgttggttatacactgtcacatgtgaattgctttgtagaggttcttagattgcagttgtgtaggaaatatgtgatatttacgttttctttgtatttaaaaattatctgcttctttattgagcccgaagactagcttccttgaatgcccaatcttaataaatatatgtatctgctttacctgtaggcagaatccatggttgcagaatggaaagaattcctttgggatgttccagaagagagaatcgcattgtggggtcactgccaaactctgttcatcagatactctttccctgctttacaggtgacttttctgtttgcctcacttgtaaccagtttatgtgaaagcctgttattgatacaagtgaatctgttgcttattcttttgcaggcaggtttatttttccttaggcatgcagaagtggtggagaaagatcttcctgcaagagagatctatgagctgttactgctatcccttcagtggctaagtgggctaacaactctgtcgcacccgtaagtgatcttgcaccacaatatgtaatcatttttactaggtttatgacttttattttaccaataccagggtttatcctttgcatcttctccgagaaatcgagactagggtatggttactggctgtagaagcagaatcacatgtgaaaaatgtcggagcatttagtccgagtagtatcggaaaagacatggtgaatggatatagttcaaatcttatagatcgaactgcaagtatcataacaaaaatggacagccatatttcttcagcaacgaaaaatagaattggagaaaaacatgacgccagggccgctggccaaggaaatcaaaggaaccaagacacgagcacttcaatatttggtgctagcactaagcccaagaggagagcaaaaggaaatgtcccacaaataagacattttgtggattcttcagataggaatactgactttgaagattcttcatctcttataaacatcaaaagcgagttccagcttcaagaggagagcacgggtttggaaatatccttatcgaagtgggaagaaagtatagaacctgcagagttggaaagagctgttctgtccttactggagttcggacaagtaacagctgctaagcagctccaacttaagcttgctccagggaatctaccttctgagctgataattttggatgctgttatgaagctagcaatgctttctacgccttgcagacaagtactattgtcaatgttagatgatgaagttcgctctgtcattcaatcacacagtctaaaaatagaccaacctatgattgaaccgctgcaggttgttcctctacatctttctcaatttgttgctttgaagactattacattttcaataaaactacataccactttatttatttttctcattttcccctatcttgctctgatatttttatttgattttatactgattgttttctgattcctagattttggagaatctatcaaccattttaaatgaaggcagtggacgagggctggcaagaaaaatcatcgcagttataaaagctgctaacatactgggccttacattcactgaggcatatcaaaagcagccgatagagttgttacgattactttctcttaaagcacaagattcttttgaggaagcatgtctccttgtccaaacgcattcaatgcccgctgctagtatcgctcaaatacttgcagaatcctttctaaaggtaacttagcaaaactatctctgttaacttgtacacgctttgtagattttatttttgaatgcacaaaaatctttatcttatggtccttatttgattagcttggcaaaaccctcctacatcttctttccgtcctgaatcttttctgtgggctctttcgtgttatgtctctaatctgttttctttctccagggtttattggctgctcatcgtggaggatatatagattctcaaaaggaggaagggcctgctccacttttgtggagattttcagactttttgaagtgggcggagctttgtccatctgaacaagaaattggtcatgcattaatgcgtcttgtaataaccgggcaggaaataccacacgcgtgtgaggtatgtgattttgtaaaagcttattaacaatagtttatgctgcatgagtttcaagatggatgagagaataagtattcaaccctaatttggtaatataatggaatgctgtttttaggttgagcttcttattctgtctcatcacttctacaagtcatccacgtgccttgatggagtagatgttcttgtggcacttgctgccacaagggttgaggcttatgttgctgagggagatttctcatgcctggctcgtctaataactggagttggaaactttcatgctcttaatttcattctcaatattctaatcgaaaacgggcagcttgatcttttactacaaaaattttctgctgctgctgatgcaaacactggcaccgctcaggctgtcagaagtttccggatggctgttctgacctcgttgaatctgtataacccaaatgaccatgatgcattcgcaatggtatgtatgtctttagtagctggaatcagccaagtaaaagagtttatttcatcatgttttgtctgcttaccacaagttcatcttagattaactttgactgcatctattacttgtgaacgtgaaggaacattttgggtagtttttttaaaggtttttctgttcatggcttttttcatgagacatgcattttctgcaggtatataaacactttgacatgaagcatgaaacggctactttgctagaggcacgtgcagatcaggctgcacagcagtggtttctacggtatgacaaggatcaaaatgaagatctccttgattctatgcgctattacattgaagctgccgaagttcacacttctattgatgctggaaacaaagcgcgaaaggcttgtggtcaggcttcccttgtctcccttcagataaggatgccagattccaagtggctctgtttatctgaaacaaacgcaagaagagcacttgtagatcaatcccgtttccaggaggctctgattgtagcagaagcttatggtcttaaccagccaagcgaatgggcgctggtgctttggaatctgatgctcaaacctgaactagcggaagattttgtggctgaatttgtagcggtgcttcccctacaggcttcaatgcttctggaactggctagattctacagagcggaaatggcagctaggggagaccagtctcagttctcagtctggctcacaggaggaggcttaccagctgagtgggccaaatatatgtggaggtcattcaggtgtttgttgaaaagaacacgggatttgaggttgcggttacagcttgctacaacagcaacgggatttgctgacatggtagatgtgtgtatgaatgcgttggataaggtcccggaaaatgctggaccacttgtactaaagaaaggacatggaggaggatacttaccactcatgtgagtgagtgaactcagagatcatctcaaagtatgcaatgttaagtatctctctctctgcttcatcgttgtaaagaggtcgatggggctgtaaattagccaaagaaatcggaaaaggttttttttgattgctatctttttggtgttgtggaagagacacaaacttaagtcttttttttatagggtttagtatttatgtgtatgttttgttgctggctctcacaattcttcaatttttgtttttgaccttatattttttttgtcccggctattaaatggcagtcctgcgagatacatagagatagagagactacagtgtacagtgtaataactgtctttggtataagctcttaatagaattgcattgttgaataattttggaagctttattgtttgttgattggcttccaatgaatatttcatattaaatgaaatttaatgatttaatgaaatatttcatattcacagatttaatgaaatttggattaacagtgttttattttaagtttaaatgtcatttgtaatttaatcgggaaggagtttttaatcgttcatctgtatttcttcaacaaaaatatacaaaacgaagaaagcacagtcggtctctcttcagtcgtcacattagctcctcacgcgctttctttctaaaaaaattgaaaaaaccccaaaaccgctgattatagtccagagattttgatgcggtggagttgacgcgccatgcttgcgagtggtttgttcacgaaacattatgcctacgacgtcgtttgaaggattcatattacgacgtcgtgtgaacgattcatattagctcctcacgcgcttactttctaaaaaagttgaaaaaatcccaaaaccgctgattatagtccaagtttttgatgcggtggagttcacgcgccatgattgcgagtggtttgttcacgaaacattatgccgacgacgtcgtttgaaggattcacattacgacatcgtaaaggattcataatacgacgtcgtttgaaggatttatattacgatgtcgtttggaggatggatggtgagtgtcagttgtaacaataacgagatatatactaaaggccttaacgaccaatagctcaagtttatgttaactattgcccaacagagatggaagtaaaataaagaggctacgatacaacagaaactgcagagcctaacagcaatcactcaccacattttagttttaaaacaaagaagaagcaatttttaaatgtcagatataaataatcaagaaattatataatctaaaatgaacactaatttttttatttttttttaatgaaagttgaattggtacttaaacaaactcacaccacatagaactcacaaaggggttacattgtcaccttacactcattttcttgtgcggccagaaacttattcttctttggtttctttaaccgtattgggacgtctctgtgcaagtgttctcttagtgctctcgaggacaccaaagaagattgatcctccaatacctatccacaacactcttggcccaataccctacaagtcaaatctcgtgtaagaactctactcttaatgccgctcaatagactttctcaagatttctactttcaactttacattaatctagtgtgtgtgtgtgtgtctacctttaagagagcaggagctccttcctctcttacaattgtttgaacacagtcaacgattccttgatattgtttggctgatccctgaaaaagaggtcaaagaaaacaataagatgattggattttagagacacacttgtgagaatattattattacctgaaccattaatcttgtcttaataacatcaagcggagtggtgactgctccggtcagagcacctgcataaacaacaacaatatcattagaccgctccttaactaatgccagatacatcacttgcacactatgattaactcggttttagatgaaatggatccatcgtactgtgtacttttaaggtaaatgcagaccagagccttttttttttaagttcagcggcttaattctcattcaggtttgattaaatggatccgaagaatatatattaaagcatataaggtatgtcaccaaccagcaaatgcaccgattagagcgttctcaggatcactaagctctctacgcgcctgccaaagagttgaccaaagtaaatctcatgcaaaatatcagtacatcagaagttatcatgcgtttttttttccgataccttatccaaagatattacatatagaagaaatgccacttattttacaaagaaacttacggcttttttataccccaagcaaagctgctcatatatgcagaactgtatagcatcaaatggcaaatctcgcaaaaggaaggaccggtatccctagaagcaaatgaaataagtcaccacatgaaaattcaacaaaagaatgcagacttaaagaaaaagctataaaagtgttactaactgcatagagacccctaaatccctcttttgatgcaatcattcgaacagcactgggagctgatgtaaactgtccggtctgcattctttgcttcacaacctaaacaatacacacacagaaatgttgactgagggattctatgtagaacatggtctggattgtgatatacaagagagagagtttttttttttttacctctgtaggcactcgaatcagagatgcagcaagtccaccgatggcccctgcagtctgcaatttgaaataaaggtaacaaattgttccttttcactctcaatacaaggcatatgcgagagtaatagcagaggctaataaagaagcaaattaacagttcaacgataagaaaaattattattgctaactgtatactattcatttactgatataatcatgtccagatcatttggtaacagcagagactaataaggtactttttcaatggcaaaactaaaggtgaagaaaccctctcaccaggtgagcaactgcgcttaaatgatcaggaaaggtcttcagcagtttctgctttgtgggttcgtaaactccaacaaataaagccgaagccctataaagaaagattgtcaaaataatcaagtataaaaataggagaaatacaagggacaaggaaataacttgggattgagactctaatcaaccaaaataactagggatgagatctgtgagatcagagtcacttacggtaagacaccagcgatatttccagctaatcctgaataaagacccttcaaaacaatttttccacctccacgagctgcctacatcataagatcaaactagtttaggaactaaaggtcaacactttttttaaccaaagtagtacagtagctaattgcatacagttaaaagaatgtctaacagagatttaaagttcgttgacctgcctgaagtctagtcttaatagtatcaattgggtataaagctgtttcaactacaactccagctgtacctcctgctataaacccctctgcatcatcaaaaccaaaacataagaataacaagacttagacacctgaagctgccgattcaaagcaaaaatgccaaactattagcaataaaaaaagaaattacttttcagatacaaggactgtatatgagtcagaacatgagattcataaaataatagttgcaaatgaaccaaaagacaaaatatacacaaaccaaagagagtgcggaagaaatcaaagggtttatcttcttgtgtattaacagatgcaaaaaagcctttgtttattttgagctgtgaactctgcattaccctcttcgaaacatctgcgaaaacaatagcatttatcaaatacatctcttttcataaccaatacgcgaaaaaaattcacagtcaataatgaagacagacagagagaatttaccatgagaggtcgctgaagagctcttcacatcaacggagagagtaagaggagccatgagaaacgcctctgacctaatttcaccaaatcaatttcactcatttttaagcgaaacgcaaaattcaccaagaaaaaacagagaagaaatcccaaaccaaacaagtaaagcaagagaagcaacaatatacaaaacatcatacacaaagcgtatagatacagaaaaaagtacataaatgtagtgagtgtggaattagagattacaggaagagaagcgcgaagtgtacgaaagagagagatagagagacctcgacttctcttcggctcttcccaaagtttctccgcaagaggattgattaaaagcttcttctgtttactaatgggcctataccgacacactagcctattaaaagcccgtatcagtttcttgtaatgtactatacgttagttaacctaaaagacaaaggttttgtataaaaatgggaaatttgttcttgttaatgaagtcacaaattttatttaaattttttacttgtggagtctcgtgtatacatacagttgtcaatgttagttggtagtttgcataaaaaacgtggtaagaatttagatattttaatttggaagataattatctattaaatacttttagtaataagacaatatactttacattacacgtgatcagaataattaaatagcatcagaaattcagaatcattgaaataagtcaatatctaacttgaagagatcgtcaaattacctgcttcttttcaagaatgattatgataggttttttttctgacaaaaaaaattgctactgttggtggaagagatgtatcaacaatcgtatgaccgatagacagcagaaaaaacagttgtataatatctctacgaatgacaaggaagtcgtaatctttcacgtctgattattatgcacctgagagaaatcactagcatgactgcaaaaacaaaacaaaacaacaaaaaagcaccatcttcttctcggttctacatgcagccacaaactctgcctgctcgaaagcgttttttttctttaaccccgacacatgttaacatttcatacctgatattctttataaacatatgtcatgtaactgtaacatgaccaaaatgtgattacatgagtgggcactgcaaacctcaagaagaaaactttgaactgctgatgaagctttcaattatctcccctgagtaaatttagctttgaatgtgttttgaagccgttctcgggattttgcttgagcagccaaggcaacatcgtcgagaaatcccttttgtgggaattctccaggtacaagactccaatagatctcaaactgttgtgctgcttcctcttttttatccattaagctatacactatgccctgaaacaaatactagcaatttctttcaagcggaatagccaaagacaaagctaaactccttttacttgataactgagacatatgactatagggaatcaaagatcattcttttcataattaaactctacctggcaaaggtaaggtcgaaaatctcgaggattatcattcaccatctgttgaaatatctttagaccttcttcaaattgaccctgaggttttaaaccaatggccataagtatatactacaatccattattcctatgcatatacttaaagatagctcagaaggaccaaaacacacaagaaggaaactaaggatgagttttacctccacaatatgcatttgaccaatcaagacttgtatgtttctctcctcggttactcggtttccttgtcgagcaacttccatagcttcaatgagcatatcaaagacagaggtgtcatgagtcttatgcattaccatagcaagaccctgcaagaaacaagacaagacctaaaattgaatactgcaatattgaaatcaagataccattctattacctacaccatttctcctaaacatccacttattcacagtttcataaaaagactctaatcctaaagaagcaccaaaaggtgagaaacacatacgtgcaaagctctgatcaaaagaggttgttctttgagaatatccttatacaatctcttggctttgctcaattcccccattgtttcatagcaaagcgcttctaaaagcttccactcaacttcatgaggctctaatttcatcagcttctcaacatatttcacagcatcttcatttttccctctcctcatcttcttatacacaacagccttcatagcctccatgttctctggctcattttccagaagcttctcgaacattttctcgtcctctaactctgcctgggagactacagttgcagtgggtagcgctaaagcaggtttcgaagagcagaaccctagaaagacaaacgacccaacaagtaaaatggcggcttttctcgccagcatctgaacgaaatccttggaagaaagaagagacgtcgaagagcgtatgagagggagcggcggagcgaaattgtcgggttgggcgagtctgggagcgaaaggtcgggactttctccaccgaaattggaacccatttggattacgcaaatgggtcggagtaaaaatcagtgattgttcccggcgatgatgaaatttagccggagaacagagagcagttactccgattgaacacatcttgcgtcttaaacccctttagcgagggccttataatattcccggaaaatgacatttttgtaattgggccaaaaagggcctgtataatagcccattagcctcaaaagtaggtagagaggcctcatgcttggatagctcactcacactcacagtgaataaaatcgaaagagcttttgagttttgactagtcgatcgatattagggtttgtttgtttgttcttctctgggagaccaaccaaatcagataattaaccctaacaacaaatgcctttgatgtgcaataaattatattgttttcctaattttcttgtcaaactatttaactaatcatatatacgtatacgttagacatgagagtaatgaagtacgtaagatacgacgatcgacacatcgaactatgcaaatattacatttttctgtaatgttaatgacttaattctaagggaaaaaacgcatggaggcctggatcctggagcatcatctaagactatggaagaacgtgccaaagtagataagaaaacccattatccagaggaccatggaacctaaatgtgccaaagtagacaagaacccaaaggtaggtacacaagacatcacaaacgtctgtatcaaacaccaccggccacacaatccccagtgttcaattattattgctttcatatcaattaatacgaaagatacagattcatgagttctaatggtatcaacaagtacatatgtgaaagctattagaagttaagaaaatgacagtatatacaatatttcccgttaaagctaactaacttcttatttaggcttctcatttcaagttattttggactgaaaatatttttgctatttcttaaatatcaacataaccattaatttatatctaccgcaaattcctttcaagcgtgataaaccgtaatactttatgtaaaagtaacttaattttcataaagaaaataaatactggcccattaaaattaaacttactaatatactatttattttctattaactttcttcaaaaagttttttttttgtttttgtttttgtaagacaaatctagctggacaattatcttatattgggacaaataactaattattgtacgtaatatgtcgcatgcaatggaccgttgttttcaaaagaggtttttgacttcccacagagctacaataccaaacaaacaaaataggacatagtcaccaaagataaggtacgatccctcgtgttatgattattgaaacgacaacgacaaataaccaatatataggacacataatatgatgctttctagtttatattcatatatatgttctctccttagtgtatgaatgaaaacatagctagataaaaatcaagcttcacctaattagtgtattcccccaaatttctcaattctcactaatggctttggtcagcttacttgaaatctccattgctttcttttgtttccttatctttcgaattttcctgatcagcaagaaaccacaccgttcatttctcacaaactggccgctcctgggcatgcttccgggtttacttaccgtgctccctcgagtttacgactttataaccgaggttcttgaggacggcaacttaaactatcttttcataggcccttttttagggggcatcgacatgttgttcaccgttgatcctgctaatatccatcacatcatgagctcaaactttgcgaattacccgaaaggaaccgaattcaagaagttatttgacgttttgggagatgggattttcaacgcggattcagatttgtggaaggatctaaggaaatcttctcaaagcatgatgaatcatcccgattttcaaaggttttcattagctacaagcttgagtaagctagagaaagggcttgtgccacttcttgatcatgttgctaaagagaaactcgtcgtggacttacaagatgttttccaaagattcacgtttgacactacctttgttttagcaaccgggtatgatccaggttgtctctcggtggaaatgccggaaatcgagtttgcaagagccttagacgatgcagaggaagctattttctacagacatttcaagccggaggtggtgtggaagatgcaaagattgattggggttggagctgagttgaagctgaaaagagctcacgcgattttcgatcgtgtttgctctaagtgcatagcttctaagagagatgagatcagccaagggattgattcttcttcttctaaagatttgttgatgtcttctataaatgttgacacgactaagtacaagttgttgaatccaagtgatgacagattccttagagacacaatcttgtccttcatgttagctggtagagacacaacaggctcagcgctcacttggttcttctggcttctatgcaataaccaagaagccatgaccaagattcgtcaagaaatcaacacaaatctatttccaagaaacaagaccgacgacggttctgtttcttatgattctgattcattcaatccccaagaggtaaagaagttggtgtatttacacggcgcggtttgtgaagccctcaggctctatccacctgttccctttaaccacaagtctcctgctaaacccgacgtgcttccaagcggccacaaagtcaaggccaattcgaggattttgttctgtctttactcattagggagaatgaaatcggtttggggagaagatgcaatggaatttaaaccggagagatggatttctgagagtggaagatcggtacatgagccatcttataagttcctatcgtttaacgccggtccaagaacttgtttggggaaagaagtggctatgacgcaaatgaagacagtggctgtgaaaatcatacaaaattatgacattaatgtcgttgaagggcacaagatcaagccagctccttcggttattctccacatgaagcatggtcttaaagtcactgtctctaaaagatgtttgtcttgaatgttttaactagaatgtagaaactgtggcagttgacgaagatgatttctatgatatgaagacatctcaaatcatgcatcctgaaatataatgttattgttaaacataatttctaaaatttaagtaaaatatataaatgttggtaagaaaattaataatttcctttttattttaagtgtagagttaaatcctatactcaagttataaatacaaattagccgaaaacattaatgttttttgcacgttatatagatcttctttttttttttttgtgtgtgtggaaatgcacgttatatagatcatgttgaaaattttagaaagataaaaaaagctgactaatgatatcttctctaaatgttcattattttttttttggtatgacagatgtaaaatcttcctttgttatggtatattttatgaatattagtcaatgcagttaaccaattcattgcagattccaaaaaaatctgaaaaacagtagaagaagagatatttgtctcaattaataccgttagatcaataaaattgattgtattctataaaagaataatcttaaacgagatatatacatacgatttagacaaatatattgaccttttaaagtaactaatcatatatatccataataaccagattgaaataaaaactattaatagtatttttttccttccaaacaacacaaattcttgcagatgttttagaggtatcatgattatttggaaatctttataaaagataagctaaccggatatgtattttgtggttatattctaaattcatgtaaatttatgttaaaacaaataactaattttgttttttttggtcaaaaaacaaataactaattaagtaagaatatatcacatgcattggtttccaacggatgattagactcattacaaagctacaataaccaaacaaacaaaagaggacataatcccaaagaaagtaagatcttattccatttataattattcagatgatagagacacatcaccgatacctcaaagacgcacacatgaaatgctttatatatccaacataagagtaaaatcaagtatcatcaacaagctgcaatttggtgtatctcaaaaggagaaaaatacattttaatttatctctaatggttttcataagcttgtttgaaatctccattgctttcttttgttttctcctcttccgacatttcttgatcaacaagaaaactcaccgcttgtgtcccacaaactggccattctttggtatgattccaggtttgctcgtggagattcatcgtgtttacgacttcataaccgagattctcgaggtcacaaacctaacctatccttgcacaggcccgtgtttcgcaaacctcgacatgttagtcacggttgatcctgctaatatccaccacatcatgagctcaaacttcgcaaactacccgaaaggacccgaattcaagaagctattcgacattttgggagatggcattttcaatgcagattcggagttgtggaaggatctgaggaaatcagctcaaagcatgatgatgaatcccgagtttcaaaagttttcattagctacaagcttgaaaaagctagagaaagggcttgtcccacttcttgaccatgttgctaaagagaagctcgctgtggatttacaagacatgttccaaagattcacgtttgacactacgtttgttttagcgaccggatatgatccaggttgtctctccgtcgaaatgccagaagtggagtttgcaagagctctagacgatgcagaggaagccattttcttcagacatgtcaaaccagagatcttttggaggctgcaaggcttgcttgggttaggagatgagaagaaaatgacgaaagctcgctcgactttagatcgtgtttgctccaagtacatagctataaagagagatgaggtaagccgtgggactaacaatgttgattctcattctaaagatttgctgacgtcttacatgaatctggatacgaccaagtacaagttgctgaatccaagtgatgaaagattcctcagagacacaatcttgaccttcatgttagcgggtcgagacacgacaggatctggactcacttggttcttctggcttctcattaagaacccagaggtcattgccaagattcgtcaagaaatcaacacagctctgtttcaaagaagcaaggttgatgatgatgcttctaacaataatgattctgattcattcagtccccaagagttaaagaagttggtgtatctacacggcgcaatatgtgaatccctcagactctatccacctgttccgtttcagcacaagtctcctactaaaccggacgttcttccaagcggacacaaagtcgacgccaactcgaagattttgttctgtctctactcattagggagaatgaagtcggtttggggagaagatgcattggaattcaaaccggagagatggatttctgagagtgggaattcggtacacgagccatcttataagttcttatcgtttaacgcgggtccaagaacttgtttggggaaagaagtggctatgatgcaaatgaagagtgtggctgtgaaaatcatacagaattatgagatgaagattgttgaagggcaacaaatcgagccagctccttctgttattctccacatgaagcatggtcttaaagtcactgttactaagagatgtttggtttgattgttttttcttttcagtagatgctatcgttgtgctccctaagggtgaggaaattcaagttcagcttggaaacggttcaattcaataatataaaatttcacatttcgttatcttttaaattatacattacaagaaaaagatttcttcatacatataaaatttcaatatggacatctcttagtaattgtgatcctaagtccatgcttcatagacaatatgaaaccaagaactggcttaatcttttgccctttaataactttaatctcatagttgtgtaatatctccacggccaccatcttcatttgagtcatagctaaatgtttacctagacaagttcttggaccagaattaaacgataagaacttgaaggagggctcatgtcttaagcttcccttgtcagaaacccatctttctggcttgaattccaatgcgtcatctccccaaaccgctctcatcctccccaacgcataaaggcagattataatcttagagtttgcttggactttatggccacttggaagcacatctgatttgataggagacttgcgcccaaaggaaactggtggatagagtctcattgcttcacacaacgcaccatgtaaatacaccaacttgtctaaattctcttggccatttccattctttgatggatttgtgttgatgatctcttggcgaatcttgctcaccacttgagcgttttcagagagaagccagaagaaccaagtgagagcagatgcagtggtatctcttcccgctagaatgaaagccaaaatagtgtctctgaggaacttatcgtcacttggattcaagagattgtacttggttgtatctagcttcatgaaggaagataaaagatcctcaggttctccataggaaatatcactaaacctttgtgatcttataatctctcctctcttgtctgatatgtatttcgcgcagacacggtcaaaggttgcattagcttcaatcatcttcttctcgtgtccaaatcccatccagttttgcagcttccacaagaactttggtttaacatgcctaaagaaaatcccttctccaacaacgtcgagagctttagctaattcatcctcatgcatttcaatggagagagatctaggatcagaaccggttataaggattaagattgtatcgaaagtgaacctcccaagcacatcttgcaaatccacagttgttccttcctctgcaaaatgattaagaagaggaacaagcccgtccttgagtttacttcttgtggtactcaatgaaaagctttgaaacgcttgatgatggagcatttcttgataagacttccttagattcttccatagctcagagtccgtggtgataattccgtctccgaagacatcaaaaacttctttgaaatcagatcctttgatgtaatttgagaagtttgagttcatcatatgatgaatgttagctggatcaaccgtgagcaaggtatccattccggcgaaccacggtcccttgaatgaaaatgtcaaatcagagatttcgagaatctcaacgatatagtcatagatcctgtggagcaccacgagcagacaggggagcatcccgagaaccggccagtttctagggaaccggccattataagttgttgttttgaacaagtaatgaaggatgagaaagcaaaagatggctacggaagcttcaagaaagcttatagaagaagccattggagtaaggcgcttggtaacacacattgtgatggttactttgctggcagaaggaactggattttatatcacacacttcaatgcaacaataaaagggatttttgctttaaaatacactatattttttatatgcacacactgcaaggtacatttaatttatacataagattagaaaatagtattaaattatttatatacctaacttttctagtattttgaaaagtgtcattttccaaaatagaactaaattaccgatacacctaaattttgtgatagatttttattttattttatttttacaactagtgcaacgtgattttgaaagaaactaatttgacaatagagattaacacttactttcgagaatcaaacaaaccttgtaatcctttgttatagcatctatctccgatagattttatttcaacggaaaaaggattaatttaagcattatacatacaaatttcaagctgaacatctcttagtaattgtgactctaagcccatgcttcatgtgcaacataagaccaggttctggctcaatcttctgtcctttgataacatcaatatcatagttttgtaatatctccacaactacggtcttcattagagtcatagctaattgcttaccaggacaagttctcggaccggcgttaaatgataaaaacttgaaggaaggtgcatgtctcaacccaccggactcagaaacccatctctctggcttgaactctgttgcatcttctccccaaaccgctctcatccttcccaacgcgaaaagaaaaattatgatgactgagtttgcttctaccttatgcccacttggcagcacatctggctttataggagacttgcgttggaaggcaaccggtggatagagcctcattgattcatacaacgccgcatgtaagtagaccaacttgtctaagttctcttggccatttcttccgtcttttgaaatatttttgtcgatgatctctttacgaatctttgttacaacttgagggttttcagagagaagccaaaaaaaccaagagagagcagaagacgttgtgtctctcccagcaagattgaaagctaagatggtgtctctgaggaacttatcatcactcgggttcaagagctcgtacttggttgtatcaagctttatgtgagatgtcaaaagatcctcactttcaccatttgcatgatgatcaatcccctgtgaccttatctcttctctcttagctaatatgtatttcgcagaaacgcgatcaaaagtggcatcagcttcagtcatcctcttctcttgccctaacccaaaccggttttgcagcttccagaagaacttcggtttaatgtgcctataaaaaatcccttctccaagatcgtcaagagctttagcatactccacttccggcatttcaatagagagagatttaggatcaaacccggtaacaataaagaaagttgtatcaaaagtgaatctttgaaacacttgctgcaaatccacgaccttctcttcctcacaacattgattgaaaagaggaacaagaccatcgtaaagcttactcctcgttgcactcaatgatagcttttgaaagccttgatgattaagcatgaattgagcagcttttctttgattcttccatagctccgagtccgaactaaagatcatttctccaaaaacatcaaagacttctttaaagtcggcacctttggtatagttggagaagtttgagctcaatatgtagtgaatattagctggatcaactgtgaacaacatatccatttcagcgaaccacggtcccttaaatagaaaggttaagtggctcatttcaagagcctccacgccgaagttgtagatgcggtggagaaccatcaggaagcctggaagcatcccaataactggccagtttcgaaaaacctgaccatgaggtttcttgaagtacatgtaatagaagaagaaaaggcaaatgatggctatggcaacgtcaagtaagcttacagaagccatatgagagagttaggagcttggtttacagacacaatatggtggtggttccttttgtgtgttgaaggaacttgtttatatagagtaagattattacatatataaattagcaaccaacaaaaagaaaatttattaaaaaagaaagaaattaccaatgcattcattcaactgcttttcatatcttaagaattaagattagtgaaagtgttaagctggtgaagctactaaccacacaaatggatgagacagaattggtggaggacttgtaaagaagggtccataatcttacaatttcagacactaaatgacaaaccaactttaagaggatagacaaatcgagaagtgcatcagaattcacggtcccagacactgcaacgaaggtcgttgtaatagttttccaaatctattaatgtcattaaatttaatcaacagtccaagtaacaactaactgtcagaaataataacacctcgacctggtcagtgcaatgaaggccgttttaacagtttttctttattacatgaagaaaaactgaatcatatgtttagtaaataaaatccaaaaaagtctagttgcatacataaaaacaagggaggagaaaatctaggcaaacccatactggagataataggaggtgttccgacaacatcaatcacatgcttaatagtattattggaagaagacaaaagtatctaataagacataaaaaagggtgtagacacagatttcgtctggatataataatacaattacaaaagaaagataaagctgagaaaccaaaagaaatcctgaccttcctataggagatctcattatggctactttggttggtctcttgactgctctccattatctgcaaaaatcatatctttttaacgatctgaacaacatcctcgtcctcaagctcgtgttcctgaagtataaaatacgatgtcgagacagcaatagttagttagtcagggatattgcaatatcgatttaccagattaacttttgtttgatttgctagaagaactaacctttccaactctttgtggcttgtgtttggcacttgaaccccaaaccagagcgctgtatcaggagatcattagttaagtattcatgagcgatgcttttgagcaagaaccatataacagagaaaagaaaaatgttaaggattttaattacttactacttgaattgtttaagcatgtctttgtgaatccggatgcagaagtcctctactgttctcttcttggatgataagattacgggatcatcataatccggattcattgcctttggttttgtgtagattcgagttagatccaagtattcccatatcttgtccagaagtccatcaagattccactccagatgcgcactgcaagataaataaatttatatcttaatggcaaaagtaaacaagtttatcgcaaatcctgccggtaatttaacaacatttacctgacaggacagtaatgaggaagtttgtccaaaatttcaagttcctcaagtgtgattgaatcgatcttgttgacagcatagatacagggcatataaatccgactgccctcgatgacatcaatgaggtcatcagcggttgcatcgtagcgcagggtgatgtcagcattgtgcatcctgtactcaccgcaaatcgccttgacggtgtcaaggtcaaggtgtgtgacagcgactgtagaagttagattgataccacctttgtcttttttcctaaatgttaaatttggtggctccttgttcaacctacatagcaacagtccatgatcgagtcagactatctaccagaaacgatcaaatatacagtgtataaaggttgttatataaacaatctataccttattccgaatccttcgagctctttttcaatgagacgcttgtgagtaattggttttatggcatcaagaactattaagatgcagttgcatgtcctagccgtacttataacctggaaatagtaaagtgtgaaagatgatcaaagagggtcaaaatataaaatactcaagagatttagactcgacttacctgtcttcctctaccttttccatctttagcaccctcaataataccaggaagatctaataactgcaaacacatagaaggggacataaaaaagagtattagcatcagtgtccaatgaataattacaggtcgtttcctgacttaaactaagtaccaagaagtcattaaaagatcaagcaagatacatgtttaatatagaagtaagactcgagaaaagataattacaagctaggacatggcatatgtagccaaggatttcattgtgtttcaacaattaccaagacagaggaaacactatccaagaattatcatttttcccccacaaataacagattaacacagacgcatagatgtagataccatacctggattttagctccacgatatgtgataacaccaggaatgcatgtcaaagtcgtgaactcataagaagcaacctgagaaaacattgtgtatcacagtatgtaccttcagaaaattgagtatcagccaaaatacagttctaattccaagatttatgttcatctatccaggaaaagactagcgccgaacagtcttgccttataagtgatattgcacaggaagttggtcaaaaagtaactagaaataggatgccatggatacgtggtaggtttcaaaattccaattacaacaagagaaaggaagttcaatattcgtaacgataactacaaacctcggaaaatgtcccagtcagcttgtttaatagcgtagattttccaaccgaaggaaatccgaccagtccaactctagaatctccacttttagtcacatcaaaaccttctccagcaccaccaccgccacctttggtaggcggtgcaagaaggtccctccgaagcttagcaagcttggcctgcaaaatggaccagtgaaatatgacgagaagctaatggtgcaggaataagtaccaaattctaaaatcaatacagaataatatataatgcctgcctagtagttgtttgatccaaggaacttcacaagagatcatgccgtaaataaaatatctcagctttgtgcttattcaatgatttgggagttcgtataaaacataaacgatttcaaccagaagttaaaatatttcttaatgagcttgcttactggttgggatttcatgatagcttttatcaagtatcaaaacagatataaaccaatcaaccaaatttgcatttgataagcaaaaacacctcaaccaatcaacctcactctcaaagctacaaaaaacgacctaaagaggagaaaaaatgtacctttaacaaacccagatgatgagaagtagctttattcttctgtgttttagccatctgccacataaacaaaaaaaacctcgtacttgtgagtcacccagattgaaaaatcatttctttgattcagaatagatatttcggattcacagttctatgcatccaaaattgaagagaagaggtgaagaatcagagaggattgaataattacctcatcttcaatttctttgatcttctgcataatagtcgacatggttgcagtcaaagcacagagagctcacggagacaacgtcaaggaaaagaggttatacgcgagtgaaaggaagaaggacaccggaatctctgatgcagagaaattgacgacgacggacgagacagaagcagaggaatcccgagggttttcgtttcgtccacctgattacgacaaaggagaaaaaactagaacagaactgtctagaattcggcctgacccaacaacattttaggcccatatatgtccgatttggttttccggtttaataaaatttacaacagaatgagaatttagtttggttatatacaataaaccctgttctgaatttttgttttgttttgttttgaattggtgtttttcggttttagttgatttcaaaaacggtttaactaaattcaaatgaatcatgtacaacataccattcatgcattcaccattacaacttctctctcaacccggttttaggagatgatgagaagaaactgagaactgaaccggggttaatttttgagtcttccttcggatttgaacggaacagaatcgattttcccttgattacaaaacttaatagcaacatctttgctctcctgagctagctaccccttcagcttctcgatattaaccatggcttattctttcttctttggctcgcttttaagcttcatctgctgcattggtctttaaccaaatagagtccatcactccaatagaaaatgagttcttgtatggtagttattaactaactcctctgatctgcacaagtaagtcgtctaacacttcataaatttgattagccttgcagtgagatttatccttagacaaaaatatatgaacctccttattaatcccaatccaactacgtccaggttctttcaccacaccttcaaccttcattctttctctcaccttcttagcttcagtccacatacccttggacgcgtaaatattagaaagcatagtaaacgatccactgtccttgggatcagacaaaatagccatttcagcagcatgttcagctaactcgacgttaccggcctttgcgcatccactcagcaagctcctccatactatagcagctggttttgtcggcattttctcaattaactcccttgctttgttcaatctaccagcacggcctaaaagagataccatacaaacatagtgctcagtttcaggttcaattccaaatcgaagcattaactcaaattgcttaagtccatcttctacaagaccagcatggctacacgctgatagaactccaacaaaggtgatgtagttaggctctattccctcactcatcattttttcaagcatctgaagagcctttttgccttctccatgattcgcataagatgagatgacagaattccaacaaactacatctcttgaagctgctgaatcaaaagccttatgagcgtcttcgggactaccacatttggcgtacatatctagtagagcatttgtaatatacggattacattccaagcctcttttcagaagctggcaatggaactcttgacccaattgaacacttgctaggttgccagctgctgtaaccatgttggcaaacgtgaattcgtcaggtctttctcttgataactgtaattccagaaacaggttgagagcttcttcgttctctgattgttgaacataacctgcaaacatagaattccagataacaagatctttcactttcatttcatcaaacacaagcctggaatccttgaggcagtagcaatttgagtaaacatcaatcaaagcgcttccagcaaatatatctaagtttaacccatatttgaacatcaatccatggatttgtttactcagtcccaagcttgttaaagaagcagatgcacgtagaaggctaacaaaagtcaataggctaggtcgaatcaatctgaacctcatgtcacgaaagatgttcaatgcttcatgtagttcccattgtgtcccaagtctcgagtaaccttcaatcattgcattgaataaaaccacatcagcagcagcgaaaatatcaaaaacttttctggcatcggtcaaacagtcacatttcgcatacatgtcaatcaagctgttagtcacatagctatcattgccaagattggctttgatagtgtaagcatgaacttgtgttccaaatcccaaagcatgaagtgaggcacaagatgtgagtatgctagagcaagcatacatatccggctttaaaccaaactttgacatactggtaaacaattccatggcttctttatgaagagcgttctgcttataaccagagagcaaagtggtccacgaaatgatgtttttattcggcattccattgaatagcttatgagccgctataactctgccacacttcacataagaatctataagcacattcatcagtgaggcatccatctcaagtccatatcttaagatgtgcgcatgaatctgcttcccaccttcaagaaacggaagtattgaacatgcacttagaaccgtcgaaaggatgtagccatctggaacaacattgtcttccattagttggtagaacagctgtaatgaaacgtagcttcttcccatttttacacacccactgatcatggtcgtccaagtcacagtagatttctctggtaaagcatcaaacacaagcctcgcataatcgatattaccatccttcaaataaaaatcaatcaacaaggtaccaacataaacatccctatcaaacccactcttgacaagaaaactttgtagttgaaacaccatccaacgcccacgaccatctaagcctgagcaagcttgaataaaactcgacaaaatatattcattcggactgtcttttctagttctccagaactctaagaaaaccaccaaagattcctcataaatcccatgatggttgcaagctgaaaccatggtagaccaagaaactaagtttctctcaggcattttctcgaacaccttacgtgcataaaccataccaccagctctcgaatacaaattgatcaaaatgttgctaagatacgtatctaactcgaggccccaaacaataatctgaccatgaactacattttgataatgcaacagatcatctgacgcacgcagctgcaagagacgagcaaattcgcgccttcctcggattcctatcgtagaaggaaaatctgcgtttacaaattccaaaagacttgaagcagaagaagatgaagaggagtataaacgtatggtttcttggactttacgccaacagcgatagcttctcatcctcctgagtgagaagaacagagcgtgctgtgacgaataaacatgctgccgttttttgtcataagcgaagaaagggtgatggaactaataaataaaacggcaaccagttatactaccaaacatcaaaacgacaggtggctgatgatattggatgatttaagttttttggttaggtttggtcgaaaaacaagaacggtagattttgatggcccggcatgttacattgcgtgggccatcctttagcaacatatgttgaattttaattccacgtttcacctaccaatattcctatttggacgacattaaatattcctattttatacatcattctgctaataaatcttgaaatttgtaaaatatttacattcatttatggttagtaaatactccctccgttccactaagatgaattttttagaaatttcacattctttaagaaatattgtataaaaataattttaacctcttaatatactttaaaaataataataaatatttatctaattatttagtaaggataaaacgggaaaacagttttaaaatttgcattggaaatataaaacttctatttttgtaagacaaatatttttcctagaaaatttctctttatgggacagagggagtaattatgttttatatatatctagattttatgattaagtttaataagaagacagattttagaaatttcatccttagtttacagagaaattctatccattcaaatctgtaaacattggaaagaatacgaatcaagatcatttgagatactcacaatatgaacagttgtcacatatcataaggaagatttcttaattttaaaacacgttacactttttccactaacattttatttggacttttaattgtcttattatcttcaattaaatacttaattattgacttggcataaatttagtaattaacagatagttttggaaattttcaccaacccctacgttataaattcgttttattcagattataattctaaaactaattttggccaataagaaaagcgtaagttaagagagagagagaaagagtctctgcctctcaagctccgccgtcggggaaaaaaggtgaaacctttatacattctccgatttcatttgtctttgcattgattgtttatgcagaatttggatttgtttattccttaaaactctttcttttactattattactcacgaagtttcttcaaaagtgtcatctgcaattagtttaattctcagaaaggaaatggttccattgatgatatttggcgttgaagatgagtaatagattttgctgaattcatgtactgtgcatttgcagaatatggaagcagctactgttcagaggtttcagtactcatcatggaatgatttgagaaattttgaagggaagcctcgtggttctctgaggtataatacacagcgaattaaggaagataaaaggtttagagttgttgctttaactcttgacaaaagaagggatcatcgacttagatcagtttctgataagaactcctcaggttcttacgaaaagcatgaatctttcgatatgatttagattgtgtctattttgatgacaaagagatttctttcttccatcttttttctttattctgtagcattgttggaaactggaagtcttcttcattctccatttgatgaagaacaacagattttgaaggccagtctaaatactcatctactattacatcaagacagtcggttaagatgttgttttgtcttcctgtatattttctctacctaaatcttatgttgacagtggattacattagcttctgcagaaaaaagctgaagaggttaaaccgtatttaaatggacgatcgatgtatcttgttggtcagtttctatgtctcatcctttgtttcagtattgtttagcttctcttgcattttggtagttgaacagtttcctcgtgaatgcgttaggtatgatgggttccgggaaaacgactgtagggaagattatggcaagatcgcttggttatacattctttgattggtatattgtctgcccattttcaactggatgttggttcaactttagctgatcttaaacattgttttgtaaatgtgccagtgacactttgatcgagcaggctatgaagggaacttctgtagctgagatatttgagcatttcggtgagagtgtcttcagagaaaaagaggttggttttatgcacttcttcccctaagtcttattgtagtctagctgctaatttcaccacatgctttattcctagactgaagcgttaaagaaactctctttgatgtaccaccaagttgttgtttcaaccgggggaggggcagttataagacccatcaattggtgcgtttccttctcatcaatgatcaatgatataatctcgatcatttggtaataatgtgtccaattttgtattcaggaagtacatgcataaaggtattagtatttggcttgatgtacctctagaagccttagcgcatagaatagctgctgtaggaactggttcaagaccattgctacatgatgatgagtcaggggacacatacacagcggtaatgctaccactgttaagctataaaaaagaatttatctttccctgtggttttgctcatttgtaacttcaaataggctttaaaccgtctttcaacgatttgggatgcacgtggtgaagcatacactaaagccagcgcaagagtttccttggagagtatgatcctttccacctttcatgttatatagcttgacacaatctcagccattttgattactgactagtttactcgatttgttcagatattactttgaagctcggttatagaagtgtctcagatcttacaccagctgaaatcgccattgaggtaagtcttagaatctctctgttcctattcaggtgtgtacattggagttcatatgttttatgaaagctcaactgcgtaattcatcatcaggcctttgagcaagttcagagctatttagagaaagaagatggtatggctagaccagatggactctagttccagaaagttatgtttccccgcaacatctcatgaatttgtgcctagttttgaatgttgtatataaatgaataatactctgtttgagcacattgtcttcttttcaaattgacccaaaaaatgaaaaggagccatttgcatttttataaaaagacggtaagaagaaacccaattttttgcaacttcatcagtgagtcattaagaaagacaaagccaaattatgtgtacactagacgaccaaacactcctcaataaaatgtgaatgtcttagatttacttgttcttcccataggtcttttagcagcacaagataagcaaagcatcaaaggttttcagcattcagctaaaaacaagagacacaagcatccaacaaaatgatacgatacacgcaagaaacaaagattcaccacattcacgtcttgtctcatcaaacggtaggggaaagagcatacacgacttcatatgacaagggaactgtaagaactgcgtcatgccactcgaccttcccccaaatctcttcgctgttgcgcctttcaagcgcaatcacagcacacaaaatcatcttgttcttacatccatcatcggaagtcacaatcttgtcccagaaaaccgccatctttccaccataatccgccatttttccaccacatctggcaaacctggggagtcctttcacacccttgagatccctccagagtcttgccatagtgtcataccatttgaagactcccttatagtaatagtaaagcacgttctcaacaacgcaataagaataccatacccaacctatatccatgtcccatttcatcctttcccacctaccttccttgggtttgtaaatcaaaccatgagagtttgcaatcaagatttctccttccaccactgcgcttttatgtatgctacaacctccaatctctgcgccagggctcgagacagactcccaagtttgggttctaggatcgaaaacctccatccagttggaggaattgctgcagtctttgcagcctcctgttacatatatctttccttcaacaacattagccgccggatatctccgctctactctcatgcctggaccctcgtgccatgtgtgagactgacagtccaggaccgagacgatagacgagtgtgctttgtcgatgggtcctccaatgttgtagatattagaaccaacggcaacgagacccgaccagtacgcaggacgagaatggagaactgggattgcagccagaacatacccacttgacatcttcttcttcttcttcttcttcttcttcttctcagtgatatcattggttagagttcgattaggtttcagacagagagtgaaccaacgagggttagggtcagaatctttctcctgtaaacacacatagagacaactctcagtgcgacctaacagagatcgggtcttgtagagatctggtgaagcaatcaaggagcggaagctcttggagactaaggagagagttgggtaatacaatctcgagacgcgtgctaagcagctcactactaaatcatctggaagtgaaggatttggggttgtcgattgcggcgtcggcgatggcttcttcgtcgtcttcctcttcttttccggggacgacattggcgagtataggcgtcgatcaacctctgtattcttttccgacagcagaggacaaaagttaggggttttgacttcacttcactaccgaagcgcgtgtgctttaaccgctaaaatttcgcgtgagaatttccacaaatcttataagggctaattaacacttctaggcccaatttataagttggtctcaaaagccattatatatctcaatgggcctcatatcattatttgatttcatcacatgctttctttcaagactgaggcactaatgcaacttgatacgatgcgaccatggatagaatgtctcattcttaactcttaacatgtatgtatataacagaataaagttttgtgaaagaaaaaaagcatgtgataagcgtgtgaaaaaaagcatgtgataattttttttatttttttcacaaaatactgtaataagcgtttatcttcttttggtgtgataatattaaatgaaaacacacataaaagccataatcatttggtttataagattgtaataagcaagcaagcaaagcaaagcctttgcaaacgaagcgaaataaaacaaaaaatttctcgtaactacacgaccaaactctcttccagagtacacatctttttaccgtccttgctacgaatgtgaacaccccaacctgttcaacaaaaacagtgtgaaacatttggttatagtctcgcatcacaaaacaagcaaagcttaaacatttgcaagattcactaccgagtcaacaattcatcaaacattagcggaacgagcacacacgaattcataaggctcagggactgtaagcacagcatcaaaccactcaaccctcccccaaatgttttcattgtggcgcttttcaagtgtgattaccgcacaccaaatcaccatgttattattgccagtagtaggtaacttgtcccacaaaaccgccatcttcccaccataatccgctaatctaacataagaataactagcaaactcaggcaatccttccaaacccttgagcttcatccagcatcctatcttagagtcatacaatttgattccgtctatattactgtaacaatacagcacattatctatcacgcaacaagaagccatacccatcctaaatccaaataattcacttctcctatcgcttcccatttatctattcttgggttgtaagcaacacccacacccttatacccaaacaagcagatagcttcttcaatcactgcgctcttgcgtatacgtctgtcacatccatctgcgatagggtttagcacaggctcccaagtttgggtttttatatcgaaaacttccatccaattggaggaattggagtctctgctgcctcctgcaacatatatcttcccatcaataacattggctgcatgtgaattccgctccaccagcatgtttggagcatcacgccacgtgtgataccggcagtccaatatcgagacactagaggagtgttcattgatgatggatccgccaatgttgtatatatcagaaccaacagcaacgagaccagagcaatgtacaggacgagaattggggattgagattgccgccataacatgcccacttggcttaggttttcggcagagagtgaaccagcgagggttaaagtcagaagggatccctaagcacagatagagacagctctctgtgcggcctaagagtgaccgagtctcgtaaagctccggtgaagcaatgagagatcgaaagctcttggagacgagagagagaattgggtagtccaatctcgagacgcgggcgaggatacttattagcaaatcaacaggaagtgataaaatctgggtcgaatgcggcgtcggtgagagtatcggcgacgtcgtcgtcttcttcttcatcttcttcaccggcgatgacattggcgaaaataaaattatcgactgcagagaaccaaagtcaaagaggattttagggattttgactgctaagccttatcgagcgtaatggactttgttgcttctgcgtttatccttcacattaataaattcttaatgggcctcaaagcattaaatttgttaatttgaagaagaatgcacaattcattacactggatttcgtttctataaatacatttgaaaagtttaatttcaactctaacagtactgctactgcatcattggatgattccataacgtacaatgacatgagacatacttgcacaatgaaagtattaaactttcttttcaaccaaaacagtgtttcataggtctgactgtagcagcagaaagaaagctaaccatcaaaggtttacaagtgaaacaatgtcaatagcataagtcataagagctaaaaagacaagacacaatcatacaacaaaatgatcaaatacccacaaaccattaaagattcaccacattcaagtctgtcattcatcaaacggtaacagctagagcatgttcaaactcatatgacacaggaactgtaagcactgcctcatgccactcgaccgtcccccaaatctcttcactgttgggcctttcaagggcaatcaccgcgcaccgaattattttgttcgtatcggaagcagaaggggaaggattgtcccaaaaaatcgccatctttccaccataatctgctatcttaacatcgacattacgggacaacttaggtagtcctttcaccttcataactttccacaatctcagcttagtgtcaaaccatcggaaagcatcaccataacagtacaaaacattctctataacacaattacaagaccaaaaccaactctgacccatctgatatccagcaaagtcccatctactttcctctagatcataagccataaccttcatcccaatcgtcaagtagaactttccatcaacatacgcgcttcttgatagagcgccccagtctttctcccagtaagggatgggcctatgatcccaaatttgggtctttatgtcgaacacttctatcgggtacaaggaatctgcatcatcaccgtcgacacctccagctacataaatctttccatcaataacactagcagcagggtccgacctttccatctgcaggcttggagcctcacgcaacgtgtgagaccggcagtctaggatcacgactctagaggaacgcacattctcctccatgtatccgccaaagaagtagatatcggaaccaacagacgcgtgacctgaccagtgctcaagagggggattaggaactggaattgggatcaaaagattaccacttgacatcttcttcttcttcttcttcttgccattttttagggttctgtcaggtttcatgcagagagtgaaccagagagggttcggatcaggatttccctcctgtaaacacaaatacagacaactctcggttcggcctaatagtgaccgtgtctcgtaaagctccggtgaacggaggagagatctaaagctcttggagacaagagagagaatcggataatacaatctggagactcgtgcgaagatacttacaagcaaatcatcaggaagtgacggtatcggcgtcggcaccggtgaaatcttcttcttcttcttaaccgatggattcttcgtcgacgtcaccctcttcctcttcctctccggtgaagacattggctaattatcgagatgaaatcgccgttgagcaagtcaatctagggatttgacttcacttcactgctatgagagttctcgaacgcgtttgctttactcgttcagattgcgagtgtgtgataattcaattgtgggcttaatatataaatcattttttaatgggcctcaatatagaaacaataaacaatcatccatcaaattaaatagcccaatactacacaaactctccaaatcatcatgaatcaaacagtagcagcaagaacatgtaccaattcatatgatttgggaactctaagcacaacatcaaaccattcagtcttaccgcaaatctcgtatatgtcgtgcctttcaatcgtaatctccgcacaccaaatcatcttgttcttagagctagaaggcacaaaagtatcccataaaaccgccatcttctcaccgtaagccgccaagttaacacggctatagcatagaaacttgattagccgttccaaccccatcaactttctccaaaatcttcctttatagtcataccatttaaactctctatcattataatagaacaatatattgtttatcacacaatatgaaacccatgtccgacccatctccatatccattccaactgagtcccatctaccttctttcgggtcgtaagccacatgacccgcaccgccaaacaagtgatactttccttcgatccctacgctcttgtatacaagtctctcgcatctctcggtgccaggacttgccacagagtcccaagtttgagtcttaggatcaaacacttctatacaatccaatgaagtgcaatcttcacagcctcctgctacatatatcttcccatcaagaacggtcgcagtggggtagtttcgtgccacccgcatggacggagcttcacgccatttctcacactgacaatccaagaccgagacgctagaggatggtgcatcattgataggccctccaatagcgtagatattataatcaacagcgaccacactcgaccaatgagcaggaggagcatagcgagataagatcggaaccaataaatgaccacctgagaaatttgttagttttcgatccggaactcgacagagagtgtaccatcggaggttagagtcgttaagtaaccgtaaggacacataaagacaactctcggtgcggccgaggatggagcgagtctgataaagctctggtgaagcaattagagagcggaaactcttggagacaagagagaaagttgggtaatacaatcttgaaatgcggcttagagagctcaaaagtatgtcatcaggaagaaacagattcgtggtcggtgagggtaccaatgataacgtcttcttctgctcagatggtgcctcctcttcgttcatggccgccagaggtttagttggagaaaaaattattgaagatttcttttcttctaatggtagaacaaatcaacacggagtttaatagataagaaaaaaaaaaaagttagatagatcatccgattcttcaccatgccttctttattacaaatttacaatacattattttatgatctttttggaattgtgactttttttccacaaatgaaaatcatataagaagaaaatgttggagcagtcagagaagactcgataaactagagagagattcaagactctaaagtttgactcggtcaagatgcacaacaataaattagaaaattatttatctaaagtggttaacgtgtgctcctttgtttggaacgaataataaaagactttgttgtccacaaattattaaagtaaacacaaagatgttagaccggtgcagagaaaacttggtttagaagatgactttgttgcctactaatttgcaatcacaattaagctaaatcatctacaagtgcgtcagtgcatatgtttagaagaaaacaaataatgtaattgcattcggctaaaaacatgaaccgatcattcaacatagttgcatactaatggaaaaggaaacgtaaaaattcaaaacaaaatgaagctacccacattattcaagtagtgtttctaatttcatcattcttcaagcttgttcttacgaatagtcatcatttcatcaaacagaagctgaaagagcatccgcacttttcaagctacaagacgctccaacttcaagtacagtatcaaaccactcaaccttcccccaaatctcatctccatcgcgcttttcaagtgaaatctcagcacagaaaatcatgcagaccccagaatactcccatttatcccacaacaccgccatcttcccaccaagatccaccaacttacaatactcacgctggctaaaatcatcaggtaacccttcaaggcctttcaattgcttccatgaacttaccttactgtcataccatttgaacactccttgatcccagtagaacaagatgttgtcgaccacgcaattactcgagcctattgcataacctataagccaatgctcttctactgagttccatttaccttcatctgggtcgtaaaccacatacttatccccagacaggtataattttccgtcatgtcctatgcttttgactgcacgtctatagcatacctcctcccaaaccttgacgatgtgagggttcgtcacagttccccaactttgtgtttttggatcaaacacttcgatccagtgtgagggattatccgtgtcttcagtgcctcctgttacatatatcttcccatcaactacgcttgttgtggaggatctcctgttcaatcgcatcctcggaccatcacgccacgtgtgagaccgacaatccaggatagagactttcgaagaaggttccctatcgaagccgagagggcaggaatcatcaccaacggttccaccgattctgtagatattagaaccaacggcgacgagattcgacgatagcgtaagaggatactggggagatggaatttggagaaaaaccttgtcgcttacggttcgattagggttttggtagagagtgaaccagtgtgtgttattgtcgaaagggaagcgtaagcatagatagagacacttctcggtacggtttaagagagatcgagtgttgtaaatctctggtgaagtaacgatggatcgaaatctcttggagacacgagacagagcgggataatacattctagagacacgggcaaagcagttcaataacaagtcattaggaagtgaatcgatcgaggttggttctctcgtcaccggagatggcgtctccttgtttttcttacgcggtggatctttgcgattattggcggcggaagatctggatgtggaagacattgggaacataaattttctgaagcaaattcgctagcgaaaagaaaacaacttatcaaggaacaaacttccttttagggtttttcagattccagaaatctcggacacgttatcttgcgcgaggaaaaccaataatatgttagcccatgggccaaaagataccatgtgaattatgggcctttagtttacaggacatgaacataagccttgccttataatacaaacctctgttttttcttgcaactaggtcattttagttacataaatgtgaatgtacactggacaaacaagcactaactttgtatcttgcaaaagttaattctcatgagtcatgaacctaaagagaaccgtagtcttccttctatgcaacccatacaaaagagtgttcaaatacatcttcacagtcagtcagtcactgtcccaaaataagctaacacattatacaaatgaatcagaaataccatcagaacaaaaactacaatacccgcttatctcaagagtgtccatcactaagctatggcagaaagagtttgagaaaatgtttttttttttttttctcaaaagagacagtcacaaaacaagcttaatcatctacagagtaaatgagtgcagattttgcatcccgccaaacaacacaagacattccttcaagtgtgacgtacttgaaaaagaaagcgattttaacctgagtcataacattcaaacctgcctcatgagtcataaatcaaacagtagcagcaatagcacgcacgaatttacaatcctcagggactgtaagcacagcgtcgaaccactcgaccgtcccccaaatctcttcattgttgcactttttttgaagcgaaatctctgcgcaccaaatcatcttctccttagactcactttcagggacataagtgtcccacaaaaccatcaacttaccaccataatccaccaatttaacactagcataatcatcaaacttaggtaacccttctaaaccctttagatttctcctagccgattccccttttccagagtatatccatagaaactccccattgggtctataaaaatagactatgttccctatcatacaaacagaagaccaatccttctccccacaaaatcctaccacgtcacatgttaaatcctttggctttatagtcacaccctgtccacactctgtcctacagatcgtataaatctttccttccagatctccgactccgaatatccgcttttggaacggcacaggcttccaagtttgtgtctttgtgctgaacacttgaatacagttcaaagaatctacattctcggagcttcctgctaaatacatcttcccatcaagttggctattggtgtgagccactcgcatgcttggagcttcgagccaagtgtgagatcgacagtcaaggaaggagacgttagagcatggagcatcttcgataggtccgttaatggcgtagagatgtgaaccaacagcgacgatgctagaccattccagaggaggagagttgatgattgggatcggaaccagaagattgccacttgactcattcttctccttgcttagggttcttcgattaggttttcggcagagagtgaaccagcgagggttatcttcaggagagtatcgtaagcacagatagagacaactctcggtgcgacctaacagagatcgagtcttgtagagatctggtgaagcaatcaaggagcggaagctcttggagactaaggagagagtcgggtaatacaatctcgacacacgagctaagcagctcactaccaaatcttctggaagtgaaggattcgaggtcgctatttctatcgacggctttttccctttcatgccggtggtagcggaagctgtggacgacgacattggctaaatttgctaccagctcaacggaatattagggatttaataacggaaacgtggtggcgcgtgagactaaaccaaccaataattgggcctagtgggcctagatgtagtaatttcattttttttcagagccccaaacatctagagctggaaatcaacaagatgatatataggccaaaacctgaattatttgatcaattcggataaggagcttcaaaacaaaactatgtcaattcatgtgaaactagatatcataattgcttcttgaattacgtaatttgaaaaatagtcttttgcatcgccttttaatcaattttcaaacccatctttctcctatttctttcacacacacaacaaaaaactaaaataccaaactgattgtgttcagattcccggaacatgcctgccctgcataccaagaacagtagtaaaccagtaaaagtgacgaacatctagagcagaaatcactaagataggccaaaacacttacttgtaattaatgtgattcattgatcatatagccacatgacatgagatgatacgttttaaaatgggactatttgaagtaatgagcaatgctgttccgaagatggtttagacaaaagctctttcacattgatctccaaaaaaaaaaagaggtaaacggtttatatgatattatgatgaaacatccgaagaaatttaaaaaaaaaaaacttttattaacgtcccgaagtaattaaaagtttaaaacagttatcctattatttttgtttttaaaaagtaaaattgtaaatagaatggaatagatcccaccaaaaaaagaaactctacaaagttaataccatcaggtttcttttatttggaaaagtaaaatcaaataacaaaaaataaaaataataatgaaaaacatactttaaagcaatatatcaaaatcaatagttttctatgtgtgtcaaaatattatcagtaccaatcataattatagtagataaacaattatggatatttatattttattgtctaaaaggagaaataataaatttagatttaccacaaaaatttttttggataagtctagttttctctcctcttatttgttttatgtgtgtgcaaatgttctctcttctctatatatacacagagtttacattctgaaactcacaattttaaaactgaaagaaaaaccttaaaatgtataaagcagtgttttggttaattactttgatttttctcttgttttctggatcatcaaacacagcattagcccgaatggcatatgaaacacccaacacaagtaagattacaatctgagaaattatatagttatgtttcttacatggccatactttggtgggataatacatctatcatagagatcaaattgacgcgaatatatttctcagcaaaataaatttgaataacctaattgatcattattacattgttgtttggatgctgaaaaaaaaaacagaagagggacaatgggaagaaaaggtgataagagggagcaaaattgaaacaccaggcagcatttcaaggcgggcacctgacccaccgacaaaccccaaaccctattgatgatcatatttaaagcttactcttttatgatgttacatagctcagatgcggaataaaaaacctcttattcgcaaactaatgtttattttgtcttctcacgtatatatatcatcttcacacgggcctgtcaacaaataaaaaaaatcaagagaatatgttttttttttgtgtcaggccaaccaaaagatatagatctatggaatctaatagatacataatacatgtaccggattcggctcagaaaaccaacagttgaagtatgtataattcatctacaatgtgtttgagtcttgtcgtgtacgtttatgtttggatttgatcaaaaccagtatcgcttaacccaaatcgaaccgcattataattatagtaaacacatcaatctcattattttgatggcaaataaataaactgaaactgaaatcatcgtaacaacttaataaatgaaaatccatcaataagatcttttgctagaattaaaacaatattgagattaataaaagattgatttaaataagatcttgtctttcaaacgttagaaacaacaggtgactctctcgttaagatttttctctcgaagatagccttaaaacgcatcttcttcgtttgaccgtctctaagagtcttaccagacgagaacatggactattcttcaaaaagaatagataacgcatgcaaattaaaagagttggggacgactttttcttcgttagagaaaccttattgtatgactataaatacaccttctctccaaaagaaatcaaaaatcattttctaagacaaatacaaattgacatagaccaaaatatttggcttatgaacgatttatgcattgtaaaactcattatttaattaaaatcaaaatgtatcaccgcctggtttggttaattgctttgattgttctattgttcgttggatcatcaaacatagaacaagtaagtttctagttattgataaactttattcatttctcaaaccaaattaaagttatttattttattaatatattcattgtatatattcatgaaaatttcatttcaaaaagggtgcatgcatgttaactgtgaaaatgaattttatttttttctcattcatgaattcacatcttttctgcacggacgatcattagaaagcatccgtatgactctcaacatggtaattttaaatattcaaaaatattgatggttttcaatgtttactaattgtatgtgaagaaaaggaagaaagggtttgggataaaattgtgatcaaagaaatcaagattgatgttggtggaagtaattcaagacgtgcaggtcaaggaaatgcatcagatccaggcaccaagatctagcgacagtttaccaatgattattattactaactcggacaatttagaagagttccgtagattcaaattcattccattttttaaactaaaagatatatgtctataagttttgtcaattaaacctcctcctatccaatgtcatcacatacatttcctttcaggacgaagaagtgtgtatatacacacacttacaattcaatctttttataaagatcgagagattaacaacgaaagaacaacaaaaaattcttacaattatcctaaacaatagtatataacgtcgacgaccaccgccgtttccggtcatttacatacacgttacattaatttgaaccataacaaaataagtcaaactctcacaaagaaaaagctaagttcgggtccattattcccttcaggactcaacatataaaaagtctctgaatctttagacccaataactctctcaaaataagctctcatatacgccatttcgccgtcgggtccttccgactccgagtttcccggcaaaactccggcgcccatagacaccggacgtaacaactccatcacgttaagatcttcttcggtcgcttctcgtttcacaccgtaacccgttttctctcctttacaatacattgtccataacggttcttccaaaatatctgtcttcttctcggttttagaattgttattatcagctcgaggctgtttctcagtctcgagagctattctcaccattcccgtgcttagctctttttgaagcgttgtggtttgcatggcgagctccacgactaaagaaggtaaacatttagggttttcttgaatggaaagacttactcggcctttacggtatccgaataacgttccggtgattcttgacgtgttgtgatgtggatccggtaagcctaaaccgggatgtataaccgggattttgcatgctacggatggtgttgtaaagattgggaaagatcgaaacacggtgcgtaagactctgaaaacgtttgttctgtttttcttcttttttgaagatggtggctggaggagaggatgttgacgtggcggagtggttgtggacgtcggagagggtgttggagacgaaggaggaattgaggaggaggaggaagaagaacttgtagccattggatttgatgattctcccattagacgacgatcgtacggcgaagaaagaaggagaagatctttcttcgacgaccgacgacgactaaaagaaccaacgtccttgtagaaatgtagtcttttttctttttctttagctctctattcctcctccttattgaattgataattttctcctagtaccaatccttatccttgaatttgatttttttgtttttcttttctaaatttcgtttttgttaatttcttttttaagagaagttaattagggatttcaatggtggttaaaaccgaagctatatttgcaagcaacaaatcgcatttttatgttagtttttctaagcttggtcatattttataaatgtgtagtggttgctattgtttgcataatcacttgttatgaaacttttatccggttaagtatatataatgaagccaacagtacaacaggatccgtggcgcaatggtagcgcgtctgactccagatcagaaggttgcgtgttcgattcacgtcgggttcaaataccccgaaaattagatccttaacttttttattcctgtatttatagaaacggcccaattgttttgctgtatttacaaaacggcccaacttgtttgctgcttcactgaatgtaccctcaaaacttttttggttgcaactgtaaaaaccttatccgccattaaaggattaggaaaagaaaaaaacttttcgtcaatggactacttgttgacatcaccttcgtcactgagattctccgatttcatctcttcgattcccaaagaaaccgatcacaaatggcttcgcttctcagtaaatctcggcgatgcgaggaggtcgacgaggacgaggataacttgcggtgcgatttcgtcaaggaggaaacttgctgagagagagagtgcggagagagaaaatagagtgctggttcggagtcttatgtcgaggattagtgacagagagccattggtgaagacgcttgataagtacgtgaaggtcgtaagatgtgaccattgtttcttactctttgaagagcttggtaaaagcgataaatggctacaatgtctcgaggtagtcctaatttggagtttcagcttctgtgtattgttagaagattttggattgtttttatgatccttttagctcattgatggattcatagattgtgtttgtggttatttatgttccaatggcaagactgtatcatgaaaccatgctttgaggttttacttcttccttgcttgaatttgtgtagttttgaattccagcttctgggtctttgaaagattggatttttatcagtttagctaaatggtagattcataagctgtgttttgtgttcagaaacaacactttagcatgaaaggttctgtgtggaggtgtgttggtgctttcattcttaacttgctgtgattcttccttctataggtgttcaggtggatgcagaaacagcggtggtatatcccagataatggagtctactcgaaattgatatctgtaatggggaaaaagggtcagacccgtatggcaatgtggttgttttccgagatgaaaaacagtgggtgtcgtcctgatgcttctgtttacaacgctctcataacggctcatcttcatacacgagacaaggcaaaagctttagagaaagttcgtggatacttggacaaaatgaaagggattgagcggtgtcaacccaatgttgtgacttataatatcctgttgagggcttttgctcaatctggtaaagtggaccaagtcaatgctttgtttaaggacttggatatgagtccagtttctccagacgtctacaccttcaacggtgttatggatgcgtatgggaaaaacgggatgattaaggagatggaagctgtgcttactcgtatgaggagtaacgagtgtaagccagacatcatcacctttaatgtgcttattgactcgtatggtaagaagcaagagtttgagaagatggagcagactttcaagagtttaatgcggtccaaggagaagccaactctgcctacattcaattcaatgattataaattacgggaaagctcgtatgatagataaggcggaatgggttttcaaaaagatgaatgatatgaactacataccaagttttatcacatatgagtgcatgatcatgatgtacggttactgtggctctgtttccagagctagggaaatatttgaggaggttggtgaatctgatagggtgttgaaggcgtcaacacttaatgccatgcttgaagtttactgtcgtaatggtctatacattgaagcagataagcttttccataacgcaagtgcttttcgggttcatccagatgcatcgacgtataagtttctatataaggcatataccaaggcagatatgaaggagcaggtccagatactgatgaagaaaatggagaaagatggaattgtacctaataagaggttcttcttggaagcccttgaagttttcgggtcaagactacctggttctggttctgaaaacaggaaatcaactcgttccagcaggtcacgagacagccctaaaggacgtggtggaaaccaattgactgaattccaagataaagatgtaacaaactgaacaaactctttgctggatgttaatctgagcgcactgcactcccaatgagttatccagtcctttccctgagtcatggttagtattcttctttatttgatacccatctcgaactaagattatatgttcttatagagatgatgaatctaccgccatagctagaggttcagtttggttgatttttattatgcttgagactaattgacatttttgtcatacgatttcagaataagcatgttttcagagctgttcaagattgcagaaagaactatttggagaacttgagtggacatgataaaggttccagggatgaatcaagaaagcctagtcaagaaaagcagccactatttgcttcagatcaaaataatatgatgatcaaagagaagaaagaactattcactagagtcttgtaatcgattggtaaattgtaactgaaaagtatcatatatatataaacaaaacatcattgttgttggaattaccctagcatgctgaagaagaacacacataacaaacatatctggtttttggaacacaaggtttaaccattacaatttgaaagtgtctgaatcgttgaagcttttcaactgttttcctctgcaaaatcaattcattcacataagaacaaatttctgtttgtatctcataggaggaagcaagaacaaagaaagacagtgatctagaaacataccatttattgctcccatgttgtggtcttctttgtagacccccaaaggagagccatgcacagagagcatcatctctccagcttttggtagcctcagagtctttggagtcattccaaaagaaagtctttgcccattaacctgcaaaatataaaagtttcattgtagagtctctccttgtatgcccaaaatctatcattgaaatgctcattctgcaacagagaatgtaattgataaatgtcgaaaccataaactcaatttcttctctctagatcaatgtacaaacaaaatctcgaaggagaaaacatgctaaagaatcaaacaaagaattctagagtaggtacgagataatttgcatcaagacagaaatagggaatataatcataaatacataccccaggagtctgaaaagcatcatggcctggaagcatttggttctcagatgtcccctgaaagacctaataaccattggaaaatagcaaattagcgttttctacttactgtcctgaagtagttttgcatacttttggaaggccgaagaaaaatacaaggttgacaaaattaaaattgataaaacctaaacatcactaaaagaaacaagtaaaggcactactcagtttggtgaaagcctgcaaaattgataaaagcagatgacaaattcactaaatgttctacaacagttgtatctaatcattcaagtctgttctaataggattaagggaaccaccagaaagaaaatggcaggaagacaagatataaacttacaagattatcgagctgtgggttatcagttcctaacaggttagctttcactgccaccaaagacaaaaataaaagtaaaattcaaagtcaaattcctaacaaaagaacctaagtgagctttacataccgttgtcaggtaaatcatagccaccaagagatgacctactgtataaatcggtaaaacgcatcgacaagcgtttcaaaatagaataattcatgtcaacgccattctcatttccagcaaacgaatcaccattttcgtctctccactttaactcaatctccccagtttcttcgtttctcgatatcgataaatccggaagattctctttaaagaagtctaacacaggagtgtgtagctgttcctcagtaaaatacgaacgaagcaaccgcaatgcagttaacatttgttcaatctcaacatcacggattgctctaatcgcagcaatttgtctttcgactacacaatgttacccaatacaccaaaaatcagatcatgataatcctaaatttctgagttgggtattggaataattgataccttcttcgtcgacgaagtcttctttcttctcttcgattcgaattcgtttctcgtcgttcctatcttcttcagtgagtttgacacactcctttgcttttcgcttcggcattatcgatttctttcgaagaattagatgctcaattcgaggaattgattgcaatttcaaatcacaatctgaaattcaaaaccctagaaacagtgaggaagatgaaaaacccccaaaatcaaaaggggttttgaaaataatattaaataaataaatgggcgggagttacgcttaaacgaaattaaagaaacgaaattacgaaaatatccataaagttgaatacggcccatgggctcaataatattatgatcaccaaataacatttctaaataaagcccgaattgtgatatttttttaaaaatagttatgtttctaataaattcgatgtatttaaaagttgtggtgacaaaagatcggaaaaagaaaaagaatgttctttctttcacggtgtccacaaggctgacaagcatgattaagacgaccactaaagttttcttgacaccaacattgtacttactttagatgctcttcacgagtttgcttcaaatgtaataaaaaaacttcttttagttacatgaatcgagatcttattactgaactaattatgggagaatattccccatttttctaatattaatggcgaggtatcaatctacatctatagccaatttagccacgtgtgtgggccaacttttatccgttgaataagtgcttcaacgtataattaaagacttttgaaactcttatatggacatataattaaatgacttggcctcaacgtatacatcatagttttatatctcatctctaccttccatagaaactcatttgaaacttttgggcagagagtctgaacaatcgctttgttgtcgtcaagaacgatacgtccctataaatgtaagttattttgtttctctaaattcagaaatatcccacctaaaaattcgactgtttggtatttttagtaacaagcttcatgaataatattggagattttcttggataaattattgattttcatctaagttattccaagtttatgaatttcccactcatcatatttagaagaactttgattttttttcttgggtggcttttgggtcaaaacaaaagaatgataaagtctcattattattttgagcttttgttcatgtactgtgtggtcaaagacagtaacataaagtctttgttggctttgagttttagcgtatacgcgtaagactggttttaacattttcaatagttgactaatctctattttcaattttgttttcgggaaagttcgaggattcttcaaaatttattgtttatatgaatctgtttctgtttaaacgttgaacatcattttctttttgtgtttatcctctgtgattaatctctttgtttgtttctctatcaatagtagcaatgtcgctggttcgaacagtgacgatcgttctttttataatcgcgtttctgcaaaacgctgcggctcagaaaagacagcaaagtattgttaagtctcgcggtgcggttgcgacagatgatggacggtgttctgttatcgggatgcgtgttcttcgtgaaggaggaaacgcgattgatgcgtctgtggctgctgctctgtgtttgggcgttgtaagtcccgcgtctagcggtataggcggtggagcgtttacagtggttaagatagctggtgggaaagaaattgcttatgattctagagaaaccgctcctctaagagccactgaggtaaaacgcgttttagtaataatgtctttctttatcctctgatcaaatatgcgttttgtaataagcgttttcgttaaaagtctttgtgaatagtacacagtcttggttttttctcatgagcttaaataacgttttccttatacgtttttgaatcaaaggcattatttattggttgtttcacttgatgcagaatatgtatggaggtaatgttgacctaaagaagaaaggagccttatcagtaggcgttcccggggaagttgcaggtctattcacggcttggaaacaacatgggaagctaccgtggaagcggttagtgactcctgcagagaaacttgcagagggattcaagatttccaagtatctttatatgcagatgaacgcgactagaagcgatatcttagcagacaaaggtctctctgacctatttgtttcaaatggagagctcaagaaaccagggacgatttgccataacccaaaattggctttaaccttgaagctaattggagagtacggtccaaaagcattttacaatggcacagttggggttaacctagcgagagatatcaaaaaatctggaggaataataactttgaaagatctgcaaagttatagagttaagattaaagaaccgttgtctgcagacattcttggatatagagtccttggtatgcctcctccttcatctggtggcgctgcaatgatgcttgtaagttcggttttttcgtgacagagtttcacatttgatcaaacctaagtttcaaaatatttatacggagtttaatttcttgtgttgcaggttttgaacattctttctcaatatgggattccatcaggtgtttcaggccctctcggtgttcatcgactaatcgaggctctgaaacatgcattcgcagttagaatgaacctcggggatccagatttcactgatgttaccaaggttgtttcggatatgttgtcgccaaagtttgcaaaagacttgaagagcaagataaacgaccaaaaaacttttgatccaaaatattacgggggcatgtaagttctaatatttgttaacacgtagatttcttcttaaattcatgatttatagatctttctatctccaattcataggtggaatcagatcgacgaccacgggacaagtcatttatcgatcatagaccgcgagaggaacgctgtgtctatgactagtacaataaatggttactttggggcattgatgctatctccgagcacaggaatagttctgaacaacgaaatggacgatttctcaatccctatgaaatctaacggtaacttagatgttccaccaccagcaccagctaacttcatccgtcctggaaaacgacctttgtcctctatgtcacccaccattgtactcaaggtaaggggaaaaaccctattacttgtgatacacgaaactcttaattagggatataaaagatagttatctcctcttttgtttacttaggacggtaaagtgaaagccgctgtgggtgcgagcggaggagccaacattattgccgggacaacggaagtttacttgaatcattttttcctcaagatggatcctctttcttccgtcttagctccaagaatctaccatcaggtttgttacgttattattacttgtacacaataaaaaagcttacctttttgtttcgtaactaaaatttgcgattggtaatgtcattttcagctgataccaaacagagcttcgtacgagaactggacaacagtattcaatgatcatttcgagattcctaaagcaacaagagttgtgttggagaagaaaggtcatgtcctatctcctattgccggagggacgattgctcagttcatagttcaagaatccggtgagaactccggtggaagaagtgagcttgtggcagttagtgatcctcgaaaaggagggttcccttcaggatattgagaattttagatcgagatttattttatgtttttattgtttctttgattattgaaccgaactttgtgatgaatatatttttatttcactatcaaaactcgttgcattggctaaccaaaatctggaccaatttattatcatactcagggttaggcctcctagctagtcctacatgcaatggctaaccaaaataacacatcagaattcagaagataataagcaaccagaatgattaagcatgaatttcagaatcaataaaatgggatatacagattctatattgatgtgtattttgtatagagtttagctaaattaatgaaaattattaacaagcaaaaataagcattaagagatcaatttagtgcaagtggacaactgttacctatagatttttaaatacaatttatacaagataaaatcaattattctcaattaaaatttttattttaaagatttcttaaaaaaaaaaagatagataactaattattagaagttaaacatttaaagaacatttaaaacattgaccaacaatagatggaaatttctttaagagttacaacttttggaaagggttttatattcataatttaccttcattttggaaagggttttacattcataacttaccttccatgaaaatctcagatgagagtttgaccacaggtcttatttaatactcgtctgaacaaactcttgtccctagggacgaaagaggacgagatctctaagaaagagacatccatatgaattgtaagtcattttctttttttctaaatccaatacaaaaattattaacgattttatacgttacgttctgtgattaatctctctggtttcattctctattgatcgtagcatttatgtcgctcgttcgtactgcgacgatcgctcttcttctaatcgcgtttctgcaaaacgctaacgctgtgaaaaatctgcaaagtattgttgcgtatcacggtgcggttgcgacagacgatggacggtgttctgcaatagggacgaatgttcttcgtcaaggaggaaacgcgattgatgcgtcggtggctgctgctctttgtttgggcgttgtcagtcccgcatctagcggtataggcggtggagcgtttacaatgattaagctagctaatggcacggaagttgcttatgattccagagaaaccgctcctctaagcgccactgaggtaagtaacacgttttacagtaataacgtctttctttttactcttcccaaaatgagcattttggataacgtacgtttttgagttatggacagtgtttttttaatcaaagatatttattggctgtttctcttgatgtaggatatgtatggtgataatcctgagcgaaagaagaaaggatccttgtcagtaggcgttcccggggaagtcgcgggtctatacacggcttggacacaacacgggaagttaccgtggaagcagttagtagaacctgctgagaaacttgcagctgaaggattcaagatttcaaaatatctctatatgcagatgaatgcgactagaagcgatatcttagcggacaaaggtctctctgagctatttgtttcaaatggagagctcaagaaaccaggggcgatttgccgtaacccgaaattggctgatacactaagccaaatcgctgaatacggtccaaaagcgttttacaatggcacggttgggtttaacctagtgagtgatatacaaaaagccggagggataataactttgaaagatttgcagaattacaacgttaaggttaaagaaccattatctacggagattcttggataccgattactcggcatgcctcctccttcatctggtggccctgcaatgatgcttgtaagtaaagtatttttgtgaaaatttcacatttcatcaaacctaggtttatcttttggagtttctcttgtgttgcagattttgaacattcttgctcaatatggtattccatcgggtgtttccggccccctcggtgttcatcgactagttgaggctctcaaacatgcattcgcagttagaatgaacctcggggatccagattttgtccctgaagttactaatgttgttgcagatatgttatctccaaagtttgcacaagacttgaagagcaagataaacgatgagaagacctttgatccaaaatattacggtggcaagtaggttttttcaatctttttccgcaaatcttttttcttcgattctggatatctcaatctttttctcctattcgtagatggggtcagatcaaggatcatgggacgagccatttatcgataatagattctgagagaaatgctgtttcaatgactagtacaatcaacggatactttggggcaataatgctgtctccgagcaccggaatcgttctaaacaacgaaatggacgatttctcgatcccgacgaaatccggaggtgacccagatgtgcccccaccagcaccggctaacttcatccgaccggggaaacgacctttgtcctctatgactcccaccattgtactcaaggcaagaaaaaagaaaaaaccctagctcttgtgctacaagtaactctgagtactttaggttctaaacgatggttacttctgtgttggtttacacaggacggtaaagtgaaagcagcattgggtgcgagtggaggaatgtacatcatcgccggtacaacacaagtttacttaaatcatttcttcctcaacatggatcctctctcttccgttgttgctccaagaatctaccaccaggtttttgctattttttgtccttgtacccaagatagaaactttcttgttctttgctaattttacttttgtaacctcatttgtagctgataccgaacaaagcttcgtatgagaattggacgacagtgtatagtgaccatttcgagattcctgaagagataagacttgtgttggagaagaaaggtcaagtcctaacgccgatcgccggagggacgatttctcagctcatagttgaacaatccgatggaaaatccggtggaattagtaagcttgtggcggttagtgatccaaggaaaggagggttcccttcaggatattgaaatttggatttgactttgttttcaattatatatcatcgaacttgtgatgtactagtatgaacctttatattcgatgaatataatatgaaagtaataaagtttgtttgcgataatgttgttgatccagagatttttctttaatcataaattcataatagttagtatggtgaatattggaattaaactactaaaccttttgctcttgcattagtgggggtcgtggtatgagtcgatgaccagtaaaagacaaaattaataaagatcttaatgtaaatgcgttggttgttatggacgacagctctattagcataattaattagcatgacttgatgatccttcgtcaagtgatagtcatgtacacgtctaagaccaaatgtgaaaattgtgataatcttgaaacctatatagtactatttcatattttatatacaatgttaattagctcggagttaggtccactaactaagtctaattactaaaataatacaatcttctaacttaacaactaatcatggtgcacatgcaaaattaaaattaaaaaaaaagatttggaggattaatactccaaagtccaaaccttggatactccgcctctagtcagtgacacgtcatataattagcagacgataatcggaagagatttgttacagtgtcactgtcggttgcttaatcagcaatctcattcaaatggaatcttaatacatgtaggaatctttttcctaagaatcatatttgacacgtcatcatttcttaaaaatcttttgatcctcctacttaagtagcactaatcaatccctcactaaactctagtcttaatcacactatatatatatagtactagtgtgatttgcccaacttgtcatcattatctctatctaataaatggcgttacaaaggcaactcctgaagagagctacttccgatatctatcaccgccgtgcgatctctctcctccgtactgatttctctacttctccttcgattgctgatgctccgccgcacattccgccgttcgttcaccagccacggccgtataaaggtccttccgccgatgaggttttacagaaacggaagaagtttctcggaccttctcttttccactactaccagaagcctgtacgtccgtttatgttttcgttttctcgttctgctgataccgaattgagattttgttatattgattttggcgatcgcgatttatcagtacgcaatcggggatttcaaatttgtagttgtgattttcgatcgattcattagctcccgaagactaagaggatttgtggacttagaagccagcttgatgatccatggatctctgattattcagtgttgatgttatgttgcagcttaacatcgttgaagggaagatgcagtacttgtatgatgagagtggtaggcgatatctggatgcctttgctggaatagtcactgtgtcgtgcggtcactgccatccggatattcttaatgcgattacggaacagagcaagctacttcagcacgcgactactatttacctgcatcatgccattggtgattttgctgaagcattggctgccaagatgcccggaaatcttaaggtacttgagagttttaaacaaacaagtctgaatgatgtagttaggtttctcttgttggtttatcgaggaatcagcatgctctatgatttggatgcaggttgtgtactttgtgaattctggctcagaagctaatgagctagcaatgatgatggctaggctttacactggtagccttgagatgatttccttgagaaatgcttatcatggtggaagttccaatactattggactaactgctcttaacacatggaagtacccattacctcaggttttccccagagactttcatttaatgaattgattcctcttcaaagttgagatattttctttagcattgatttttgcctctcaagccgagtctttcatctttagcctcgttttagacccatcagaataaaattctctgcaaagtagttctctgccatagactgcttgtaaattttggttgccaattctgttattgtgcagggggaaatccatcacgtagtaaatccagatccataccgtggagtttttggctctgatggttctctttatgctaaagatgttcatgaccacatcgagtatggtacctctggaaaagtagctggatttatcgcagagaccatccaggtttttgtttgtttaaacaaaccatcaagtgaaatttagtgatttaccactctcttgaacataatcgtcaccatgccattatcatttttacttcagggggtcggaggagctgtagaattggctcctggttacttaaagtcggtttatgaaattgttcgcaacgctggtggtgtatgcattgctgatgaagtccaaactggatttgggcgaacaggaagccactattggggtttccagactcaagatgtggttcctgacatagtcacaatggcaaaggtttgtcaaaagaagttgttaccacttgctctgttcttacttcttaccatatgctatgttctccattctttgactacgtttactgttatatacttaaagaaacatgtgtagttcactaataattgacaccggttatattcacagggaattggaaatggattgccattaggagctgtggtgactacaccagaaatcgcaagtgttttagctagcaagattctgttcaacacttttggtgggaacccggtttgttcagctggtggacttgcggttctaaacgttattgataaggagaaacgccaagaacattgtgctgaagttggttcacaccttatacaacgtttgaaagatgtgcagaaaagacatgatagtaagtaccaaacaaacttatataatcagatcatttactctgtttttacttacaaccgtgtctgtttggtttcagtcattggagacgtgagaggaagagggttaatggttgggattgagcttgtgagtgaccggaaagacaagacaccagccaaggctgaaacatctgtcttgtttgagcaacttagaggtaaacaacattaaagccaaaagcatcgatttgataagcatcagttggttaaccaaaatgttttgctcctttctcttaatgaagaacttggcattctcgtcggaaaaggaggacttcatgggaacgttttcaggataaagccaccaatgtgtttcactaaagatgatgcaggtaaattcttagtttatatatcgcttaaaattatgaagtttcaccaaagaacaaaacgagattgtataatatctataatgaatttgtgtgtgttgtaatgtatccacagatttcttggtagatgcattggactattccatctccaggttgtgaacaaggatgaaacaaagccaacgagagtttttaaccatatgaaccgttttaatgtttccgcgtctttgtaacgaaaaccaagccaagtctcatctcctttgatttcagaataaataaataaaatttatttatttctcagtgttgctatgacataatacaaatacattagaaaagcccaattatttttgttttctttgttaaaattcccatatttcatctggtggacttaaaaaaataaaattatacatgagctatatattattctgctaaagcatactttaaataataaaaatttaaattctatagatatattttgtgtttcggattaaaaagaacactccaaatcatagaactaacaatacatgattttgattatataaaaaagaaaatcaataacacatgattttgtttcgatatcaaactccatgaaccaaaaaaccttataatgtggaaggattactaagatttaaatattttttttttctttttaaaacactttattaaatttttgatatcatttatattaatattttgttgattttagtttaataaataaattagtatcaaaaataatattgtagaagataaatgttactttagatcctatttctttcactaaaataggtacaagcatttatagccattaattattctttgtatagttaaaaatcccataataattaatggtggacccgtaaaggttgcgaaaagtcatacacgttccaaaacaaaaagtcgcaagtctacattttccttcttccagaaccataacacgtctcctcccatttcttcgtaaatacgtttctcctctctgacccatcacgatcacaatctaacaaaaagagttttcaacaaaaatcagcaatcgtggcgaagctatataagaaagaggaggagagacacaaagcgatggaagcagaagtagaagaggaagaagaagacatgttcgaagacgccgtgtgtaccacgcaagcaagagtcaacacgccattgtccgtaatcacagaggccttcgaagatctcgcggatctggtgaaaccgcaacgatctgatgagatcgatgaagacgaattaaggcttgatgatttctgcagtgcgtgtactcacgtctctgttctcttcaattgtcttggattcgctttcaaatttgcggaaatggagtacatcgccaaggttaaggatttggtggaagcgtcgaaaacgttcgaaacgttacacaacattcttgacctagacgtggagaaagaaacggttaaaacaccggggagccattcgcgtaacctaagacgtgtgagacaaggtttagatctgatccgagccatctttgaacaatttttgatcgcagatgactattcgttgaaagacgctgcgacaacggcttacacggaagtgtgtgcaccgttccatacgtgggccgttagaaccgcggtttacgccggaatgtatacacttccgacgagggatcaacttctcttacggctcaatgaaactgatcaatcggttgagaagaacatgaggaggtacatggaagcatcgcgacctatcatagaatatattgacaagctttacattgaaaggaatattaaactcgattggtaaaaaatttgttctgcatcaagtactatatattaaggcaaaatttgtcttgtaaattactattattttttcaattaatttttgttcttgtaattcaaaaatggagctttgaggcctcccaaaaataattgtttctcaccttatgtaatgcgttgagcaaattaaaacgttcttgaaaagaaaaatgcaaatcctctagtcttaattacatcaagtttgatgttcgcgatctctaatgagtcctcatcttcattgttcaatatctgggttaatcttacgtttatcaattataaagttcttggatccataacttcaatttcaacacagttacgttatgtgtaatccaaataagtttatctattgtatattaggaaatatacattaatctgaacctatgatcaacaatgtctgggtggtgtagtcggttatcacgctagtctcacacactagaggtccccggttcgaacccgggctcagacataatttttttatttttattttttattttttttattttaaaggattctacagcgtttaattgctgatttcataactttcataatgatttttgccttacttatatcattcatgatatactatatttacttgttgcgtatcaaagttttttttagtccagtaaatcacatacgctatccgattatttgaactctaatagtaaaacattaacatcattattacaaagaactagtccacatgaccacatgttaaggtcaatgttaatgtcgttttatatgtttgtaaaacttttaattgagtaccatgcatataaacttttcttggttttgaatttggtctgaataatttaactacgaatttttttcaaaaaaagtttgatatattttcccacttagagcatcattattgatgatctcttaaaacaatttttatgttaagagatatgttttataatggcttataactataaaaagtaagagactttaaaacacttttgttagttataagacatatctcttaacataaaagttatgttaggagaccatcaataaggatggtcttactagcaaagaactggacttttagataagcaactccaatatttaagatatgaaaagaggtcaagaagagaaaattaagattgtgattatgtttatggattggcctttagggagaagtatgagacagattagcagattgcccccaatcacttgttattggctccaaactataattactaaatatataatagtaatattacaactacgtacaaaaccaacataatccaaatccaaatgatgaacttaattatttgaactcataagtagacgaaacatataagtagaactatatgggaacaaatcacttataaaaattagattattttttataaaataggtagaaaatgttttggtataagccttatagtacacccaaatcacatatatatatatatatatatatatatatatatattcatgtgaaataaaaggaactatatatatatggctatggactaacgcatatacaaaaccattcacgatgaactagaaagtcaatcctattatttaatgatgtagatttcgagagtggagtggcaagtattgtccattatcatcaaacatactaaagtcggtccactaaattccatgtctcactcgtttctttagaactaattaattagtgttaatctaagtggaaattgagtcggtcaattgcaatgataaattataccaaatttagaagtgttatgaaaaactaaaaagaaatattttggtgaataggtgcgtgtgcctatccttaaagcatctcaactttaattttccttatacaatagcgtggtgctaaattgctaattatattaatttctagtaaagtttttgtcttttttttttttttttcttttttgataactcaatttctcggaaagttatatgcagtttcttgttttatttttaaaagtgattataaaatgtagtcactgactcgaatatttggggtatgatatatgtaaacacgagcaaatatattctagagatatcaaatttgaagctctaaaacgtttctaattaactgcaccaatgatcattctaaacgttaaccctacctactatttgaatggagaaataattattctctctgaagagagaaagataatgttcttatttgcatgttgtagaattggaagctatagtttattggatcaaagccctcttgttggtaaccttttctaagtacttatatctttgttgttctcttgtcgtgaatttgatcaatgcatttttattgttatctactataaagcaagtacatgttagtggttgaatcataccagataagatatatgtccacagatttataaagatgtcaaatttttaatcatcttcatatttgcgttcttatctaattttgacatatacttttctacatcataccagataagatatatgtccacagatttataaagatgtcaaatttttaatcatcttcatatttgcgttcttatctaattttgacatatacttttctacaatttcgtcttttttaaagatgtaaattatcattccacagactaccgttaaatcattaatgaatgataaaatctaaaacgtacatatatattacttagcgaaccatgcaaagatctatcatatttttgtttatatgacgagatgtgaatgtattggaccatagtttgtgccgctggtataagagccgcccttaaagcgaaagccacaaactagataaaacctccccctataagtaatttctaaatgaatcattattaataatatgtgtaaatttgtggaacaaccgactccccatagtttaatcacctaagacatcaaggctatcaaagagagaaatatattaattaagagcggcaatgaaatcgtagaaacctctataaataggcactcttctacaaactcaaccttcacttcgaaaatcttaaccacatcttattcttaacacatttattttgttaaccaacactaaaaagtaatgtcgtccattggagcaagttacgcacacctacaagtcatgcagaagaagcagaaggagaagatgaaaaagctagaaaaggagagaaacttcgaccacgatgaagctcatagactccctgtcgaaacatcttttgcgtccggaaggatttctaataaaatctatccttctcgtttgtcttatgaacaagtagagttcaaatcacaaaagtgaagttcaaagtaatgaaattcttgaaaaggatcttcagagccttctctcccaagtatttgtcctttgtgtttgcatgtaattatgtatgtatgtgtgatgtgtctaaaacgtatcttggtcgtctttgtagttttgtgaaagtgtacaatttgtgtgtttatgttatcaagtgttaaaaggttattccattgacacacgcccattactaggtttgacacatgatctaaaagtaagttgcaagatttgaaatttggtaatattgggctgctattactttatttttgacccaacaattgttcatagatccatgaaaaggtaaaagaagaaatggagaggaaaagatctaacacacagagagccaaacaactctgttagttcatcacaggttcaaaccaaagtctactaaacataagaagagtcttcccatccgttctacattaaaaataacaaaccaaactcaacagagtactcaacttttgtccgcactgagctaaattcctaagagcctgctacgaaaacaatgacctgaaattcccaagaaccagcaagatcacttgttattattcgctgcaagtttagctgcaacttgctcctctgacaagggtaagtaatatatcctggggatcgcttttgtcttcttgaatagatcatcaagagtgacaatgggaggttcttgttcctcaggggctataggaggagggggaggcagaggaagacgttctacaacgtgaggtggtttggccagaggtggtggtggtggaagagcagttggaggtggccgcgaaagagtctgagcttgtggctgatgctgaggctgaggaggcagaggagcttccagtttttcttttacttcttctgctctaacaaattcagctatcagatggcggcctccattaggtggccactggaggttatacactgcttctcttgttgctgctgcttcttcaaccgagggatactgcagtcacgtcacaactcactcatgttacacaaaattctttggatatttagataattgaattcgaaagtacacaaacagaatcaacatttttgtaaatcaaaaggatttgaagaagcggtcttaccgatacatagcagtgggtcttaatgtggtccatccagaaactagtgacatttccggttttacccaggagctcctgaacagctttcagtgtgaacggcctaaggaaacggtcaatcctgagggaatttgtaggctcctttggagatggaggaactgccaataaatattgaacacatctatcaaacaaagctttaagacaatgaataagagatggaaacatacatagagggggtgctgtattacatacccacacgttccttgggtccatcttcactaaccgaagagtcagaccttgagaagtcgcgcttcagaccagtcgaccttggtgttgtagtgggtgtagcactattagtgatctgtgcttcaggaactttaatactattagagttccatcggcgcctctttgcaggttcattgtttccaacagcttcttgatctacattgagttacaaagaaagacatttcagcatacatagctagaatttcaaaacagatgcttcaaaagccaatatatataagaagtagccataaacgacaaagatgaaacaactattaaacactaccagtatatgcctcaaacaccaacattacagattaaacacagtaaaagatttgattaataaaacaaatgaatatgagaggaattaccattagcaggaagctttcttttgtcagaagccaccagtgggtgacttttattttcaggggatttccctttccccgcatccatatcagcacggctttcctccttagaaagcatttcaatttttgcactcttatcatcagatgtaattgactcggattgctttgtctccggctcatcctccatagactcatcaccagaacttctatctaaattcaacttttctgagtcgcctgcatcgataatattattttctttgatcatatctgcgtttgcagcattgctgtcatccccacctccaacagatgtcttctgctcaagtggctcctcgacatccattggatgcgattcgccaacgactgttgatggctcttggaacttattaacattttgttctaatttgacattatcagcaattttgttatcctttagttctattttttcattatttgacacagaatcagtagaaatacaatcagattttacctcaaaccctgtaacggggatgacctcagatacctggttgtacatagcagatttttcaagcactgcctctgatggttgagccttagaatccccaccatccaacccactaaatggttcattattctcagatttgtgctcactagacgccacttgcacaactgctgcatcacgtgcaaccactgaactatcaagaccagctatgtctctaacatcatcaactttctctttctcatcttcatcactagcgaatggcacagcgttaacctctggttctgaaaacaccggggctggtgtagtctcaacaccagctgaagcttcagttgttatcttggtctgagttggttctggggttttctcagctgtaacaggagttgtctcagtgctaaatgccgcttcaacaggagtaacaggagtggtttgattacgatcacctacagtaacaggaaacatctgaggctcttgattggctttttcagcagcagcaacagtagcactattgatcctttcagactcttcttgctcagcacgaagtgcttcatcaagacgcctaaccaattcctccttcaagcctcttgttgttagtctccgtcttttaagctcttctttcaattccgtaaccttccacttatcaattggtcggttgtccaagactggaaaaggcgatgacgacatcttagcttatgagagagctgattctgaaaaaatattgaatataaaattagagaaacccatcgcagaggacaaaacctaaatcagacaaattagcaaagcaacgcagcaaatctatataatttaaaaccaaagcttaaatctttaacaaacccaatccaaaagagctagaagtttaaagatgacttacaacaaaatggcttgaaacttcctctgatgggtaaaagaaggcaggaaaaatgtaaaaccctaaattcgtagcataagaagaatgaaacaattagagagacaagacaacaatcaaaacccagtacggaagattacaaatttatcaaatttccgactcaaaatagattcttcaacaccagattttactctcttaagacgaagaagaaaaagaagaacgcaaaccttaaaaacgaaatccagaagcaatggaacggagagagagtgacctttggttgaagaattctaatcgagaatgaaagataaagcggacattgggaatttttctatcccgtcattacaaaaattgggaattttggaaagaggaggcgaattctagggttcttgttcgtcgagtggttttgatattggggaaaaactcgaggacctgaagtgataatgggtcgcattgtattgtgaaatgtctaaattaccctttttctcaagtaattttgtacggcgtcgtttcaatgcttttggggttttcagagaatactattattttactcaccggaggctccgagtcttctccgtccgtcgtaacatcttcgctctctcgttcggcgtttgtatcaccagagacgcgacgcgataatgcttcggaagtatgtttcctgaaccctaagtttattatctcaatccatcttgttgaattttggcttctcttgttccatcaatctcgttgcgtagctttcgggtctgattttattgattcctctaaattgagagctatttgtgactttgattctcttgtgaatcataccgaatgtggtttatgttgttgctcttttgcttaggtcggttctcgagctgtcttctcgtttgtcaataaagagattcccgaggaatttgggagctcaggtgagttatgaatttagttgtgattcttagttagcgtcttgtgagtactctcttggattgattgtgttatgttatgcatcagaggtttcatttgagctcttcgagaaatgcatctacatctggtaaaaatggtctccctggagctaaacccgttgggaaaccagatgcctcaaaagttgatcctccaaaagtgactcctcctcctcctactaaaggaaattcttcaaaagtggttataggaggtgttgcaatcgctggggcttttctggtagcgtatcagactggctatttggatcaatatctggggaaagaacagcagaaattaagtgagcgaattcattctgatgctctaactgaaaagctggaggaggctcatcatttgaatgtaccttccggtgttgaagattctactgaaaaagatggaaaagttgaaacgcaacctcaagttactcattctgaagcttccgagggagtgcagagtgacatagaactgcaacccgagtctgatctatcatctgaccgttttacatatatttcttctaaccaagaggagacacctcaagaaactgtcattgatagagcagagataaacttgcctatttctgcatctgaagattcaggagctaagccggacatgccatcagaaattatttctgaggcagaaagtgtgaagttggaagctgtacccaaacctggggatagtcctattattgttaatgcccagtctagttcggttcatagagaaagcgaaacggaatctgcttcaccaaaggatcctgccgctctaaagacacctgaggtactaaaatttcctttgctgaacttgaaaaagaactacaagtaatgaaatgaatagcttacagatttaaaaatcagaagatgaatgtctcagtattccttgtttcatgaaatttttcttgtctcgtccttttcctgcattggaccagaatgcttgtattttgaaaggggatacacctatgtaaagggattctgctacattgttggagttaaaagcactcctttgttttgtgcaaattcttattatattggttgaaatgggatattcatatggacattatgttaactgtcctgaatcaaattctgatagaaactgattttttaagaaggaatgtagggaactaaaattagttgaattagatacctattactctctaaggaaagcgggaggttcttatgaagctttagttgaattcaaacccctcttaaatacttgatttttctatggcctatataagttacctgagatgatgaatatctaatcaatcactctcttacaggatggcattgagcgggaagtacaattaccaggttctctccttaaggaatataatctagaaggcagtgatactgaaagcactgggtcctcgtcaataggggagcaaataactaaagaaactgaggtttaatacttgatattcctgtctctgttccttacttcagtgctttatattgattgataatttgcagaaaagtgttcttaatctggatagtttcgtgaattaggcctttcctaactcaaccgaggggctgaaagatagttacatgactgaggatggaaagttggtacttgattttctggctgccattcatgcagctgagaagcaacaggcccatttagatgcccaggtttttgctgaagaattacgagccttgaaggttggttaaaagacagaatatgtcgtatgagtatttatttctgtagtgtctttgctttataagaggttttaacgtatacactactgccaattgttttgattgtactcaggagaagtatgaaaatgagttaagagaccttagggcacgtgagctaatgcgtatagaggaggcagcaatattggataaggtgcgtttatctttttatctctacttgattactcagtccaggacatatgtccagtggcactgctcatatgcatcagatgtttactttgtattttactaatctataagtatgggcaatttgatgcgaatttgtaatggattcttgtaagcatctatctattctcggtttcatgttcctgggtagacgcatacgactataattgaactgccaatgttgctttattcaggagctaaaaagagaacgaacaaaagcagcagctgctattaaagcaatccaggagagaatggaagataagctcaaagctgaacttgaacaaaaggtctgtgtacatttcaggaaactgaagataaaaagtgtattgtgacttaggaaatcataactcacaatttgtatttactgtaggaaactgaagcgcagttggctttgagtaaagctgaagaattggcaaaagctgagatgatttcgacaattgcaaaagaaaaggcagcacagattgaaaaaatggcagaggcagatcttaatgtaagtaaaagacgaaatggtgtactatctaatggttccaacctcatggtatagaatattgcacagactgttttgaaatcacaattaggaagaatgtgtaggaatccagatgtgcgttagttgttactgcactctgcagaaaacatttcatcagaagatgttttagtaaagatgttgaaagtgaaacctctattctaatggagtcatgaatgttttgcatactttgaagtaatcaaacccacattataactttccactttacacaaacttgagttacctatccctttgtaaataagcagaattcctgaatgtttagccctgtctctgcattgtcttctactttctgtagataaaggcactgagtatggcattctatgcgcgctctgaagaggctcgccaaagtcattcagttcacaagcttgcattggtaagaatcgaatgcatgcttttttgtcatgggttcatgttaatgtcacgacactctgcttttctatatcacctactaagtttgaaatgtataaaaattgtgattttgtagggtgcacttgcgctggatgatacactctcgaaaggactgccagtccaaaaagaaatcgatacgcttcagacttatcttgaagggactcataaagattcaatcctaggcctggtattatcatctcttccagaagaagcacgatccaatggaaccgacacagtgctgcaattgaatcagaaggtgatcccactcacaatcaatgtttttggatataaaaattgttccaacttttctcttactctcctctcgttatgttgccagtttgataccttgaaaggaacacttagacatttcagtctcattccacctggtggcggaggcatcttagcacattccctagcacatgtagcatcttcgctaaaggtgtgctaattacaaaaccaaaattcggcgctcaaaaactctgaagtctaactgtcattcttgggcttctttgttttaataacttaaacagtttaaagaagtggatcaagctaatggaggcatcgaatctgtaattaaaaaggtggataattacttggcggaaggaaaactagcagaagcagcagcaacactagaagaaggtgttaaaggaagtaaagcagaggaaatagtgagtgattgggtgcgacgtgcaagaaacagagccattacagaacaagctcttacgcttctccaatcttatgcaacttgtgttagcctcacttgaatcccttccagatcttccattgaggtacattgcttcttctttttttttaattcgatactgagattcctggagttaacaattattttgcgggaagtagtaccaactctttttctggtgaagaggaagaattacgattctctattccaatgtttatgtttgaatcacagctgttcatgttatctgaattagaatgttaccagaaagtttgatacaaaaataagatcgaatctcacgaatttatgatatttgtctggaatgggatcaggagatgttgatttggtgatgaatgttgttgctgtactgatgtggcatcatgtggtatatcactgggcttataatatatcatccctctgtagcatttcatattttaaaactgtcataaaaagcccatgagcttacttctaagccgaatactattgaacacctcttaaccagataggtgtgatgtgcatactagtgccctggaatctaacattgttcattgcttgcaaagagtgtacaagcaacattagctagtgttgcgggccaaacttcatcatctacacgagcgcgagaatactactccctgaagtagttactactctcgtttgccttaaatgagaagaaatattacaatcttaactggttcctatttgaaacggtttttggaaggaaatgcaaattagtttctaaggataaagaaatcagaaaagatgatgaattttaaaatcgacaccgcattcactttcggtgagttctctttagcaacttttgttgtgatcctaaatccaaattaagaatctaagaaagataacacactaaacccaacaaaacaaaggtcatgcatgtatcttttttttatccatttaaagacagatatataattgataccttgtcctgtccacattagaaagttttcaactctttgatgtataaagtttgatctctggtcgttaaaaagaaaaaccttatactttgataatcggataaactcgtatagaatcatgccaatgatgccatataaaatacaattaggagttaggaaatacatttaaataaatatctaacggctgccggaaacttcttatcgacagtctttaaatagagtgcataaacttgttattatatgtaccgaacgttgaaggtttgctcgacaactccaaaacattataaaattttgtcagctaacttaccactaattatttcgatcgagtgaggagtcaccttcatattcttatctatatttttatatatataacagaaaatttataaattcttgtcaactaacttgccactaattattcgagtggagtccccttcatatattcatagatacatataactacaatttattatgtcagctaaccgttggtattagtatgagttaccaaaaaggcaaagattcgaatttatgacaagttctgtttattgatagacgaaagaaacaaaattgtccctatattcaagataaaaagaacgactttaattacatgtacgtatttgtatttgctggacgataataaacatacaaattcaattttgaggagttgaaaatattccctagcttcattccagataattatatgagtttttgtatatctactattgaattattacgtaaaattatgaatacgtgaagagaatgtaatacatactatgaaacagctagctaagttgagaggggaggtggcacaactcctccaataaggagacagcctcacacgcgtattccaatcggcgccgtcatattgccacgtatacaattgaacgctcgagatctcttccccatacgtgtgaagctgtctcgtagtgagtaaatattaactttataaatctccacgatggttcttgctatttttatatatcacctttaaattttgctaaatttgatcattgatcctaattaatttaataatgaaccgactattaattatgctttagataaattagtatgaattcgttaataaatgcatggctctctcaccttctttctgtcttccttgtgaagaacaacaagatttaaataaaaatacctaaagttattattccatgatttagttgtattcacatcacatggattcccttttccctacaaagcttaccttcgtatatatgctaagttaaaatagtaacatatatacatttgttcaacaattggatacaaatatgaaccaaaaaaacaattggttacaaaaatactttaaatgattgaatttagtatggttttaaagcgtatatatccctttagttccacttttcccatcaaatatcttcttaactaaaccacaaggtctttggcaattggcatatatattgcttacggtctaagttcttaaagacatctttttctattttttataaagttggccaaatttgtgtcaattataaacacaacaacatactttttctttcgtaccaatacaattatatacacaaaagtaattctttattaaaatatcaaattaaggcctttataagtcgaggcaaccaagctaacaactcattgcaaactgaaaccaaaacaaatatctatacaaacacataacacatattgagagccagagtgaaaagaattatacccattactaatcgcctttatctgtgaattttcttgataaaaagaagacacaagtcaaagataaaatcaacaagatgggagttgggggaacgttggagtatatatcagagctaatagggaatggaggaagccatagttatggaaaaaggaagaagaagaagcagtttcaaacagtagagctcaaagttaggatggattgtgatggttgtgtcctcaaaatcaaaaactctctttcttctctaaaaggtaactagcttcttcttttataatcaaaattctcgtccgaatttgtgttactgtcccttatgagatgtgtttgcttactcctatctaaaacttatataaatacatgcatcaatcatcatgcatgcatatatataacatgaaaaatcttccttcatatattttcaggagtgaaaacggtggagataaacaagaagcaacagaaggtgacagtgagtggttatgcggatgcgagcaaggtgctgaagaaggctaaagcgacggggaagaaagccgagatatggccgtacgtaccgtacaacttggtggctcagccgtacatagctcaggcttatgataagaaagcaccgcctggttacgtcagaaaagttgacccaaacgtcaccaccgggacgatggctgtttactacgatgacccttcttatacttctttgtttagtgatgataatcctaatgcttgctctattatgtagtttttttttatttattagataatttataaaggaatttatataatatatgccggtaatatatgcataaatgtgggttataaattttggtgtttgttctcttttagttcatggttttgtcttcttttgcatgtgctctttgttggtgttacaagtgaatgttttattaatattaatatagatctagtattatattagcttaatcaattggatatcgtaagtaatcattgtttactatcattggaagatataagtggaaactagttaattttttctatgctagtttcaaacttacaaaacaataacaaagacgtttgtttttggttaaggtgtttcatggtcttttaatttgagtttagttttttgggaccccaatattctaactcttttcacccactctctttctcttttacatacattattaaaagaaaaatccaaaaatggatagtaaagatcgatcacataaagcttaaaaaaactgtgtatcataacatacacgggtcatgtaatctttctatacatacaactacccccaccatactatattttaaaggacttattcaacaatttttactgatatgattcttgctcttcagtcttcaggtgtaaacaaagtaagagcatcctcaacaataagctcttattaaaaacctcttaacaacaataacaatgattattttattataatattattatataaataaattttaagtttaagaaaaaaatgaaccaatgtataagtgacatgtggcttaggtggtttacttgattattaaaaacctctcttcattctcttatctaagagctcctcttcattttttctcttcttctttccatgtttttatttttatattactagatgaattcccacgctacgcgtgggtttgttttaaaaattctttagataaaaatatgttaattatttttgtcgctaatttatgtttactttttgtttgttattttatacttagtaaaattagactcatcttatgtacttacatttttattgttagattcatttttgactctaaatatcaatttttatatattttcatgtataatctgattatttttatatccaaaattctaaaatttgttcattatcatgaatacacacaataagaatataagatattttgatttcaagagttttcgtatgaaaaaaaagaagcaaaaattaaagagttattttagtaacactttttagattttatactattgcatatagccgtataagacaaatggatttgttttgaattttgtggtatgtttaacgtctcaaaagtctattacttaaaaatattgaatgtcaatgttacgaacttacctaaagatacaaaaataaaaatacagaatttcatatgataagatatgaaccataacgtaataataattaaaaaatcaaggtaaaataactacactaatattaggtagcaaacaaataaactacaacataaacaactatttagtcattatagagtgatgaccattgaccattaaaatttttaaaaataaaaaataataaaagtaaaataaaagtagtaattgatttatttaaataagtaattttatttatatttatattttgaaaaaatcatttaagaaatgaattaatggaggatttaacacaatatgagattttttattttctctcaattaattttgctaattttaatttaatcaatattaaatgacacatgatattttcttatgtgatgatgtgtcacccatatggagagagttggccaactttcatatatatgatttctttaaaaacctcatttatcttagaaccctccattgaggatggcctaacatcagcctttaagaacctccggtacgctgtaaattagctcatgcactgtgtttttcctggaaaatcgaaaaatgaagatttgtcttatgtattttcaacatgctcaagtaggcaagaaccaaagttttacactttttttggccttaagattcatgagttgttgtgaggggaccaattacagagatatgacaccgatgaaaaaccacatcacacaactttattctagactctgtacatctttgtgacacaagctgcatcacttaccaagactgaatctaacctaacacgcgcttatacatttatgcaagtatatgattttccaaggtcataacttaacaaaaagacagatctgcacagagaagatgtgtcttgttctttaataggaggttagacattggattcagttggaaatcatcaatgttttaggttacagaaattataatctgaagcttgtcaaaagtaatcacctggtgatatacatcacatacatagttgtttgttcctttaccaaacgggattggagttggcttcatcttgtattacttcctgggtagatctcaacaaagttgatatcatagagcaaagttgcattgccaggtatgttgcagtcacctgcataaagagtcgatttattactcgagatacatatcttacatatacaagtgaaactgttacagaggaattgtgcaagtaccagaaaagcatcctgcaggctctggtccataagctaacttaggtggaatctgaagtttacgctttccgcctgcaaaataaaaccgcaccaatatgttatcagccaaataaaggacattgaacaaaggaaaatacagtacacttgcctactcgcataggaggtactccttcgcctccaagaatcccctggtctagtcccctaattacctgatcatttttggacatcaagagtttagatatatagttgttttgctcaccctaatcacaaagaagaacataagaaactaactaacttcaacaaagacaagtgtgaactttgctagcaatgcaattgaagactatggaagctaacaaagagagagagagacaatggttctttgttgtaccttgccgactccaattcgcatagtaagtggtcttgcacgcttatagctactgtcaaacaacgttccatctgcaaacctcgccgtgtaatggatctgtgtgtgtgtgaccaactctccaaagtctcaaactttgaatcaaaaaccctaaacagaggaaattagagagatggagagattacattgacgagtacgccacgaggggcttcatcaccaaatccaacatcgagatcgcaaaatccaagtcctgattttgcgtagctgtattcgcagagaggatctcctacagtggcgtagtagtcaatcctcgtggcgtctgcgtccagaggcgttagagagagaatcgaagaagctaggaaccctaaacccactccgaaaacgcgtttcttgacggagagtttcggctcgcaatcggaggaagaagaacagagacacgaaaaggacgaggaagaagaagaagaaaagaagatggttggtctgaaggaacgtgtatagagagattgtgtgagtgttaaagtagaaatcgccattcttctttgagtcttcgtttcgatctctgcttccttatctgcgtgaagccagagcctttggtctgaatcttttgtcttttgagtgtgcaacggtacaatggatatgattatgggacccacccgtatttttttggatttctattttcaacagaacaaaaataataatgaaacttttggagccaatcggcccacaaaattgagaacccgaatcgaattatttggatagtaagataatggccagacctagttatcactcaactatgaaaccgagtatcatctgaatacatagaaaacccatcagtgcgacaatagcttgatatcatggtccaccataaccaccaccataatattaaaccatcatcatcacccattattatatattccatttagatagagatacacatatatgcacattgttgatagtttatgtaagtgatgtgtataggttatacagtgcattggtgacttaagtgtaactggtccgtggacaaaaaaatatcaaaatcatttgaacttttgtatacacaagaacaagcaaaagatttttcatcaaatgtcattatttgttttgcgaccatcaatccatcatcaaatcttattgtgaaaaacaagaattattatttttaagagttactattatactatacagtagcaaatgatattattgaaaaccccgcttacaaagaactgacatttcattctgaagtgttgttaagctagagactagaaagagatataaattaagctgaatattctaacgattgattggttaatgagaagactgaaaaaagttaggaattttgtagacgcatcacattcagagccgtgacaaggtcaatggttgtcggaggcggtcaaatgaaatttgcccctattcacaaacaaagagacttataataatagaagtaaaagtgtctataaagataaattgtcatatgacaaaagtaggtcaaaaccaaaatgtatgtataattatcattattgattacctgtttttcttttgcttgggaaattttcaaatttcaaatctgttggtatggtaaaatgagagtcaagtcaataaaaattgacgttaatgtagatgatacaccaaaaatgaataagcacatgggagaacagtaatttatcaaatttcaaatcaccacaagtctataattaattaataattatatactatggtcccaaaaccatattccacaatccggcggccgtggaagattccccaaatttcgccaccattcactccaatattaattaggagaaatattaaccgtagtgatcccaaaaccacgtactgtatattgattgttgaaaaattaaaatttcatatcgcaagtcatcgttgtcattaaaatttaaaagttctatataattataagaaaatataccaagaaaatctgattcaaatggtgagatccatctactaactaatacttaccaacatatagttatggaaaaaactaagattaacaaataacaagcatattaattaagtattaaataattaacaaaccctacacgaaaaaagttttaaagtggtttatactgaaatatagaatatataaacgagtaacttcatcatgctatatgtgctatgtttaatttgttgagtaatcatgtcaagagattagctttgatttcggacttggactatacataaatatatttatgttctctggtcggaagacgaagataaccaagtaccgtcattattatgttcatgatcggagccaccgtagcttccattatcaccggtgtttatgttcccgttagccgctgccgttgtagtaggaggattagtagatggagtctgcatcataccaagaccaaactgatcgtgctcattgcttctagggtttgaaatatgagcttgaagaagagcttgcagattcatatcctcgaaaccgttgttagggttttgatattgctgaatttgtgatccggataagagaggagtcgctggagtgagtttttgagcaaacggtcgtaacaagagattgttggtgttgtaagtgtttggcgaagaagaagacaagccgaggaaagtgttgaggcgcgtggtgttcacgatggagttgttgttgaatagcggtggagctgggattccggtaaactcttgaaccatcgctcggaagttggaagtatccgtcgttagaaccgtcgttggtgctcttcttgatgctcgagatcttttctttgttttcttgattactcctatattgttagtaggagggagtgatgacgtggcggaggaggttcggaggtcgagttgagaaatcgggtcgggttgttggtttacgggtaagaacgtgttgttgttaaagtagtttggtggtattagagagttgttgttgttatggtcgaaatggaggaggttgcgatggttttgttgcggcgtgggtatagatgacacgtggttgttgtggtggtcgaagaaggcggaaatggattgatctgcggcgcgtgaatcgtattcttcttctcctcctccgccaccgccgcttgaagattgcatgctactactattaccggactccatctcgtgacaaagaaaaaaagactttgacgagagaaaacgtaagaaattgatttagaggtgagaatggatacttgagtttagggagctattgtttgtttaaggagtttatgagatagggtatcatggtaaataagacatttggtgtgacatgattttttaataattttgttttgtttttgtgtgaaagggagaaaaacagggaaggtgaaatcgcattaagtggttccactaccaccatccactattgtctactctatatcccaatattatatacatgtatctaaggtttagtttatattagatttattccttttggtgatagtcaaaattcactttgattgtagatatttggttcggctaatgctttgttttgtttctctaccactgcaggatgttacgtttacaaatcttatgatggtattacttttacttttcctgataaatggtacttacttttcttcgtgatttgtgcgtatattcatatcaaaatcaattatgcgataaaaatgttagaacaagttttaattttccgtgtgcacaaacaatcatttaacttcctctcgttattctctaaagatatagaataatttgaataatctactaatctcttacatgatgacataattaggtcagttaattcggaccaaattcaataatatatatcataattattagatgtcatcatatagctagttccaccaagataagttttttagctgattaatctttcttttcaattgaataatttcgaaatcaccaatttaaaagatgcaacaaagatatgtacatactcatttctacttatttcacccgattaatttgcaagtggaaattaatggtttgagtgtatattttgatagagatactaggtttggtcggaaaataagaatcaatcatataatatactattaattatcaaggaaaattcaaaatttatgggcccattaaccaaaatgccataaccctattatcactttacccatacggcttagttttgtttggttacccacactcatttataattgtgtttttttcgttttttttctaaatatcaaaatttcagttgacttgtaaattcgtatgaaattgattatcattgcattgcaaataagaaaaagaaacatttagtaaaaccaaccactacattcgattaactattatcactattaaatgttttgttagtgtttgataaaaaaaaaattgccgtgttagtaaaattttttacgggtgatcaatgatcatcatataattaaccaaaataatgtaagtctacatagttttagtattgaagatcacaaggatatcaaaaactaaagaatcatcactctctataatttagtaagctatgggtttgatcaaatttccagcatgtagtttttttgctacgtgtgcattttgttataacaagataaatatataaatgggcttacgcttcttcttttttgtgcaacaatgggcttacgctttatgcccaatatttacctataccaaggctccatataattagtatttgttatttataagcccacacacttttgagaagaagatgtctaaaaatgaaaatgctgagaagaagtaacaatttgtttttacaaatataaattatacctggccataaaataataaaaatctgacagcaaatatataagcaaataaaaatgggaagaattacttattctcaatataaatttgaattattcttaatatagacaaaaccatcaaaaatttcgtagtcattaataaggaaaatttcatacaatccagtggactatttttcttggtccgtaagctgccagagagagagagacttaaaaggataatttcgtaaatctaccaacccatcatataccgactcgccgagtaatcgccaagcctctcaaattatccatctcaattctcacatcacaacagataagagtcagccacgtcaacattacacgctactccgaataacacgtgattattaccccaattgttaattcccaataataacccttccctcaaataatattcgcatctattaatacacctctgcagaaaaaaaatcagagaaaaaatacaaatcgttcaccggaaaaaaacaaaatggctcgtcgcgatgttctcctccctttcctcctccttctcgccaccgtctccgccgtagctttcgccgtaaacttcctcaatctctaaccactctcgatcagatttagatttttcgataatttgactttttcagtttctgtttgtttatctaggaagatgatccagactgtgtatacacattctacctcagaaccggatcgatctggaaagccggaaccgattcgatcatcagcgcaagaatctacgataaggacggtgactacatcggaatcaaaaaccttcaagcttgggctggattaatgggacctgattacaattacttcgagaggggtaatctcgacattttcagtggaagagcaccgtgtttacctagtccgatctgtgccttaaacctaacctccgatggctccggcgatcaccatggttggtacgttaattacgttgagatcacgacggctggtgttcacgcacagtgctcgacgcaggattttgagattgagcaatggctcgctactgatacttctccttatgagctcaccgccgtacggaacaattgtccggtcaagcttagggatagtgttagtcgggtcgggtctgagattcggaaaaagctttcttgggtcgtttaagtgatgtgttgtgattcgtgagacttgtctgtattgtttgtattctcgttgttcttgtgagtgtaatgtggcgttaatgaaatatgattcaataaaataaaacctttttagttattttgcgaattttaactcatgattagtgaatgatttagtagattaatcacaggttagttgaatcatttgctttagtagattaatcacaggttatgtaaatgtgaaaccaatcaatgagaagactaggacatgaaaattgattgaatgcatataggtgtcggtattaataagcggaatagaaatttgagtggaccaagtaataatcccttgggccaaaaatgacgccacgtctgtattcattgagaactaactctttgatatttatatgatttattgtccacattgtatctactatactttttgtagggtcaaaatcaaatcgtctcttggtagagaaatatgggaacactcacttcttaaagaatgtgattttttttttttttttgttacgaattc

SEQ ID NO: 689 - DNA, 88343 bp, Arabidopsis thaliana
aagcttttccataacgcaagtgcttttcgggttcatccagatgcatcgacgtataagtttctatataaggcatataccaaggcagatatgaaggagcaggtccagatactgatgaagaaaatggagaaagatggaattgtacctaataagaggttcttcttggaagcccttgaagttttcgggtcaagactacctggttctggttctgaaaacaggaaatcaactcgttccagcaggtcacgagacagccctaaaggacgtggtggaaaccaattgactgaattccaagataaagatgtaacaaactgaacaaactctttgctggatgttaatctgagcgcactgcactcccaatgagttatccagtcctttccctgagtcatggttagtattcttctttatttgatacccatctcgaactaagattatatgttcttatagagatgatgaatctaccgccatagctagaggttcagtttggttgatttttattatgcttgagactaattgacatttttgtcatacgatttcagaataagcatgttttcagagctgttcaagattgcagaaagaactatttggagaacttgagtggacatgataaaggttccagggatgaatcaagaaagcctagtcaagaaaagcagccactatttgcttcagatcaaaataatatgatgatcaaagagaagaaagaactattcactagagtcttgtaatcgattggtaaattgtaactgaaaagtatcatatatatataaacaaaacatcattgttgttggaattaccctagcatgctgaagaagaacacacataacaaacatatctggtttttggaacacaaggtttaaccattacaatttgaaagtgtctgaatcgttgaagcttttcaactgttttcctctgcaaaatcaattcattcacataagaacaaatttctgtttgtatctcataggaggaagcaagaacaaagaaagacagtgatctagaaacataccatttattgctcccatgttgtggtcttctttgtagacccccaaaggagagccatgcacagagagcatcatctctccagcttttggtagcctcagagtctttggagtcattccaaaagaaagtctttgcccattaacctgcaaaatataaaagtttcattgtagagtctctccttgtatgcccaaaatctatcattgaaatgctcattctgcaacagagaatgtaattgataaatgtcgaaaccataaactcaatttcttctctctagatcaatgtacaaacaaaatctcgaaggagaaaacatgctaaagaatcaaacaaagaattctagagtaggtacgagataatttgcatcaagacagaaatagggaatataatcataaatacataccccaggagtctgaaaagcatcatggcctggaagcatttggttctcagatgtcccctgaaagacctaataaccattggaaaatagcaaattagcgttttctacttactgtcctgaagtagttttgcatacttttggaaggccgaagaaaaatacaaggttgacaaaattaaaattgataaaacctaaacatcactaaaagaaacaagtaaaggcactactcagtttggtgaaagcctgcaaaattgataaaagcagatgacaaattcactaaatgttctacaacagttgtatctaatcattcaagtctgttctaataggattaagggaaccaccagaaagaaaatggcaggaagacaagatataaacttacaagattatcgagctgtgggttatcagttcctaacaggttagctttcactgccaccaaagacaaaaataaaagtaaaattcaaagtcaaattcctaacaaaagaacctaagtgagctttacataccgttgtcaggtaaatcatagccaccaagagatgacctactgtataaatcggtaaaacgcatcgacaagcgtttcaaaatagaataattcatgtcaacgccattctcatttccagcaaacgaatcaccattttcgtctctccactttaactcaatctccccagtttcttcgtttctcgatatcgataaatccggaagattctctttaaagaagtctaacacaggagtgtgtagctgttcctcagtaaaatacgaacgaagcaaccgcaatgcagttacatttgttcaatctcaacatcacggattgctctaatcgcagcaatttgtctttcgactacacaatgttacccaatacaccaaaaatcagatcatgataatcctaaatttctgagttgggtattggaataattgataccttcttcgtcgacgaagtcttctttcttctcttcgattcgaattcgtttctcgtcgttcctatcttcttcagtgagtttgacacactcctttgcttttcgcttcggcattatcgatttctttcgaagaattagatgctcaattcgaggaattgattgcaatttcaaatcacaatctgaaattcaaaaccctagaaacagtgaggaagatgaaaaacccccaaaatcaaaaggggttttgaaaataatattaaataaataaatgggcgggagttacgcttaaacgaaattaaagaaacgaaattacgaaaatatccataaagttgaatacggcccatgggctcaataatattatgatcaccaaataacatttctaaataaagcccgaattgtgatatttttttaaaaatagttatgtttctaataaattcgatgtatttaaaagttgtggtgacaaaagatcggaaaaagaaaaagaatgttctttctttcacggtgtccacaaggctgacaagcatgattaagacgaccactaaagttttcttgacaccaacattgtacttactttagatgctcttcacgagtttgcttcaaatgtaataaaaaaacttcttttagttacatgaatcgagatcttattactgaactaattatgggagaatattccccatttttctaatattaatggcgaggtatcaatctacatctatagccaatttagccacgtgtgtgggccaacttttatccgttgaataagtgcttcaacgtataattaaagacttttgaaactcttatatggacatataattaaatgacttggcctcaacgtatacatcatagttttatatctcatctctaccttccatagaaactcatttgaaacttttgggcagagagtctgaacaatcgctttgttgtcgtcaagaacgatacgtccctataaatgtaagttattttgtttctctaaattcagaaatatcccacctaaaaattcgactgtttggtatttttagtaacaagcttcatgaataatattggagattttcttggataaattattgattttcatctaagttattccaagtttatgaatttcccactcatcatatttagaagaactttgattttttttcttgggtggcttttgggtcaaaacaaaagaatgataaagtctcattattattttgagcttttgttcatgtactgtgtggtcaaagacagtaacataaagtctttgttggctttgagttttagcgtatacgcgtaagactggttttaacattttcaatagttgactaatctctattttcaattttgttttcgggaaagttcgaggattcttcaaaatttattgtttatatgaatctgtttctgtttaaacgttgaacatcattttctttttgtgtttatcctctgtgattaatctctttgtttgtttctctatcaatagtagcaatgtcgctggttcgaacagtgacgatcgttctttttataatcgcgtttctgcaaaacgctgcggctcagaaaagacagcaaagtattgttaagtctcgcggtgcggttgcgacagatgatggacggtgttctgttatcgggatgcgtgttcttcgtgaaggaggaaacgcgattgatgcgtctgtggctgctgctctgtgtttgggcgttgtaagtcccgcgtctagcggtataggcggtggagcgtttacagtggttaagatagctggtgggaaagaaattgcttatgattctagagaaaccgctcctctaagagccactgaggtaaaacgcgttttagtaataatgtctttctttatcctctgatcaaatatgcgttttgtaataagcgttttcgttaaaagtctttgtgaatagtacacagtcttggttttttctcatgagcttaaataacgttttccttatacgtttttgaatcaaaggcattatttattggttgtttcacttgatgcagaatatgtatggaggtaatgttgacctaaagaagaaaggagccttatcagtaggcgttcccggggaagttgcaggtctattcacggcttggaaacaacatgggaagctaccgtggaagcggttagtgactcctgcagagaaacttgcagagggattcaagatttccaagtatctttatatgcagatgaacgcgactagaagcgatatcttagcagacaaaggtctctctgacctatttgtttcaaatggagagctcaagaaaccagggacgatttgccataacccaaaattggctttaaccttgaagctaattggagagtacggtccaaaagcattttacaatggcacagttggggttaacctagcgagagatatcaaaaaatctggaggaataataactttgaaagatctgcaaagttatagagttaagattaaagaaccgttgtctgcagacattcttggatatagagtccttggtatgcctcctccttcatctggtggcgctgcaatgatgcttgtaagttcggttttttcgtgacagagtttcacatttgatcaaacctaagtttcaaaatatttatacggagtttaatttcttgtgttgcaggttttgaacattctttctcaatatgggattccatcaggtgtttcaggccctctcggtgttcatcgactaatcgaggctctgaaacatgcattcgcagttagaatgaacctcggggatccagatttcactgatgttaccaaggttgtttcggatatgttgtcgccaaagtttgcaaaagacttgaagagcaagataaacgaccaaaaaacttttgatccaaaatattacgggggcatgtaagttctaatatttgttaacacgtagatttcttcttaaattcatgatttatagatctttctatctccaattcataggtggaatcagatcgacgaccacgggacaagtcatttatcgatcatagaccgcgagaggaacgctgtgtctatgactagtacaataaatggttactttggggcattgatgctatctccgagcacaggaatagttctgaacaacgaaatggacgatttctcaatccctatgaaatctaacggtaacttagatgttccaccaccagcaccagctaacttcatccgtcctggaaaacgacctttgtcctctatgtcacccaccattgtactcaaggtaaggggaaaaaccctattacttgtgatacacgaaactcttaattagggatataaaagatagttatctcctcttttgtttacttaggacggtaaagtgaaagccgctgtgggtgcgagcggaggagccaacattattgccgggacaacggaagtttacttgaatcattttttcctcaagatggatcctctttcttccgtcttagctccaagaatctaccatcaggtttgttacgttattattacttgtacacaataaaaaagcttacctttttgtttcgtaactaaaatttgcgattggtaatgtcattttcagctgataccaaacagagcttcgtacgagaactggacaacagtattcaatgatcatttcgagattcctaaagcaacaagagttgtgttggagaagaaaggtcatgtcctatctcctattgccggagggacgattgctcagttcatagttcaagaatccggtgagaactccggtggaagaagtgagcttgtggcagttagtgatcctcgaaaaggagggttcccttcaggatattgagaattttagatcgagatttattttatgtttttattgtttctttgattattgaaccgaactttgtgatgaatatatttttatttcactatcaaaactcgttgcattggctaaccaaaatctggaccaatttattatcatactcagggttaggcctcctagctagtcctacatgcaatggctaaccaaaataacacatcagaattcagaagataataagcaaccagaatgattaagcatgaatttcagaatcaataaaatgggatatacagattctatattgatgtgtattttgtatagagtttagctaaattaatgaaaattattaacaagcaaaaataagcattaagagatcaatttagtgcaagtggacaactgttacctatagatttttaaatacaatttatacaagataaaatcaattattctcaattaaaatttttattttaaagatttcttaaaaaaaaaaagatagataactaattattagaagttaaacatttaaagaacatttaaaacattgaccaacaatagatggaaatttctttaagagttacaacttttggaaagggttttatattcataatttaccttcattttggaaagggttttacattcataacttaccttccatgaaaatctcagatgagagtttgaccacaggtcttatttaatactcgtctgaacaaactcttgtccctagggacgaaagaggacgagatctctaagaaagagacatccatatgaattgtaagtcattttctttttttctaaatccaatacaaaaattattaacgattttatacgttacgttctgtgattaatctctctggtttcattctctattgatcgtagcatttatgtcgctcgttcgtactgcgacgatcgctcttcttctaatcgcgtttctgcaaaacgctaacgctgtgaaaaatctgcaaagtattgttgcgtatcacggtgcggttgcgacagacgatggacggtgttctgcaatagggacgaatgttcttcgtcaaggaggaaacgcgattgatgcgtcggtggctgctgctctttgtttgggcgttgtcagtcccgcatctagcggtataggcggtggagcgtttacaatgattaagctagctaatggcacggaagttgcttatgattccagagaaaccgctcctctaagcgccactgaggtaagtaacacgttttacagtaataacgtctttctttttactcttcccaaaatgagcattttggataacgtacgtttttgagttatggacagtgtttttttaatcaaagatatttattggctgtttctcttgatgtaggatatgtatggtgataatcctgagcgaaagaagaaaggatccttgtcagtaggcgttcccggggaagtcgcgggtctatacacggcttggacacaacacgggaagttaccgtggaagcagttagtagaacctgctgagaaacttgcagctgaaggattcaagatttcaaaatatctctatatgcagatgaatgcgactagaagcgatatcttagcggacaaaggtctctctgagctatttgtttcaaatggagagctcaagaaaccaggggcgatttgccgtaacccgaaattggctgatacactaagccaaatcgctgaatacggtccaaaagcgttttacaatggcacggttgggtttaacctagtgagtgatatacaaaaagccggagggataataactttgaaagatttgcagaattacaacgttaaggttaaagaaccattatctacggagattcttggataccgattactcggcatgcctcctccttcatctggtggccctgcaatgatgcttgtaagtaaagtatttttgtgaaaatttcacatttcatcaaacctaggtttatcttttggagtttctcttgtgttgcagattttgaacattcttgctcaatatggtattccatcgggtgtttccggccccctcggtgttcatcgactagttgaggctctcaaacatgcattcgcagttagaatgaacctcggggatccagattttgtccctgaagttactaatgttgttgcagatatgttatctccaaagtttgcacaagacttgaagagcaagataaacgatgagaagacctttgatccaaaatattacggtggcaagtaggttttttcaatctttttccgcaaatcttttttcttcgattctggatatctcaatctttttctcctattcgtagatggggtcagatcaaggatcatgggacgagccatttatcgataatagattctgagagaaatgctgtttcaatgactagtacaatcaacggatactttggggcaataatgctgtctccgagcaccggaatcgttctaaacaacgaaatggacgatttctcgatcccgacgaaatccggaggtgacccagatgtgcccccaccagcaccggctaacttcatccgaccggggaaacgacctttgtcctctatgactcccaccattgtactcaaggcaagaaaaaagaaaaaaccctagctcttgtgctacaagtaactctgagtactttaggttctaaacgatggttacttctgtgttggtttacacaggacggtaaagtgaaagcagcattgggtgcgagtggaggaatgtacatcatcgccggtacaacacaagtttacttaaatcatttcttcctcaacatggatcctctctcttccgttgttgctccaagaatctaccaccaggtttttgctattttttgtccttgtacccaagatagaaactttcttgttctttgctaattttacttttgtaacctcatttgtagctgataccgaacaaagcttcgtatgagaattggacgacagtgtatagtgaccatttcgagattcctgaagagataagacttgtgttggagaagaaaggtcaagtcctaacgccgatcgccggagggacgatttctcagctcatagttgaacaatccgatggaaaatccggtggaattagtaagcttgtggcggttagtgatccaaggaaaggagggttcccttcaggatattgaaatttggatttgactttgttttcaattatatatcatcgaacttgtgatgtactagtatgaacctttatattcgatgaatataatatgaaagtaataaagtttgtttgcgataatgttgttgatccagagatttttctttaatcataaattcataatagttagtatggtgaatattggaattaaactactaaaccttttgctcttgcattagtgggggtcgtggtatgagtcgatgaccagtaaaagacaaaattaataaagatcttaatgtaaatgcgttggttgttatggacgacagctctattagcataattaattagcatgacttgatgatccttcgtcaagtgatagtcatgtacacgtctaagaccaaatgtgaaaattgtgataatcttgaaacctatatagtactatttcatattttatatacaatgttaattagctcggagttaggtccactaactaagtctaattactaaaataatacaatcttctaacttaacaactaatcatggtgcacatgcaaaattaaaattaaaaaaaaagatttggaggattaatactccaaagtccaaaccttggatactccgcctctagtcagtgacacgtcatataattagcagacgataatcggaagagatttgttacagtgtcactgtcggttgcttaatcagcaatctcattcaaatggaatcttaatacatgtaggaatctttttcctaagaatcatatttgacacgtcatcatttcttaaaaatcttttgatcctcctacttaagtagcactaatcaatccctcactaaactctagtcttaatcacactatatatatatagtactagtgtgatttgcccaacttgtcatcattatctctatctaataaatggcgttacaaaggcaactcctgaagagagctacttccgatatctatcaccgccgtgcgatctctctcctccgtactgatttctctacttctccttcgattgctgatgctccgccgcacattccgccgttcgttcaccagccacggccgtataaaggtccttccgccgatgaggttttacagaaacggaagaagtttctcggaccttctcttttccactactaccagaagcctgtacgtccgtttatgttttcgttttctcgttctgctgataccgaattgagattttgttatattgattttggcgatcgcgatttatcagtacgcaatcggggatttcaaatttgtagttgtgattttcgatcgattcattagctcccgaagactaagaggatttgtggacttagaagccagcttgatgatccatggatctctgattattcagtgttgatgttatgttgcagcttaacatcgttgaagggaagatgcagtacttgtatgatgagagtggtaggcgatatctggatgcctttgctggaatagtcactgtgtcgtgcggtcactgccatccggatattcttaatgcgattacggaacagagcaagctacttcagcacgcgactactatttacctgcatcatgccattggtgattttgctgaagcattggctgccaagatgcccggaaatcttaaggtacttgagagttttaaacaaacaagtctgaatgatgtagttaggtttctcttgttggtttatcgaggaatcagcatgctctatgatttggatgcaggttgtgtactttgtgaattctggctcagaagctaatgagctagcaatgatgatggctaggctttacactggtagccttgagatgatttccttgagaaatgcttatcatggtggaagttccaatactattggactaactgctcttaacacatggaagtacccattacctcaggttttccccagagactttcatttaatgaattgattcctcttcaaagttgagatattttctttagcattgatttttgcctctcaagccgagtctttcatctttagcctcgttttagacccatcagaataaaattctctgcaaagtagttctctgccatagactgcttgtaaattttggttgccaattctgttattgtgcagggggaaatccatcacgtagtaaatccagatccataccgtggagtttttggctctgatggttctctttatgctaaagatgttcatgaccacatcgagtatggtacctctggaaaagtagctggatttatcgcagagaccatccaggtttttgtttgtttaaacaaaccatcaagtgaaatttagtgatttaccactctcttgaacataatcgtcaccatgccattatcatttttacttcagggggtcggaggagctgtagaattggctcctggttacttaaagtcggtttatgaaattgttcgcaacgctggtggtgtatgcattgctgatgaagtccaaactggatttgggcgaacaggaagccactattggggtttccagactcaagatgtggttcctgacatagtcacaatggcaaaggtttgtcaaaagaagttgttaccacttgctctgttcttacttcttaccatatgctatgttctccattctttgactacgtttactgttatatacttaaagaaacatgtgtagttcactaataattgacaccggttatattcacagggaattggaaatggattgccattaggagctgtggtgactacaccagaaatcgcaagtgttttagctagcaagattctgttcaacacttttggtgggaacccggtttgttcagctggtggacttgcggttctaaacgttattgataaggagaaacgccaagaacattgtgctgaagttggttcacaccttatacaacgtttgaaagatgtgcagaaaagacatgatagtaagtaccaaacaaacttatataatcagatcatttactctgtttttacttacaaccgtgtctgtttggtttcagtcattggagacgtgagaggaagagggttaatggttgggattgagcttgtgagtgaccggaaagacaagacaccagccaaggctgaaacatctgtcttgtttgagcaacttagaggtaaacaacattaaagccaaaagcatcgatttgataagcatcagttggttaaccaaaatgttttgctcctttctcttaatgaagaacttggcattctcgtcggaaaaggaggacttcatgggaacgttttcaggataaagccaccaatgtgtttcactaaagatgatgcaggtaaattcttagtttatatatcgcttaaaattatgaagtttcaccaaagaacaaaacgagattgtataatatctataatgaatttgtgtgtgttgtaatgtatccacagatttcttggtagatgcattggactattccatctccaggttgtgaacaaggatgaaacaaagccaacgagagtttttaaccatatgaaccgttttaatgtttccgcgtctttgtaacgaaaaccaagccaagtctcatctcctttgatttcagaataaataaataaaatttatttatttctcagtgttgctatgacataatacaaatacattagaaaagcccaattatttttgttttctttgttaaaattcccatatttcatctggtggacttaaaaaaataaaattatacatgagctatatattattctgctaaagcatactttaaataataaaaatttaaattctatagatatattttgtgtttcggattaaaaagaacactccaaatcatagaactaacaatacatgattttgattatataaaaaagaaaatcaataacacatgattttgtttcgatatcaaactccatgaaccaaaaaaccttataatgtggaaggattactaagatttaaatattttttttttctttttaaaacactttattaaatttttgatatcatttatattaatattttgttgattttagtttaataaataaattagtatcaaaaataatattgtagaagataaatgttactttagatcctatttctttcactaaaataggtacaagcatttatagccattaattattctttgtatagttaaaaatcccataataattaatggtggacccgtaaaggttgcgaaaagtcatacacgttccaaaacaaaaagtcgcaagtctacattttccttcttccagaaccataacacgtctcctcccatttcttcgtaaatacgtttctcctctctgacccatcacgatcacaatctaacaaaaagagttttcaacaaaaatcagcaatcgtggcgaagctatataagaaagaggaggagagacacaaagcgatggaagcagaagtagaagaggaagaagaagacatgttcgaagacgccgtgtgtaccacgcaagcaagagtcaacacgccattgtccgtaatcacagaggccttcgaagatctcgcggatctggtgaaaccgcaacgatctgatgagatcgatgaagacgaattaaggcttgatgatttctgcagtgcgtgtactcacgtctctgttctcttcaattgtcttggattcgctttcaaatttgcggaaatggagtacatcgccaaggttaaggatttggtggaagcgtcgaaaacgttcgaaacgttacacaacattcttgacctagacgtggagaaagaaacggttaaaacaccggggagccattcgcgtaacctaagacgtgtgagacaaggtttagatctgatccgagccatctttgaacaatttttgatcgcagatgactattcgttgaaagacgctgcgacaacggcttacacggaagtgtgtgcaccgttccatacgtgggccgttagaaccgcggtttacgccggaatgtatacacttccgacgagggatcaacttctcttacggctcaatgaaactgatcaatcggttgagaagaacatgaggaggtacatggaagcatcgcgacctatcatagaatatattgacaagctttacattgaaaggaatattaaactcgattggtaaaaaatttgttctgcatcaagtactatatattaaggcaaaatttgtcttgtaaattactattattttttcaattaatttttgttcttgtaattcaaaaatggagctttgaggcctcccaaaaataattgtttctcaccttatgtaatgcgttgagcaaattaaaacgttcttgaaaagaaaaatgcaaatcctctagtcttaattacatcaagtttgatgttcgcgatctctaatgagtcctcatcttcattgttcaatatctgggttaatcttacgtttatcaattataaagttcttggatccataacttcaatttcaacacagttacgttatgtgtaatccaaataagtttatctattgtatattaggaaatatacattaatctgaacctatgatcaacaatgtctgggtggtgtagtcggttatcacgctagtctcacacactagaggtccccggttcgaacccgggctcagacataatttttttatttttattttttattttttttattttaaaggattctacagcgtttaattgctgatttcataactttcataatgatttttgccttacttatatcattcatgatatactatatttacttgttgcgtatcaaagttttttttagtccagtaaatcacatacgctatccgattatttgaactctaatagtaaaacattaacatcattattacaaagaactagtccacatgaccacatgttaaggtcaatgttaatgtcgttttatatgtttgtaaaacttttaattgagtaccatgcatataaacttttcttggttttgaatttggtctgaataatttaactacgaatttttttcaaaaaaagtttgatatattttcccacttagagcatcattattgatgatctcttaaaacaatttttatgttaagagatatgttttataatggcttataactataaaaagtaagagactttaaaacacttttgttagttataagacatatctcttaacataaaagttatgttaggagaccatcaataaggatggtcttactagcaaagaactggacttttagataagcaactccaatatttaagatatgaaaagaggtcaagaagagaaaattaagattgtgattatgtttatggattggcctttagggagaagtatgagacagattagcagattgcccccaatcacttgttattggctccaaactataattactaaatatataatagtaatattacaactacgtacaaaaccaacataatccaaatccaaatgatgaacttaattatttgaactcataagtagacgaaacatataagtagaactatatgggaacaaatcacttataaaaattagattattttttataaaataggtagaaaatgttttggtataagccttatagtacacccaaatcacatatatatatatatatatatatatatatatatattcatgtgaaataaaaggaactatatatatatggctatggactaacgcatatacaaaaccattcacgatgaactagaaagtcaatcctattatttaatgatgtagatttcgagagtggagtggcaagtattgtccattatcatcaaacatactaaagtcggtccactaaattccatgtctcactcgtttctttagaactaattaattagtgttaatctaagtggaaattgagtcggtcaattgcaatgataaattataccaaatttagaagtgttatgaaaaactaaaaagaaatattttggtgaataggtgcgtgtgcctatccttaaagcatctcaactttaattttccttatacaatagcgtggtgctaaattgctaattatattaatttctagtaaagtttttgtcttttttttttttttttcttttttgataactcaatttctcggaaagttatatgcagtttcttgttttatttttaaaagtgattataaaatgtagtcactgactcgaatatttggggtatgatatatgtaaacacgagcaaatatattctagagatatcaaatttgaagctctaaaacgtttctaattaactgcaccaatgatcattctaaacgttaaccctacctactatttgaatggagaaataattattctctctgaagagagaaagataatgttcttatttgcatgttgtagaattggaagctatagtttattggatcaaagccctcttgttggtaaccttttctaagtacttatatctttgttgttctcttgtcgtgaatttgatcaatgcatttttattgttatctactataaagcaagtacatgttagtggttgaatcataccagataagatatatgtccacagatttataaagatgtcaaatttttaatcatcttcatatttgcgttcttatctaattttgacatatacttttctacatcataccagataagatatatgtccacagatttataaagatgtcaaatttttaatcatcttcatatttgcgttcttatctaattttgacatatacttttctacaatttcgtcttttttaaagatgtaaattatcattccacagactaccgttaaatcattaatgaatgataaaatctaaaacgtacatatatattacttagcgaaccatgcaaagatctatcatatttttgtttatatgacgagatgtgaatgtattggaccatagtttgtgccgctggtataagagccgcccttaaagcgaaagccacaaactagataaaacctccccctataagtaatttctaaatgaatcattattaataatatgtgtaaatttgtggaacaaccgactccccatagtttaatcacctaagacatcaaggctatcaaagagagaaatatattaattaagagcggcaatgaaatcgtagaaacctctataaataggcactcttctacaaactcaaccttcacttcgaaaatcttaaccacatcttattcttaacacatttattttgttaaccaacactaaaaagtaatgtcgtccattggagcaagttacgcacacctacaagtcatgcagaagaagcagaaggagaagatgaaaaagctagaaaaggagagaaacttcgaccacgatgaagctcatagactccctgtcgaaacatcttttgcgtccggaaggatttctaataaaatctatccttctcgtttgtcttatgaacaagtagagttcaaatcacaaaagtgaagttcaaagtaatgaaattcttgaaaaggatcttcagagccttctctcccaagtatttgtcctttgtgtttgcatgtaattatgtatgtatgtgtgatgtgtctaaaacgtatcttggtcgtctttgtagttttgtgaaagtgtacaatttgtgtgtttatgttatcaagtgttaaaaggttattccattgacacacgcccattactaggtttgacacatgatctaaaagtaagttgcaagatttgaaatttggtaatattgggctgctattactttatttttgacccaacaattgttcatagatccatgaaaaggtaaaagaagaaatggagaggaaaagatctaacacacagagagccaaacaactctgttagttcatcacaggttcaaaccaaagtctactaaacataagaagagtcttcccatccgttctacattaaaaataacaaaccaaactcaacagagtactcaacttttgtccgcactgagctaaattcctaagagcctgctacgaaaacaatgacctgaaattcccaagaaccagcaagatcacttgttattattcgctgcaagtttagctgcaacttgctcctctgacaagggtaagtaatatatcctggggatcgcttttgtcttcttgaatagatcatcaagagtgacaatgggaggttcttgttcctcaggggctataggaggagggggaggcagaggaagacgttctacaacgtgaggtggtttggccagaggtggtggtggtggaagagcagttggaggtggccgcgaaagagtctgagcttgtggctgatgctgaggctgaggaggcagaggagcttccagtttttcttttacttcttctgctctaacaaattcagctatcagatggcggcctccattaggtggccactggaggttatacactgcttctcttgttgctgctgcttcttcaaccgagggatactgcagtcacgtcacaactcactcatgttacacaaaattctttggatatttagataattgaattcgaaagtacacaaacagaatcaacatttttgtaaatcaaaaggatttgaagaagcggtcttaccgatacatagcagtgggtcttaatgtggtccatccagaaactagtgacatttccggttttacccaggagctcctgaacagctttcagtgtgaacggcctaaggaaacggtcaatcctgagggaatttgtaggctcctttggagatggaggaactgccaataaatattgaacacatctatcaaacaaagctttaagacaatgaataagagatggaaacatacatagagggggtgctgtattacatacccacacgttccttgggtccatcttcactaaccgaagagtcagaccttgagaagtcgcgcttcagaccagtcgaccttggtgttgtagtgggtgtagcactattagtgatctgtgcttcaggaactttaatactattagagttccatcggcgcctctttgcaggttcattgtttccaacagcttcttgatctacattgagttacaaagaaagacatttcagcatacatagctagaatttcaaaacagatgcttcaaaagccaatatatataagaagtagccataaacgacaaagatgaaacaactattaaacactaccagtatatgcctcaaacaccaacattacagattaaacacagtaaaagatttgattaataaaacaaatgaatatgagaggaattaccattagcaggaagctttcttttgtcagaagccaccagtgggtgacttttattttcaggggatttccctttccccgcatccatatcagcacggctttcctccttagaaagcatttcaatttttgcactcttatcatcagatgtaattgactcggattgctttgtctccggctcatcctccatagactcatcaccagaacttctatctaaattcaacttttctgagtcgcctgcatcgataatattattttctttgatcatatctgcgtttgcagcattgctgtcatccccacctccaacagatgtcttctgctcaagtggctcctcgacatccattggatgcgattcgccaacgactgttgatggctcttggaacttattaacattttgttctaatttgacattatcagcaattttgttatcctttagttctattttttcattatttgacacagaatcagtagaaatacaatcagattttacctcaaaccctgtaacggggatgacctcagatacctggttgtacatagcagatttttcaagcactgcctctgatggttgagccttagaatccccaccatccaacccactaaatggttcattattctcagatttgtgctcactagacgccacttgcacaactgctgcatcacgtgcaaccactgaactatcaagaccagctatgtctctaacatcatcaactttctctttctcatcttcatcactagcgaatggcacagcgttaacctctggttctgaaaacaccggggctggtgtagtctcaacaccagctgaagcttcagttgttatcttggtctgagttggttctggggttttctcagctgtaacaggagttgtctcagtgctaaatgccgcttcaacaggagtaacaggagtggtttgattacgatcacctacagtaacaggaaacatctgaggctcttgattggctttttcagcagcagcaacagtagcactattgatcctttcagactcttcttgctcagcacgaagtgcttcatcaagacgcctaaccaattcctccttcaagcctcttgttgttagtctccgtcttttaagctcttctttcaattccgtaaccttccacttatcaattggtcggttgtccaagactggaaaaggcgatgacgacatcttagcttatgagagagctgattctgaaaaaatattgaatataaaattagagaaacccatcgcagaggacaaaacctaaatcagacaaattagcaaagcaacgcagcaaatctatataatttaaaaccaaagcttaaatctttaacaaacccaatccaaaagagctagaagtttaaagatgacttacaacaaaatggcttgaaacttcctctgatgggtaaaagaaggcaggaaaaatgtaaaaccctaaattcgtagcataagaagaatgaaacaattagagagacaagacaacaatcaaaacccagtacggaagattacaaatttatcaaatttccgactcaaaatagattcttcaacaccagattttactctcttaagacgaagaagaaaaagaagaacgcaaaccttaaaaacgaaatccagaagcaatggaacggagagagagtgacctttggttgaagaattctaatcgagaatgaaagataaagcggacattgggaatttttctatcccgtcattacaaaaattgggaattttggaaagaggaggcgaattctagggttcttgttcgtcgagtggttttgatattggggaaaaactcgaggacctgaagtgataatgggtcgcattgtattgtgaaatgtctaaattaccctttttctcaagtaattttgtacggcgtcgtttcaatgcttttggggttttcagagaatactattattttactcaccggaggctccgagtcttctccgtccgtcgtaacatcttcgctctctcgttcggcgtttgtatcaccagagacgcgacgcgataatgcttcggaagtatgtttcctgaaccctaagtttattatctcaatccatcttgttgaattttggcttctcttgttccatcaatctcgttgcgtagctttcgggtctgattttattgattcctctaaattgagagctatttgtgactttgattctcttgtgaatcataccgaatgtggtttatgttgttgctcttttgcttaggtcggttctcgagctgtcttctcgtttgtcaataaagagattcccgaggaatttgggagctcaggtgagttatgaatttagttgtgattcttagttagcgtcttgtgagtactctcttggattgattgtgttatgttatgcatcagaggtttcatttgagctcttcgagaaatgcatctacatctggtaaaaatggtctccctggagctaaacccgttgggaaaccagatgcctcaaaagttgatcctccaaaagtgactcctcctcctcctactaaaggaaattcttcaaaagtggttataggaggtgttgcaatcgctggggcttttctggtagcgtatcagactggctatttggatcaatatctggggaaagaacagcagaaattaagtgagcgaattcattctgatgctctaactgaaaagctggaggaggctcatcatttgaatgtaccttccggtgttgaagattctactgaaaaagatggaaaagttgaaacgcaacctcaagttactcattctgaagcttccgagggagtgcagagtgacatagaactgcaacccgagtctgatctatcatctgaccgttttacatatatttcttctaaccaagaggagacacctcaagaaactgtcattgatagagcagagataaacttgcctatttctgcatctgaagattcaggagctaagccggacatgccatcagaaattatttctgaggcagaaagtgtgaagttggaagctgtacccaaacctggggatagtcctattattgttaatgcccagtctagttcggttcatagagaaagcgaaacggaatctgcttcaccaaaggatcctgccgctctaaagacacctgaggtactaaaatttcctttgctgaacttgaaaaagaactacaagtaatgaaatgaatagcttacagatttaaaaatcagaagatgaatgtctcagtattccttgtttcatgaaatttttcttgtctcgtccttttcctgcattggaccagaatgcttgtattttgaaaggggatacacctatgtaaagggattctgctacattgttggagttaaaagcactcctttgttttgtgcaaattcttattatattggttgaaatgggatattcatatggacattatgttaactgtcctgaatcaaattctgatagaaactgattttttaagaaggaatgtagggaactaaaattagttgaattagatacctattactctctaaggaaagcgggaggttcttatgaagctttagttgaattcaaacccctcttaaatacttgatttttctatggcctatataagttacctgagatgatgaatatctaatcaatcactctcttacaggatggcattgagcgggaagtacaattaccaggttctctccttaaggaatataatctagaaggcagtgatactgaaagcactgggtcctcgtcaataggggagcaaataactaaagaaactgaggtttaatacttgatattcctgtctctgttccttacttcagtgctttatattgattgataatttgcagaaaagtgttcttaatctggatagtttcgtgaattaggcctttcctaactcaaccgaggggctgaaagatagttacatgactgaggatggaaagttggtacttgattttctggctgccattcatgcagctgagaagcaacaggcccatttagatgcccaggtttttgctgaagaattacgagccttgaaggttggttaaaagacagaatatgtcgtatgagtatttatttctgtagtgtctttgctttataagaggttttaacgtatacactactgccaattgttttgattgtactcaggagaagtatgaaaatgagttaagagaccttagggcacgtgagctaatgcgtatagaggaggcagcaatattggataaggtgcgtttatctttttatctctacttgattactcagtccaggacatatgtccagtggcactgctcatatgcatcagatgtttactttgtattttactaatctataagtatgggcaatttgatgcgaatttgtaatggattcttgtaagcatctatctattctcggtttcatgttcctgggtagacgcatacgactataattgaactgccaatgttgctttattcaggagctaaaaagagaacgaacaaaagcagcagctgctattaaagcaatccaggagagaatggaagataagctcaaagctgaacttgaacaaaaggtctgtgtacatttcaggaaactgaagataaaaagtgtattgtgacttaggaaatcataactcacaatttgtatttactgtaggaaactgaagcgcagttggctttgagtaaagctgaagaattggcaaaagctgagatgatttcgacaattgcaaaagaaaaggcagcacagattgaaaaaatggcagaggcagatcttaatgtaagtaaaagacgaaatggtgtactatctaatggttccaacctcatggtatagaatattgcacagactgttttgaaatcacaattaggaagaatgtgtaggaatccagatgtgcgttagttgttactgcactctgcagaaaacatttcatcagaagatgttttagtaaagatgttgaaagtgaaacctctattctaatggagtcatgaatgttttgcatactttgaagtaatcaaacccacattataactttccactttacacaaacttgagttacctatccctttgtaaataagcagaattcctgaatgtttagccctgtctctgcattgtcttctactttctgtagataaaggcactgagtatggcattctatgcgcgctctgaagaggctcgccaaagtcattcagttcacaagcttgcattggtaagaatcgaatgcatgcttttttgtcatgggttcatgttaatgtcacgacactctgcttttctatatcacctactaagtttgaaatgtataaaaattgtgattttgtagggtgcacttgcgctggatgatacactctcgaaaggactgccagtccaaaaagaaatcgatacgcttcagacttatcttgaagggactcataaagattcaatcctaggcctggtattatcatctcttccagaagaagcacgatccaatggaaccgacacagtgctgcaattgaatcagaaggtgatcccactcacaatcaatgtttttggatataaaaattgttccaacttttctcttactctcctctcgttatgttgccagtttgataccttgaaaggaacacttagacatttcagtctcattccacctggtggcggaggcatcttagcacattccctagcacatgtagcatcttcgctaaaggtgtgctaattacaaaaccaaaattcggcgctcaaaaactctgaagtctaactgtcattcttgggcttctttgttttaataacttaaacagtttaaagaagtggatcaagctaatggaggcatcgaatctgtaattaaaaaggtggataattacttggcggaaggaaaactagcagaagcagcagcaacactagaagaaggtgttaaaggaagtaaagcagaggaaatagtgagtgattgggtgcgacgtgcaagaaacagagccattacagaacaagctcttacgcttctccaatcttatgcaacttgtgttagcctcacttgaatcccttccagatcttccattgaggtacattgcttcttctttttttttaattcgatactgagattcctggagttaacaattattttgcgggaagtagtaccaactctttttctggtgaagaggaagaattacgattctctattccaatgtttatgtttgaatcacagctgttcatgttatctgaattagaatgttaccagaaagtttgatacaaaaataagatcgaatctcacgaatttatgatatttgtctggaatgggatcaggagatgttgatttggtgatgaatgttgttgctgtactgatgtggcatcatgtggtatatcactgggcttataatatatcatccctctgtagcatttcatattttaaaactgtcataaaaagcccatgagcttacttctaagccgaatactattgaacacctcttaaccagataggtgtgatgtgcatactagtgccctggaatctaacattgttcattgcttgcaaagagtgtacaagcaacattagctagtgttgcgggccaaacttcatcatctacacgagcgcgagaatactactccctgaagtagttactactctcgtttgccttaaatgagaagaaatattacaatcttaactggttcctatttgaaacggtttttggaaggaaatgcaaattagtttctaaggataaagaaatcagaaaagatgatgaattttaaaatcgacaccgcattcactttcggtgagttctctttagcaacttttgttgtgatcctaaatccaaattaagaatctaagaaagataacacactaaacccaacaaaacaaaggtcatgcatgtatcttttttttatccatttaaagacagatatataattgataccttgtcctgtccacattagaaagttttcaactctttgatgtataaagtttgatctctggtcgttaaaaagaaaaaccttatactttgataatcggataaactcgtatagaatcatgccaatgatgccatataaaatacaattaggagttaggaaatacatttaaataaatatctaacggctgccggaaacttcttatcgacagtctttaaatagagtgcataaacttgttattatatgtaccgaacgttgaaggtttgctcgacaactccaaaacattataaaattttgtcagctaacttaccactaattatttcgatcgagtgaggagtcaccttcatattcttatctatatttttatatatataacagaaaatttataaattcttgtcaactaacttgccactaattattcgagtggagtccccttcatatattcatagatacatataactacaatttattatgtcagctaaccgttggtattagtatgagttaccaaaaaggcaaagattcgaatttatgacaagttctgtttattgatagacgaaagaaacaaaattgtccctatattcaagataaaaagaacgactttaattacatgtacgtatttgtatttgctggacgataataaacatacaaattcaattttgaggagttgaaaatattccctagcttcattccagataattatatgagtttttgtatatctactattgaattattacgtaaaattatgaatacgtgaagagaatgtaatacatactatgaaacagctagctaagttgagaggggaggtggcacaactcctccaataaggagacagcctcacacgcgtattccaatcggcgccgtcatattgccacgtatacaattgaacgctcgagatctcttccccatacgtgtgaagctgtctcgtagtgagtaaatattaactttataaatctccacgatggttcttgctatttttatatatcacctttaaattttgctaaatttgatcattgatcctaattaatttaataatgaaccgactattaattatgctttagataaattagtatgaattcgttaataaatgcatggctctctcaccttctttctgtcttccttgtgaagaacaacaagatttaaataaaaatacctaaagttattattccatgatttagttgtattcacatcacatggattcccttttccctacaaagcttaccttcgtatatatgctaagttaaaatagtaacatatatacatttgttcaacaattggatacaaatatgaaccaaaaaaacaattggttacaaaaatactttaaatgattgaatttagtatggttttaaagcgtatatatccctttagttccacttttcccatcaaatatcttcttaactaaaccacaaggtctttggcaattggcatatatattgcttacggtctaagttcttaaagacatctttttctattttttataaagttggccaaatttgtgtcaattataaacacaacaacatactttttctttcgtaccaatacaattatatacacaaaagtaattctttattaaaatatcaaattaaggcctttataagtcgaggcaaccaagctaacaactcattgcaaactgaaaccaaaacaaatatctatacaaacacataacacatattgagagccagagtgaaaagaattatacccattactaatcgcctttatctgtgaattttcttgataaaaagaagacacaagtcaaagataaaatcaacaagatgggagttgggggaacgttggagtatatatcagagctaatagggaatggaggaagccatagttatggaaaaaggaagaagaagaagcagtttcaaacagtagagctcaaagttaggatggattgtgatggttgtgtcctcaaaatcaaaaactctctttcttctctaaaaggtaactagcttcttcttttataatcaaaattctcgtccgaatttgtgttactgtcccttatgagatgtgtttgcttactcctatctaaaacttatataaatacatgcatcaatcatcatgcatgcatatatataacatgaaaaatcttccttcatatattttcaggagtgaaaacggtggagataaacaagaagcaacagaaggtgacagtgagtggttatgcggatgcgagcaaggtgctgaagaaggctaaagcgacggggaagaaagccgagatatggccgtacgtaccgtacaacttggtggctcagccgtacatagctcaggcttatgataagaaagcaccgcctggttacgtcagaaaagttgacccaaacgtcaccaccgggacgatggctgtttactacgatgacccttcttatacttctttgtttagtgatgataatcctaatgcttgctctattatgtagtttttttttatttattagataatttataaaggaatttatataatatatgccggtaatatatgcataaatgtgggttataaattttggtgtttgttctcttttagttcatggttttgtcttcttttgcatgtgctctttgttggtgttacaagtgaatgttttattaatattaatatagatctagtattatattagcttaatcaattggatatcgtaagtaatcattgtttactatcattggaagatataagtggaaactagttaattttttctatgctagtttcaaacttacaaaacaataacaaagacgtttgtttttggttaaggtgtttcatggtcttttaatttgagtttagttttttgggaccccaatattctaactcttttcacccactctctttctcttttacatacattattaaaagaaaaatccaaaaatggatagtaaagatcgatcacataaagcttaaaaaaactgtgtatcataacatacacgggtcatgtaatctttctatacatacaactacccccaccatactatattttaaaggacttattcaacaatttttactgatatgattcttgctcttcagtcttcaggtgtaaacaaagtaagagcatcctcaacaataagctcttattaaaaacctcttaacaacaataacaatgattattttattataatattattatataaataaattttaagtttaagaaaaaaatgaaccaatgtataagtgacatgtggcttaggtggtttacttgattattaaaaacctctcttcattctcttatctaagagctcctcttcattttttctcttcttctttccatgtttttatttttatattactagatgaattcccacgctacgcgtgggtttgttttaaaaattctttagataaaaatatgttaattatttttgtcgctaatttatgtttactttttgtttgttattttatacttagtaaaattagactcatcttatgtacttacatttttattgttagattcatttttgactctaaatatcaatttttatatattttcatgtataatctgattatttttatatccaaaattctaaaatttgttcattatcatgaatacacacaataagaatataagatattttgatttcaagagttttcgtatgaaaaaaaagaagcaaaaattaaagagttattttagtaacactttttagattttatactattgcatatagccgtataagacaaatggatttgttttgaattttgtggtatgtttaacgtctcaaaagtctattacttaaaaatattgaatgtcaatgttacgaacttacctaaagatacaaaaataaaaatacagaatttcatatgataagatatgaaccataacgtaataataattaaaaaatcaaggtaaaataactacactaatattaggtagcaaacaaataaactacaacataaacaactatttagtcattatagagtgatgaccattgaccattaaaatttttaaaaataaaaaataataaaagtaaaataaaagtagtaattgatttatttaaataagtaattttatttatatttatattttgaaaaaatcatttaagaaatgaattaatggaggatttaacacaatatgagattttttattttctctcaattaattttgctaattttaatttaatcaatattaaatgacacatgatattttcttatgtgatgatgtgtcacccatatggagagagttggccaactttcatatatatgatttctttaaaaacctcatttatcttagaaccctccattgaggatggcctaacatcagcctttaagaacctccggtacgctgtaaattagctcatgcactgtgtttttcctggaaaatcgaaaaatgaagatttgtcttatgtattttcaacatgctcaagtaggcaagaaccaaagttttacactttttttggccttaagattcatgagttgttgtgaggggaccaattacagagatatgacaccgatgaaaaaccacatcacacaactttattctagactctgtacatctttgtgacacaagctgcatcacttaccaagactgaatctaacctaacacgcgcttatacatttatgcaagtatatgattttccaaggtcataacttaacaaaaagacagatctgcacagagaagatgtgtcttgttctttaataggaggttagacattggattcagttggaaatcatcaatgttttaggttacagaaattataatctgaagcttgtcaaaagtaatcacctggtgatatacatcacatacatagttgtttgttcctttaccaaacgggattggagttggcttcatcttgtattacttcctgggtagatctcaacaaagttgatatcatagagcaaagttgcattgccaggtatgttgcagtcacctgcataaagagtcgatttattactcgagatacatatcttacatatacaagtgaaactgttacagaggaattgtgcaagtaccagaaaagcatcctgcaggctctggtccataagctaacttaggtggaatctgaagtttacgctttccgcctgcaaaataaaaccgcaccaatatgttatcagccaaataaaggacattgaacaaaggaaaatacagtacacttgcctactcgcataggaggtactccttcgcctccaagaatcccctggtctagtcccctaattacctgatcatttttggacatcaagagtttagatatatagttgttttgctcaccctaatcacaaagaagaacataagaaactaactaacttcaacaaagacaagtgtgaactttgctagcaatgcaattgaagactatggaagctaacaaagagagagagagacaatggttctttgttgtaccttgccgactccaattcgcatagtaagtggtcttgcacgcttatagctactgtcaaacaacgttccatctgcaaacctcgccgtgtaatggatctgtgtgtgtgtgaccaactctccaaagtctcaaactttgaatcaaaaaccctaaacagaggaaattagagagatggagagattacattgacgagtacgccacgaggggcttcatcaccaaatccaacatcgagatcgcaaaatccaagtcctgattttgcgtagctgtattcgcagagaggatctcctacagtggcgtagtagtcaatcctcgtggcgtctgcgtccagaggcgttagagagagaatcgaagaagctaggaaccctaaacccactccgaaaacgcgtttcttgacggagagtttcggctcgcaatcggaggaagaagaacagagacacgaaaaggacgaggaagaagaagaagaaaagaagatggttggtctgaaggaacgtgtatagagagattgtgtgagtgttaaagtagaaatcgccattcttctttgagtcttcgtttcgatctctgcttccttatctgcgtgaagccagagcctttggtctgaatcttttgtcttttgagtgtgcaacggtacaatggatatgattatgggacccacccgtatttttttggatttctattttcaacagaacaaaaataataatgaaacttttggagccaatcggcccacaaaattgagaacccgaatcgaattatttggatagtaagataatggccagacctagttatcactcaactatgaaaccgagtatcatctgaatacatagaaaacccatcagtgcgacaatagcttgatatcatggtccaccataaccaccaccataatattaaaccatcatcatcacccattattatatattccatttagatagagatacacatatatgcacattgttgatagtttatgtaagtgatgtgtataggttatacagtgcattggtgacttaagtgtaactggtccgtggacaaaaaaatatcaaaatcatttgaacttttgtatacacaagaacaagcaaaagatttttcatcaaatgtcattatttgttttgcgaccatcaatccatcatcaaatcttattgtgaaaaacaagaattattatttttaagagttactattatactatacagtagcaaatgatattattgaaaaccccgcttacaaagaactgacatttcattctgaagtgttgttaagctagagactagaaagagatataaattaagctgaatattctaacgattgattggttaatgagaagactgaaaaaagttaggaattttgtagacgcatcacattcagagccgtgacaaggtcaatggttgtcggaggcggtcaaatgaaatttgcccctattcacaaacaaagagacttataataatagaagtaaaagtgtctataaagataaattgtcatatgacaaaagtaggtcaaaaccaaaatgtatgtataattatcattattgattacctgtttttcttttgcttgggaaattttcaaatttcaaatctgttggtatggtaaaatgagagtcaagtcaataaaaattgacgttaatgtagatgatacaccaaaaatgaataagcacatgggagaacagtaatttatcaaatttcaaatcaccacaagtctataattaattaataattatatactatggtcccaaaaccatattccacaatccggcggccgtggaagattccccaaatttcgccaccattcactccaatattaattaggagaaatattaaccgtagtgatcccaaaaccacgtactgtatattgattgttgaaaaattaaaatttcatatcgcaagtcatcgttgtcattaaaatttaaaagttctatataattataagaaaatataccaagaaaatctgattcaaatggtgagatccatctactaactaatacttaccaacatatagttatggaaaaaactaagattaacaaataacaagcatattaattaagtattaaataattaacaaaccctacacgaaaaaagttttaaagtggtttatactgaaatatagaatatataaacgagtaacttcatcatgctatatgtgctatgtttaatttgttgagtaatcatgtcaagagattagctttgatttcggacttggactatacataaatatatttatgttctctggtcggaagacgaagataaccaagtaccgtcattattatgttcatgatcggagccaccgtagcttccattatcaccggtgtttatgttcccgttagccgctgccgttgtagtaggaggattagtagatggagtctgcatcataccaagaccaaactgatcgtgctcattgcttctagggtttgaaatatgagcttgaagaagagcttgcagattcatatcctcgaaaccgttgttagggttttgatattgctgaatttgtgatccggataagagaggagtcgctggagtgagtttttgagcaaacggtcgtaacaagagattgttggtgttgtaagtgtttggcgaagaagaagacaagccgaggaaagtgttgaggcgcgtggtgttcacgatggagttgttgttgaatagcggtggagctgggattccggtaaactcttgaaccatcgctcggaagttggaagtatccgtcgttagaaccgtcgttggtgctcttcttgatgctcgagatcttttctttgttttcttgattactcctatattgttagtaggagggagtgatgacgtggcggaggaggttcggaggtcgagttgagaaatcgggtcgggttgttggtttacgggtaagaacgtgttgttgttaaagtagtttggtggtattagagagttgttgttgttatggtcgaaatggaggaggttgcgatggttttgttgcggcgtgggtatagatgacacgtggttgttgtggtggtcgaagaaggcggaaatggattgatctgcggcgcgtgaatcgtattcttcttctcctcctccgccaccgccgcttgaagattgcatgctactactattaccggactccatctcgtgacaaagaaaaaaagactttgacgagagaaaacgtaagaaattgatttagaggtgagaatggatacttgagtttagggagctattgtttgtttaaggagtttatgagatagggtatcatggtaaataagacatttggtgtgacatgattttttaataattttgttttgtttttgtgtgaaagggagaaaaacagggaacgtgaaatcgcattaagtggttccactaccaccatccactattgtctactctatatcccaatattatatacatgtatctaaggtttagtttatattagatttattccttttggtgatagtcaaaattcactttgattgtagatatttggttcggctaatgctttgttttgtttctctaccactgcaggatgttacgtttacaaatcttatgatggtattacttttacttttcctgataaatggtacttacttttcttcgtgatttgtgcgtatattcatatcaaaatcaattatgcgataaaaatgttagaacaagttttaattttccgtgtgcacaaacaatcatttaacttcctctcgttattctctaaagatatagaataatttgaataatctactaatctcttacatgatgacataattaggtcagttaattcggaccaaattcaataatatatatcataattattagatgtcatcatatagctagttccaccaagataagttttttagctgattaatctttcttttcaattgaataatttcgaaatcaccaatttaaaagatgcaacaaagatatgtacatactcatttctacttatttcacccgattaatttgcaagtggaaattaatggtttgagtgtatattttgatagagatactaggtttggtcggaaaataagaatcaatcatataatatactattaattatcaaggaaaattcaaaatttatgggcccattaaccaaaatgccataaccctattatcactttacccatacggcttagttttgtttggttacccacactcatttataattgtgtttttttcgttttttttctaaatatcaaaatttcagttgacttgtaaattcgtatgaaattgattatcattgcattgcaaataagaaaaagaaacatttagtaaaaccaaccactacattcgattaactattatcactattaaatgttttgttagtgtttgataaaaaaaaaattgccgtgttagtaaaattttttacgggtgatcaatgatcatcatataattaaccaaaataatgtaagtctacatagttttagtattgaagatcacaaggatatcaaaaactaaagaatcatcactctctataatttagtaagctatgggtttgatcaaatttccagcatgtagtttttttgctacgtgtgcattttgttataacaagataaatatataaatgggcttacgcttcttcttttttgtgcaacaatgggcttacgctttatgcccaatatttacctataccaaggctccatataattagtatttgttatttataagcccacacacttttgagaagaagatgtctaaaaatgaaaatgctgagaagaagtaacaatttgtttttacaaatataaattatacctggccataaaataataaaaatctgacagcaaatatataagcaaataaaaatgggaagaattacttattctcaatataaatttgaattattcttaatatagacaaaaccatcaaaaatttcgtagtcattaataaggaaaatttcatacaatccagtggactatttttcttggtccgtaagctgccagagagagagagacttaaaaggataatttcgtaaatctaccaacccatcatataccgactcgccgagtaatcgccaagcctctcaaattatccatctcaattctcacatcacaacagataagagtcagccacgtcaacattacacgctactccgaataacacgtgattattaccccaattgttaattcccaataataacccttccctcaaataatattcgcatctattaatacacctctgcagaaaaaaaatcagagaaaaaatacaaatcgttcaccggaaaaaaacaaaatggctcgtcgcgatgttctcctccctttcctcctccttctcgccaccgtctccgccgtagctttcgccgtaaacttcctcaatctctaaccactctcgatcagatttagatttttcgataatttgactttttcagtttctgtttgtttatctaggaagatgatccagactgtgtatacacattctacctcagaaccggatcgatctggaaagccggaaccgattcgatcatcagcgcaagaatctacgataaggacggtgactacatcggaatcaaaaaccttcaagcttgggctggattaatgggacctgattacaattacttcgagaggggtaatctcgacattttcagtggaagagcaccgtgtttacctagtccgatctgtgccttaaacctaacctccgatggctccggcgatcaccatggttggtacgttaattacgttgagatcacgacggctggtgttcacgcacagtgctcgacgcaggattttgagattgagcaatggctcgctactgatacttctccttatgagctcaccgccgtacggaacaattgtccggtcaagcttagggatagtgttagtcgggtcgggtctgagattcggaaaaagctttcttgggtcgtttaagtgatgtgttgtgattcgtgagacttgtctgtattgtttgtattctcgttgttcttgtgagtgtaatgtggcgttaatgaaatatgattcaataaaataaaacctttttagttattttgcgaattttaactcatgattagtgaatgatttagtagattaatcacaggttagttgaatcatttgctttagtagattaatcacaggttatgtaaatgtgaaaccaatcaatgagaagactaggacatgaaaattgattgaatgcatataggtgtcggtattaataagcggaatagaaatttgagtggaccaagtaataatcccttgggccaaaaatgacgccacgtctgtattcattgagaactaactctttgatatttatatgatttattgtccacattgtatctactatactttttgtagggtcaaaatcaaatcgtctcttggtagagaaatatgggaacactcacttcttaaagaatgtgattttttttttttttttgttacgaattctattaataatatatggtagtatattcttggacgtcaattggtttttgtaacaacatatgataattgtatacctatggtatgattttctattactgttttgaaattttatttaagaagttaaattccatttggaataacatattgggcttacgacatggccgataatcatatcttctcgccgccattttaaaagcccaatacgttttaaatgaaactgagtcccacatctgaaatttaataaacagttctaacccataacaattgataaatttaataaataatagataaactatttttttaagtgttaagtttttaaattttatataaactaatttgatataatattcgaattcttaaaaagtgtttaggatcaaatttgatataatattcaaattctatggcatttcatgttggtggtgtgcacttttgatgcactaattaaacaagtacaaaattattcaaaagttttattttttctgttatttcacgtccataaaagattgttaagtaatgatgaattttttgtcattgcaaaaattctaatgaaaacattgaaagaccattatagcaatgtcacgtttgttctttttcctacaacaaaatctcccatttgatgtcgatctgacatttacgagtgtcttacttaaaactttaaaaaatatgtactattaaatcttttaaatttaaaattttaacattattttagcaccaaacgctgacttcagttagtctcagtgacacaagcttaggatgaaggctcttaggcaaagtaatacaaaaatagaaattgttgtatatgctcacgagcaggcaaaaaacgttgaacagctttcctttctccatctcattactagaaatatgaagaagctaaagaccgtggatgtgataaaattattgtatataatttattactttctcccttccttattaattgatcttttcaaaagaaaattgtttcaaaaaattgattttttaggtttcttatacactatttattagttattattgatgaattttaaactttaaaacaaataattaaaatatcattgatttagaattatagaaaaatgtaaatcataaaaagtaatatatttatgatcagttttaatatatttttttaatttgtgtgtttttattagaaaatcaattaaaaataaacagagaaaatattaatatataatgtttatccattattttaaaatatcagagaattatttaataactgaaaactgatgattatgttacaaacgttgaaagaaaatttgtaaataagtaaaagaaacaactctaacaacaaaaataacattgaagaataaaatattactatatgggaaattttggattttttcgactttgcaggatctaccatctaattttcattttttcaagaataagagacggattaacaaaatcgtctttaaaaaaatcacgaattgaagaaaacaatcaaagagcatcctagtgtttctctctttagtgtttggtcaaaatgggtcactgtgaaacagaagcaacttctttaagaagctcttgtgagagctcgtctggattatactcaaccccaaagcacctcacaatctccatcttcggatttatcaagtacctatacacaaaaacatatcaacatttagcatctttttcttacgaacatatcaagatttgatttgagatgatgaacccttacatgttgtgagaagtatcaacgagataatcttctccgtcctcttgaaccttcttgaagtagacacgatactcttgtgccatttgcctcattgcacttgcagtcccggttagtcctagtattctactatcaaactctgcataaagatacaagcaaccaaacgtcagagggtttagcaaaatagctggaacacaagggcacgaagtaaaaccgagacctttcaagtatgcgtggagatgagaaggtgtgtctcgttgagggtcaagagtgacaaagacaggcagaatcttctcgttatgtttagactctgttgtttccatcaagacaagacatcattactaaaagaagatcatatattataacaagaaagatctgaaactaatgaaatggctggagctttgtataagtaactcaacctagtttatcaacagctttggacatcatctttagttgctcaggtccaacatccggggaaaaagagtatccaaagtagagtagaacccatttaccacaaaagtcattctctgtgactatcttgttttctgtgctcacaagcgtaaacggacctccgataatcggacctttgacagttgtattagaaccgcagccacaaccgctattgctgcttgcttgacctgcaaaagtagaagcatgaaacatctcagcttcatcactccaatgtgtcaaaaaaccatcatcaaagtctatagtacctctaggaactgctctcctttcgtcgttgtaatgaagaaagccgacgaatccggcaaaaccaagtagaatcgcaggctgaaaatgcagacaaaaaagggaacataagtcccaaatgaacgatccaattcaagaacacaagtgaaggcaacaagagtttttaggatctatacaacagcataacgagcacgagaacgagaaggagcttgagttcctcctcctgtgggaaaaagaggtttcacatctggaatttcatggccctgtcttgttgatttacagtaattgactgattgaattcgtttcgatggtccacacctaaaaaaaaaatcaacgctaagattcaatataatgttttaagatcaagaatttcgatactttagaagataaaccaaacaagaaacattcacaagaccatcaaaattccaacaaagagagacttttttcgcagatagagtaacaattgttctacttaaaaaacccagataaagtaaaatcccctaagcaacttaaaattagggtttataaggggtttaaggataagaagactaaccttcggagaaaactggcagcttgattcttgcaggacagaacaagacggcgacaaggaagcattgaatttggttcttcttctctgtttatttgataaattatttcagtttcatccaaaagaaaacttattccgtactatagaatctttttttcttggtgaagagccaaaaccaaaacaaaataaaaaaagtttttgtttttttcttggtggccaagctcatttccgtgtgttttaatgtttttatttgtttaattttgtgtaaagtaattaaattatctatgggttgacttactaataaattattgggcttcataattgacacacaaaaaattattgagctttatatacaacaatttgagttttattgggctttaattcaacaatttgagtatattttgtgtcgaaaatctgcaatgagattatgttttcttgttgggtgagtagtgtgatttatccatcgttcctagtcaaaaccatcattttagtcctcacttgcgactatataaaatttacaattatattgatcaaaataggaaatgagaaagaaaaaaaattgatactaataatgagggacatgaaaagaagaaaaaaacatttgagttggtaaacaaaagaaaattccggtccgaaagagaccaactgaagttacgcaaatcaaccacagccacttgctgccactccatgcaaaaaccctgatttccgcgttgtctctcttctcttctctctcgacactccctccaccaccacacatttccttctcgccgttattccgatggacgggccaccgctacctccgacctctacctccacctccacctccattaatgacaatgaaaacaagaccggtaatgatccttctacgtggcatcgtcccaccagcagcctccctcaattcccttcctctgcctcccaagtttcttcacctccacaacatttacgtaatcgttctttgaatctctccccacacgtatcaccttcttcgccgcctcctcctgatccaatcccagagatcgagacctacgtagtgcatgttccaagggatcaggtctattggatccctcccccggataatgcaggatcgtcgaaagacgcaggaatagcgatccggggagaaataataaaagtttttgttctaaacgatgcatttggttattcatctctgtgatcgtcatcggattcatcatctgcgcgatcgcactaatcgttggttttatattcaagcccgaacctccggttttcaacgttaagaaactagagaaatctcgccatttcgagatcatgttgacatcaaagaacccaacctccaccatgtgggtgacctacaaaggtctcgtctcactgacgtacaaaaacaagaacctaggccaagggaatttcccagagctgtcattagccgtgtcgggatcccatacggtcaacctaaagctggataggtccatgaacgcggctgttctgccgcctgaagtggttagtttggtattgacgatggggctagatgcgggtttcggcacgggcttggtgaaacgagccaaggaagtggccgtaacatgtgacattaaagtaaatggattattagatgcgcacaaggttgagattgtgtcggagagttgtgagagtgagttcactaaataaaacaacagcgagctttattacttctcatgtaaaggtttgttcctctgactgtcatatgcttttttcttttgttttaacttttacatgttaatgtgtgatacatcaaagacgttcaaaatttctttattgaagatgctctgtttttgatgtaagagctaggtggtactttgtaatctgtaatttatttccacccgatttattttacttaatttgagaccaaaataacatgtttgaatgtgtacggtcaaactgaccttggcttacggggttctctttcactgttttttttttctctaaaggggtcgagtagatcacctaaatgaaatagaggggttatttataaattaagtaaaataaaaggtacaaatgctgacctagtcgtgtttaattaaatatataaagtccaaaatcgaaaaacactctccatcgactctcgtgtttaaccctaatttcaaaaacgtcgtctgccgctatgagttctgaagtcgaaccaccgcagaaaaagaagcagccgtggcttccagattatatcgttgagaactgtttagcacacatatcgagatcttactacccgaaactctccctagtctcaagtcctttcgctctctcgtcgtatccaaagagctcaacaaagcgcgatatcgcctcaacaaccgaagaatacttcttccacgtctgcttacagcttcctaagagtcctcttccaacctggtacacgctctggataaaacctgatcagatcgagaagaagaagaagattaatacgtttactggaaatactcggttggtacaaataccatcttcctatcattatccttttgaccaagtgttcatctttaatctttatggtgctatgcgttcatccaaggcaatggtccgtcccccttcatatgggttggtaagcatgttttgaatagaactcgtcgtcgttgtttgattgagattggtaactacggtgggaaactattaatcttatggaataagtttgtgcatcctggtcaatttggagataaacatatttggtgtgaggtgattgctcttgaaagacgtaacggtaatggcgatgattatgaaatttggggaaacgttgagtggactaatgttgtgcttacggttcccggttcatacgtcttcgtgcgtagtttacagaccaaatactgtataagcatgtttttcttttgaccattgctaatgacttactttattgtcattttaagattccgtttcttacattaaaataatttataggttactatataatttaaattattggcaatatcaaccgaaaaaacacatttagcttcaaaataacaagttttggcgtatggggttgtctttgattgttaagggacaattagatatattttagttaaaattaagggttaaatattcaatattaaaaaaaggggaagacatatataaagtggtattggaaaagcccgaatcatgtttaaccctaatggtcactttttgggcagaaaccgccgcctctgcggctacgacttccaaaggcgaaccaccgtcgaaaaagaggaaaacgaatccatctcctcctccgtcgcttttgtcactcccagatgttctcattctaaactgtttatcccgtataccgaaatcgtattaccctaaactctccatagtctccaaaacatttcgtgatctcatcatatccattgatcttaaccacgctcgatttcaccacaaaacacaagaacacttttttcatgtctgcttaaagcttcccgatcgtcctcttccctcgtggtacacactctggatcaaaccccaaggattcgatgacaaggaggaggagaagaagaagaagaagaagtctaccttggtacaagtaccttcttcctatgcttctcaaacaccattgctcgtagtaggtattgattcagatgtctatgcattcaaacaatgttatcctccctctcgggtcatgtttgttcgtaacaaggagtgtgtcatatggcgtaatgcccccgacatgactgtggctagagctaatcctgttgcctacgtcttcgataggaaaatatatgttatgggaggttgtgcggaaaccgaatccgcaaattggggtgaggtttttgatccaaagactcaaacttgggaacctttacctgtcccttcccctgagctccgcttctcttcaatgattagaaaaatagagatgatccaaggaaagttttacgtgaggagcaatgacagcaaggactctgtttatgatccgataagagagaaatggaacgttgcagcgaaaccgcagttgaatgatagtaggtgttcggtaggtaatgtttggtactcttgtcgtcccaacagtttcttgtggtttgacaatgaaattaaaaattggagactgatcaagggtttgtcttcgttgaatcatagttgtcgtagtggtttgattgaaacagtttgctacgatgggaatctcttactattgtgggacaagcctaccaagcctcgccgtcgtgtttgtgaagacaagtatatttgctgtgcgttgatttcgtttaataagcgcaaaaatggtcaagtttggggtaaggttgagtggtctaatgttgtgcttacggttcccagttcataccgtttcttgcgttctacagtgatacggacttgatcaacatgtctttacttgttgaggatggcttttatatgtaattcttgaaacactcatccgttgtttgaaacatagtagtactgcttaaatcattgatgttcaaagctttgcttaacctttattaaatagtttgacatgaaactatgctacatttgtgtgtttgtgtgtgtgtgcttggtgttaaatctaagaaaccgtatacggactttggttattttcccaaacggggacgattttgataatttaactaaatcaaggggttagtttttaaagattagaaaaagcatgtttttatatatatatatatagttcattgcttagacctaattgtgtttgtttaagtatgaagaagtccaaagtagaaccaccgcaaacaaaatctccatctcgaggttggtttgcttattcatgtttaaccctaatctcttctaagaaaaccctaatctctgccgcaagctatggattccgaagccgaaccaccgcaggaaaagaagaaaccaaattcatgtccgtcgtttttgtcccttcctgaagaaatccttgtaaactgtttagcccgcataccgaaatcgtactacccgaaactctccttagtctgcaagagcttctgctctctcatcttatccatggaactttacgtggagcgattgtaccttggtacacatgaagacgtccttcacgtctgcttacagttgcccgatcgtcgtcttccttcatggtttagtctctggactaaaccggatcaaaccctaaccaacgacattgggaagaagaaaaagtccactagaaatactttgttggtaccaataccttcttcttattctcctcgtgtaccaatgttcatcggtgagattggttcagaattatacgctattagcaaacataatactccatcctccgtcatgtgggttcgtgataagactagtatttatgcctggcgtaaagcccctagtatgacagtagctcgtgccaatgtttttgcttatgtcatcaatgggaaaatatacgtaatgggaggttgtgccgcagatgaatctaagtattgggctgaggtattcgacccaaagactcaaacttggaaacctttaactgacccgggggccgagttacgcgtatcttcaattataggtatggcggtgagcgaaggaaagatttatgttaagaacagctatgtgaaggactacgtttatgatccggaagaagataaatgggacgtagttgcaagctcattcatgattgagagaaagtgtgagatagagaatgtattgtaccgttttagtagacaaagttgttcgtggtatgacacaaagcataaagaatggagagatatcaagggtttggctacattgaataggcgtcgtcgttctagtattcttgaagtagcgaagtacggtgacaaagtcttaatcttgtgggaaatctttgcgaagcctttttatcaaaacaagagtatttggtgtgcggtgattgcgcttgaaaagcgtaaaattgatgaaatttggggaaaggttaagtgggctagtattgtgcttacggttcctagatcatatgttttcttgcgttgtgaagtgaaaccggtttgataaattctagagatcatgcttttgattttagtcttttgtgcatcgccaatgggttgtttcagtcattctctttaaaccatctctcagtttttttttttttttttttaattttcttttatcattttatttttattttattttatcatttatctatttatcatttgttacatcatcattagaaatatgttgatttaatcatgatataaaagtataaagtatgaacgatcgtcggtaatttaaaataataatattatgttcaaatttaaattgttgacaaaatcaataggtaatatcaccaaagtaatgccaatagacatcaagaatactagccaacaggatagccaaatagactatttatacctatgtaagtatgtaacttatctattgctttcttttaaaaaaatatctgtttgcaatttaattttcgtatatcctaagagaaaagaaactttatcacaattttcatatctcgtaatatgcacattttagttgtaaacgacaaaaataatgatttaaatttaataaattatacaatagattatattttacttttttttacatttattattttacttacaaatacagcatcgcatctatctttatttaatgacccaattatcttgactaattttggggcacaaaaaaaattatgaagatatacttaaatctcattgttaacaaagtaactagaatcttgcacatcatatcacatctaactttgagcgccacctataaattattatctaaccagccttgattagatccccatttgattactaccttgcaactcatgcagctatgatctcccaagaagaagtaccgcagagtacaaaccattctctgtcattttcatcactaccccacgaaatcgttgtgagttgcttagcccgcgtctcgggatcgtactacccgaaactctgcctcgtctccaagcaattccgctcaatcatcttatcaaatgaaatctacaaggctagatcccaccttggaaccaaagaaaaccgcctcttcgtttggctaaagttgcccactcgttcttatccttcttggttcgccctttggataaagcctaatgaaaccctgaccaacgatggcccgatcaagaagcagtctactggaaatctactggtgccgttgccttgttcgtataattatcaagtactagtaccctcagtgatagttggttcagaaacatacatagtcggtggatacgatgatgctctttcttcatccgtgtggttctataaaaatgggaagatccacaccttaagtaaatcccctagtatgtcggtggctcggattgacgcagtagttgttggacagtatcctaacatatatgtaatgggagggtgtgattcagatgaatccatgaattggggtgaggttttcaacataaagactcaaacgtgggaacctttgccagaccctggtccagaggttcgtggccagttggttaggaaaatgaaaatgcagaagaaaaacgtctacgttagtagtgaaaagaaggattatatttatgatactgaagaacgtacatggaaagttacagaggcagtctttaatttcagttggtgtgtgatagagaaagtacgctacatatattataacaagaattgttggtggcttgacacaaagtctaaagactggagaaagatcaaaggtttggattttctaaataagtttcgtgaaacagataggattgaaatagttaacttggatggcaaactcgtaatgatatgggacagatttacgctatctaaacgaaacaagaagatttggtgtgcgatgattgcgcttgaaaagtgtcaaggatgtgaaggaatttggggcaagattgaatggattggtgatgtgcttatggtccctttatcatatagcttcttggattgtatggtcatatccatataatcaaaaatattgttctgtttttgctttgatattcgtcgatccctttgcgcaatttggtttaagtcagagataataatactctgattaagtttcctttagcaattgatttatttttttcattattgaaattttttctttcacttgaatgggtcaagttttacgaacttatcgtctacgccttaaatcgagcaagatcacgatatgtatagaatatttctagttccttcaaagggtatatgagtgatgtgggatattaaaagttttgcctatccatctgaggatttaagtgggtctctaaagaaaggcccgttatacttgatatccgattttaaaaacaaagcccattatatgtattctttaaaatgattttacttttgactattttatgtactgagcaagatgagcccattttattgatttgtaaatggaaaagcccaaaaggaatgggccaatatacgtcacccatttactgaaaaaagcaaattcaaatgtcgacgttttgaagattgcaactcatcttaattgcaaacccttttgtgaaaattttaaaccgtcacttcacgtttttttccttttagaattttgtattcgtacttaataatttgaataacccgtggttggtaataccggtttaaaacaagagaaataaagaccaatacagacttttttatcctaaacctccacatggtctcgttggaacccatgccttaatttgagtttctttaaattgttcttgtaccttcttagcagccgtgttttaaaaacatatactttttgtttgtttcatttgctttattgaacatcatccactaaaatcatttggactttgtttaaaatttcctatctttaacaagtgtcagagaggatggctcaagtaaaagatcgacacataagttttgctccctataatgagggcatctgagtcacatgcctccacatgccaccaaagagtttggaactccccatactcataattacacatagatggatgtggctgcgtaaatgatgaacacattcttcagagaacacgtgtctgaaattcattgataaaacatcgtaagatgattcacgaaaaaggggatcttggtcatgtgaagtgttccatgtcatttttaattgacaagtatatatcaaaaaaaaaaaatattaatgcggagacaatagttacatagattatacttttaagatgtagtcttgcaggtcttgtatttaagtaattaattgaagggccttaaaaaattcatttcattcgcgtttgttatttcaaaactttgtttatagagaaactaattatatattatagatttatatacaaacttctttcctctgagtcctatacagaaagaaaaaaaaaaaagagttttgcctggggtcattaattagaaacgtacgtagtcccaggtttgtgcaaacattattgttatatggaaatgtatagccggattttttattatacgaggaagtcaagcacgttaagcttgaatgtgtcaaatttcaaagaggacatgaattatatatgtttgttttactattttcataccttctcgtaggaatggatcttttaaaaattgacctatatggactatatgtataaaaaaaggtctacgaacttgaaatcttacggcgaccaataattggttggatgctactattattgtgcttataagttctctaaaatttattcagccaataattggagcgtgaaatatttttattctttaaaaaagacaattggagaaactaaagttatcaaagttaaatgatagagaatctctctctcaccttttttctggtggattccaactcttcggttataacttttgctttccaacaaattctaagaaattgtttagttaaggacttcatgtttagtttaatacacgtctttttcctttagtttaaaaccctaacccgattaaagaaaatgctaagccacagaagagagaaagaataacaccaaatcttagtttgaatatctctttaacaaaaaaaagcaatttaagtttgattttgtggatgtataatgtaaagaacagaataatatattttcttgtcaacgtgaggtttccaaattatcaatcggatttttatttattttgttgatttgtacgtgaggccaactcaatttcagcaaatgaactaaccgttttccaacacatttccgtctttcaccaatttactacttgatcgttctttctaaatttatcatttgatattaatttgttctttatctaaaatgttgtctccaagatataaagatacagcttgtatttgccgatgagtgtgaacaattgtaatctttcattaaaaaacaaatttacctaaatcaaaaactccagctctctgggtttggtttattgaatatgaatatacggaggaaatagtttaggaaaataaagtttcttaaacctagtgattagcacgtgtcgatagttgtgtgattgggaaaccttagacaggcttcacagttcacgggccaattggctttaggatttccataatactctagagcataagagcaacctaagaacttagggttgttaaaaatatatacctacgcatttcacataaattaatatacgtacgccacaatgatctttcttgttggcatgtcgggagaaatgggtgaagtaacgatggtttgttcaaaagtagtcatctaataacgtgggaagactaaacccctactatattaaagtctaactaacgatagtgaatagtttaattgctaacaacatattttcttcattttgtctctcatgctttataagaacataaacacttgttattaagtccacgtcggggatatgagaatcaatcaagttgatccttgaaacggattctatattagacctagtggttgttgttttacattaatatatagttatgtggaaaagattgaaaaatctttatttgcttcttttcatgagtcaaaatattgaattgactgaccacatgggattgtgaccgtaacaatcaaatattaatattagattgtctacatgcaaaatatttggggaaagaatcataaatttctgcctaataagttcatatacttgattttctaaaatcttcagtacttgtgtttatatataacaatccaacgcttatacaacttcagccgttcgtcaaaatattgatatttaacaatgctgtaaaccaaaacgaaaaaggactatatatgtaacaacgcataacagaattattttttccaatatcgtatcagctttttagaaaaatacaacaaaatagggaaaccgaaagtaaacttttaaaatagcaatttttttttattagtttacccaaatccaactttgaatataaaccccctaagatcgaatgaagataatcattccccacctatatatgttttatttttcactatttaaaaccatatcggcatttaatgaccagaaggaaaacaatatgtgaacgaggtcttgatatacacaaattgttgaacattgacttcaaagtgtatatgtacgtatgttgttgaattgtcagagagattctctttttggtgctcttttcttgggattcctaagacttagacaaaatgttattattggttacttataattaggcgtttattttctatttttacttaaacaatgtagttaagcctctcttaatatattaagcttagaagcaaagatccgatcataggtcgagtctgtttgacgctatcttgatatcttcccacccaagttttgcccacccaagttttgcctcatagaatattctatttttcttatgttttccgaattaaagaaaaataaaagattccttcttctttgcaaatagattccacacgataagcttagctttaagattctattgtattttcctgggacagggtttttagattctatattctgagaaaacctgtattacaagtaattaataatattaacaaaaaaaaaaggattgacaaacaatttaattaagagtgggatgcatggaccattcgagaagaggaaaaaacaattggttctattttaaattaatgcagaaaactatctaaaaattaaacaatttttcattcagtcaaaatatatttaactctgtctctctatatctcgctctctctttaatttaactgttaatttacagcccaaaaaaattgtataagaaatttaggggaaactatctatgatatattatgtagaagaaccatatatacgattgatatataaaacatattttccttgagaatgatggatctacaattttcttataaacattttacatacgcgttgagtacaatatatgagagcaagaaaataaaataaaattaacaagttactaattaagaagaaacgattcttctgtagttatagctctcatcatgctccagatctcaattgtttccattccactaaacgttgcaagaactccataacctgttaataattaagaaaacgtatagtattattatcagcagagtacagtggacatatataacaataattctaaaatgggaagtttctaaattagatcgaagttgtgcttgtcttgatcaatttacctcatcgggttcttgcagtgaataagacgcgctagtctcctttggaaatttagatacaagaatgccaagaccttgtcttcgttctctcaatacctataacaataattaaatcaattttacttagatgattgaacataaattatttaatttaatctaataaatgattactaaattctgtatataccttgaatgcatcttcgtcggtgcgatcatctccgatataaagagggaaaacgtcggtacaattagcgtatcctacacaatccaatactaattttaattaatactattgatataaaccatttctctcgtcattaaatagttgattagttgaggaatattttaccaagtgactctaataaaaactcgagtgctttgcctttgtcccatttaataatcggacgaacctccaaaacctgaaataatatacgagaatataaaccagttaataaaataaattatagttaccttatactttaataaaataataattaatacgatatcttacttttcttccttgagtaagacggagcttagggtagtctttcattactgatcgaacttggttagccaaatcactccagttctgttttcaaataaataaataaatgaagtggttagttttcttttaaatacatgagtaatcggatattgaaaaagaatatcatcgtacattttcatctacgcgtcggaagtgaacagagacacaaaatttgttgttctctacttgggctccgggagtagattttgttttctccactaatttatgataaacctgaacaaaaatatttaaaacaaatgtaagtaagaagaaaatagttttatttaatcgtattattatttgaatatatatatgagactgaattatgaaggagaatgtgacctcgtcgatcatggggaggaactctgtagctggttggcaaagaagagatttactatcctgtaaaatcttataacaacaataaaaaacggtggaaaaagttaggtatagttttcaaagatttttttacgtaaaaagtaaagaaaaacaaatcttacttgctcatatttggacccttgctctggtcctttgatgtccattccatgacttccagcatagtacaactcagttagttttacaaagttataaacctgaaaagttgtcaaaactatcataattagcttcaatattttataagtactaattatatatctcaccaatttagttgtaaacataccttttctatgcatctcccactaactatggccgtcgggaaacagtttgctagtttcctcacagttcttctcatctaaaaatcagaccaaacatatatatcataagttaaatattttttaaataagtaaatttccttatattggttttcgaaatgaacctttctagacatgaaagctcgatctggatcatcaacaatgggagataaagtgccatcataatccaagaacataacgatttgttttccttcagaaaggtgaagaatctcttcaaacatatccaaagctgatggatgttccgtctgcgaatttatacacaccgtttattatttcaagaaaaaaaagatgtaagtagaaactagagcttggatcaatggatgatatatagacgtacgagccaagagctttgtttcaacaaagatttaagatgagtaggggaacaagctctcattgaatcaacccatgaattgatcaatcctactccattgttgataatgatatcttgaagagctttcttcttcgttgttgttacatcgttgtttgatttgttcccggtttctttttctacaagttttgtgttttcttctatgaatctaactgaaataacagaaaacaagataaggattatgtaagagattataaacgtttgtatgcattaatctaaggaactctaaacaatttacccatttctgtctgtaaatgaaaagagatttagggttgtagaaacagagtgagaatgagtgtgtaggctttgagagagacagaggctgaggttgtggtatggtctgattttatagagttgcagtttattataggaaaataaaaaaaaagtctttttttaaaaaaactttagttttaacttgaacaaaaaaagttaaagggaaaatcagatattgtgtgtgtctgaacgctggaacccattgagtgtgggtcctactagatggatgatggaccccacaaagcggctttcccgctcacaccgatcgtttagtttgcagcgttcccagtaaccgccacgtggtcccctccccattaacaccccccaccatatgcttctttcttttgccatcttgctcctaattttttagtatatatattaattaataaataatctcaggaactcatacgaacagaaccaattattttcaatcaaaaagtttcaaaatgaaaatttgaaaattcaagaaaatacacattaggcaataatcttctcttcaaagtgttggtccttcatttttgttatttatcatgatttaaccccttttgtgttattattaaaaaaatggaaacaataccgtagtagtagtagtacgataaaaattgaaataccatgctctgtaacatggttccacaattgtaaaaattcaaaataatttgaaggattttttcatttttaatcaccactttagtttattattttaacgattaccgcattaagacttgtatcagccaatcatgctcctagcatgtaattttataatacgccaaaagattctcgtaactgcatcggaacatttccttcttataagttataactgtattattttcttttagctatatatgctatactgttgaaatttatataatgccacgtggcttagtatctcatcgctgacaaatattcatcggagttcgagtcacggttgtgtgccaaagtcattcacgtttattcactcgtgagtttaactcgattcaataatttatccggcagaatcagatattcattgttcgaagactccctcctgcagtaagatcaaatatcagattctcaacggaatttaactacatgctttttcactcgatggcttaattaatcccattttcacttcttctttgaatgtccatttacctgaaccattttatctgaaatttgcctcacatgtcatcttcatgactcgccggtgaattttattcttctcatactctagaatctcagatgctcaaaatctcatagaagcttccactgctgatgtagaaaacatcgatgcatatgcatgcatcatgatttaattacgagatttagaagaatttgaataggattcttagtaacttctaggagaaggaaaccttattaaaaagggaaacgtggttatgggactaaaatagtctacaattatttttatgaccactactttcagatatagttcggtttacatttgattgaagcttatttttattttttttgggataacgaaattatcacctttttgttaattaattgtggaacctaaatcaattgttgattgaacaaaccacactttcatatatatatatatacatactttcttaatttttgtaagctttctgatttcgcaaccagttatctcttcatattcgtaaaaaactacagtatatatatgcatcaagaaacaaacgactttagtgtaagcattcctcatatatatatacatatatctttgtttccacatatatattaacttgaacaataacgtaataaatcatagattcattatcatattcggtagccaaaggacatatttattgttatatgttcgtatgttacattatacacccatagaagtaaaatatatatatcatgtgttaatgtgtatgaagttatatataaatatgcgtccatggcaatatggcatgacattaaggcaaggttcaaatcaaaattccgaaccgacacctcacgtgtaaggaatcaagagtgtctctacctaacatgtggaaccctacgaggcataaaagtatcatatgcaaataattgtccgcatcacgttaatcccgtttatcgagtccttagttacgcgtgattaatttatggctgatgagctaattacgcttggccaaagtttgtaaaaagaaatgtggcaaaatcacaaaaacacacatatatatatatatatatatatatactcaatgcaattcttagcaaagctagaaagtctaatactgaaaatcaattaattaccggtatgtgagaaataattttcatgctaaataagtatttaatgaaatcaagcatattttcgtacgtatgagacatgcatgttaatattcttttgaccatatatcacattcacaggacaattttggatgcgacgtgctcttattgtaaaccaccaaatgggtaaattcgaggactgtgcactttatggaagaaaaaaaaaacagaatataactaaatttttgtccaaaatacaaaatggaaagaaaaaaaatctcctaatttcataacatctactgttttgccccaaaaaaaaaaaaaaaactatttctctggagtcaaagtctttgatgactaaactgctaacggcaaccgtttctccaaactcttaggtatatgtgggtcctaagcgtgcaacctcgaccagagttttgccacgtcagccattacctgattttcggttgacacgacaaagtaaaggcgtctctttttttaataatatttctcttttctagattattttaaaattacagttttatttatttattttatatgcgtatttttctagttatttaacataaaattgatatataatggatatgatatggttttaaaatatttaataacaaaagttaattaaacgcccactaacaaaaaataaaaaattcttgtgacatattaaaaaaatatttattttatcatgcgtttaataatctagacacggccatgtattagatgcagattctcgttcgaccattttcaaaggaaaaataaaaagttgatagcctttagttttaagaatattagtcgatcaatatatggacgtcgtctatgaaagaataaaaggtaatgattctttttgtcaaaactatttcactattcgatcaaattgctcatcatttcctgataaataaataaactagtaaccttgtaggctctatattcttcattgtagatataaatttatctctcatcccaaccaaccaactcatcgaacttgatactcagtaataccttttctaatcgttttccttttgtagagctgatccacgcctaattattacatgaatctaacataaacaatgtaatttattagtatgtgatatgaataatatagatattataaactacgattaattaactagatgttggattctaatcttagcgtaatgatatgattttaggccaaaatgcccccaatcattgagaactttgccacgatttagacaatcatagtaaagcagaagctatttagctacatgcaaatgttttattgctttttaaaatatattaatagctccttttattatctagagatgatcgatttgcagatgttcagtagataagagaatcaatatcacaacatatatcttatttatttctatgcaaatatatatatatatatatgtcgtaattatttcttttcgattcctacaatatcgattttggaagaaccttttttcgagattttaaaatattgtcaaatacaattcatctttctaatatcccgtttcatccttttttaacaaaaaaaataaaacgaaaactttcaaaaggtactgtccaacaccttgctagttagttctaagcatgtatgtcatggttcgatttccgtgtaatgcaaatttgcatccatgtaaaaaaaacaataataaattacagaaaaaaacaagaattctctaaaataagaaactaatgtgtaacatatacccccacgtcaaagtgttgttgaatggtccacgaatttaatgtaaaagtatgtgtgaataaatgcataaaagtgtcgatttaggaaaaaaatcgtataaatcaaatatgaattattattttgaaccatcaccacttaaaagaaacatcttaaggttttctcgagaacatttcagtaatgtttgggtgctaaatttgtagtacatgaaaatcatctttaaaaagaaaaagaaacacgttctaactttaaaatcgtctatatctatgagcatgttaaaagtagaatgtcttaggttactctttataatctccaagagtcgccaaactacaatgggtggcttctctttatatcttcaaggccttcaagcctttaatggaccgacaccttttcgataattaaagctatgagattgatatgatcttctttttaacatatctgaaatgcaaagatatatactaatcatcgcagcttgttttcatgcgatgtgaagttcaatattctagcccaaacaagtgatgtttagtatacttgtttttaaaactattattatgaaaaaacaggaaatgaaataacttattgataattgtgactccacaagtgtgataaatatatattcctactaaaaaaagtatgaatatatatatatatatgagactatgcgacattaaattaataatcttgttaaacacgtaaataaactatattgaaacaagtcattgtgatattgacttcaaaaatatatctttaatcactagaaaatgaatttcggaaatgatcaattaaacaattctactatgatgaaaagataaacttttctagatcgtgtgtataaattggaatcgctcggcggatctgaacggaaactagttggatcgattgtgacattttggaaagaattagaatggatcatagtaagcttcgcgttggagtttttcactttcgacgtgtcttgcattaatattaaccctaagccctctcatttttgttcttttatgattaaatatataacgaaaaaaacattaatctttctttatctaattcgatacataaagttgatgtatcctctaatcttctcttttcgctattcgaccaagcacgtgcccttctctatcacattaatatttattataaaccctttttatttatttatatatacgcacatattacaaacatttatgtttaaagtttgacgtgtatattagtgtatatacgtcaaatatctctacaattctacatcacaaacacttaaactatattcacacattggaaaaagtatgctatgtatttaatcgctatatgttatctatcataagctacttgctatgaattagtgtttatacatacataaataaaacatacaattcttattatcaaaaaaagaaatacgattattgaaatagaatatagtacaaactaatatattattaactaacagattctaaaagaaaaaaatatcatcactgagaattaatcttatattcgagttttaaattataaacaatatagtcataaatttagatgacaagtgctgcttacttgattatactttactttgttttttcactttcttatgtttttgtttgtcaagttattgttcgatgactcgtatctggtaacgctaaaactcaggatgtaatttttattttttaggtttctcttactgctttggtttgccatgtcctatatttatgatgtagagatgattaaaaaaaatgctctaaattcgaaaaactaaattgccaaactaaatccgcaactagactaatatcagatgggccgatagatgttcttttccatgaatctttgttaagacatttttctcggcttatgattctctgaaagcttatcgggcttggtcgaatgagtcagaagtgagcacacttcataagctcaagctgctcaacgcagcatcaaatccgattcgagtgctttactccaccgtgaagtaccaattcttttcggcccaatataaacttaaaaggcctgtggtgaagtatacgtttttgcagatagatctagttttgttttgtcatagttgggcacttggcctagagtcgttagactacaactaattggaaagtcagagaataaagaatcaaacgttccaattttatttttatttttataataattccaaaaacatccatttcaatttctggaagtatgaacactgtctttacgtactgaaagaaaagaatcagaatattggttaaggctgctttgtttatttttttttctaaatataatatttgaaaaaacagactttaaagtagttgtatagtgtatatattatgaacgttttaatctttgccacaattgttggttattgtaagattctttaccttaaagcatcgaactttgtggcttatgtgttcccatatgtcaacaacggacctctatcgtccacaatacacacaaatgcagcataagttatttgaattatcgccggaataaagttctataattatttgatttgtttttcttttttggaatttcctcggcaggaatacattttcaaatttcgtcaaatgatattttgctttgtagttgaaacatattagattttattttccgatccaaattttgttcccatcatgtctttttgaatcattttacaagaatgatttaagtataaaaaaggagaattaacattaagtttaatttcttaaaaaatccttgacagaagagatcaattatctttccgcaagttctctgaaactgtttaataaatgaattttatactttatcagcatgcaaaccttatttttataatgaccaaaaacactatcagcaaaagactaataatttacattcttcattagaaatttaaagatgagagaatacatggaaacttctccgattggtcaatgacaaaggtttttgaaagttcaaaaaaaaaaaaaagacattaaccagtcagaccaaaacatggaggaagagaaacaaaccctagagacgattctctccgcaactgttaaaaatttcagttgcagagagattaatataagacactgaaattgaaagacaaactcctaaaagaaaaagtcttctctttgctttgtttaagattcggacaatttgctaatcgcatcccaatcaatctccacagaaggaaacttctccagcccgaaactcccaatctcatcaaatccagaatccgaaaagtccaagaacgtagtaataccagattccggcgaagaagattccacatgagactcatctgaaaacgaattctcatcagatctcaagaacccatattcactttcttgatactctgtttttggcgggaaaagctctgtttcagaacaggggaggtcaatatcctctgtttttctcaagctctgacaaatctcttggagctttgcgtcgacagaggaatgaagaggattgaaacagctacctcctccgtagtatccatcctcgtgtctgaactgtgggaaattaagtctcgcgaactcgcctcttagcttgtaagcagctaggtcataagccatggctgcttcttcagctgtgtcgaaagttccaagccagagtcgggtccggttcttgggtaaacggatctcagctacccattttccccagtgcctttgtctaactcctctatagagtttctgagcggtcatgttcttcattgggacaggctttggggctagatttggagagattatgttacgtctctggttaagctggttttggatttggtggatttggtaaggtgtgagctggtttagaccgagagatgtggtttgattgaaaccgaagactgtgtttgaatacgtaggagaagaagaatcagtgttggtggtataaggttgaagtgctttcatgagctcttcttgaaaaggatctgtgttgctattgaacatatctatggctgccatggatctttaaagactaggaaacaaaattaaaacagagagggattaaaaacacaccctcttagtcgattgaatagaaatcaaaatctctgaaagaacaagaaaaaggaagaattatagcattttttgtttctaaatatttgtttttttctgtcgcttttggtttcgcttgatgccaagttctttgcttatataacaccataagctaagccgcccattgagatcattatcattttaaaattatatataaatttcttcagtagaatgttaaatttaataattacattgtttagatgcttttgttctgttgacgatttgtttctcgtcagcttgataaaaatcttttattccatggatctaagccgttcccagggaatataatacgattttatggtgtgtacgtgtgtgacaaaacaatcatctatcatggttagactaagagttctaaattttacaaaaattcccagctcaattttttaaaaaaaatcataactatactagctcgcaataactataaatatcaatttcactttctattgtgtttattaaggatatatttatattgatttcatgttatatgtgaagagcgtgttatatttttttttgaaaaagagagcatgttatagtttaattaggtttacacgttacacacacaccaaaaagacggaattaattttctttaacttctcatatgatctttgactctagttttggagctatatttaataaataaaatcgccgaaatataatcttttcagcaataatttcaaaaatcgtaagagccaaaaactgacattagttgattctagcgcaagttgaaaggccagtttgccttctttaccacttcttttcttttgccaacatatcttcttataaaataatttatattttactcatgttgaattagaaggaaaaaaaaaaagcatggaatcagtacttgaagtactaaataatattcatgcaaacaaaaagaagaaattgcagccatatcaaacatgagaatattggtggtcatactaatattcccaagtcctaatgtggtccattttcagaaatttttattgagtataccgcatacaagtagatgtaaaaagtggggtgggggggttgtaaattaataaactaaggggttgtttggttagcaagataaaattaattggagaaagtgaagaaagctattggagaagaatggaaagaggtgagaactcaaaggcggttaaagtttgcgtcacaaggaagctagtggatcttcttcaccttttttcaagttccttttcagattttaaccatttaaaaatccaatattcttcgaaatattatgtaaaattcttttgtgtttgattgttgtagaaaatagagaaattgtataatgattttatttacgataagtatattgtttcgtttaaaacaaaatgaggtagacacgtttcagataatggatttacttttgttttcgtatatattatttttctgttttgataattcattacatagtatcaatatgaagagaaggttttaagaattgcaatcaatataatcaaagattcatgagctaaattacattctcatttcattccatattctttttcacacttactagtagccattttttatttacctaaataattttttgttataatattcacaaattttcaccataaatgattgaaaatggaaaaaagttaggtgatatgaaaagctttacacggatactacttgcttactttgtatattcgtttaccctccacgttttcccccccccaaaaagaccattaattccaactttatgagtgaatttcaaaaaatttccacgtaatgtattcccttattttcttattgattacttattttgtatcaaattaaataagattcttcgaaccgatatgaaaagccaaaaataagagaagaagcaactatgtgggacccactctggcttgttcacacgtaagatcctacgtggaaatcattatctctcggttctctaagacctgacaactgacagaagaagctaaagaacatatcttcagaaactacttttgatctcatcgctaatctatttggttagaaatcataacgtagattaggaataattctaaagtttttggagataaactcgattacacgtcttacaaagtattcgttactttcttaactttctaaattttcttttaattgttgatcgtaaatctatggatgacccgaaaatcacaaagaataataataattttcatttataaactaagttttcacatgttgattatgcttttacacccacccaatgtagttcttattaaaaaaaaatgtagttcttaattcttcttagagcacaaatatatcgtagacgtatagaatagccaaaatagaatgattatgaaatttatataatagaaatagttatgtaagaattaagatgagctccaaactataaaacagcaatgctttttgtttgattttgaaaattgatgaacatagaaaacagtttatatactttttcttaaagtttacaagatttagtttctaacattttgagatatagattttgtaaatacaaaatatttaacgatttaaaccgtagttcgttgtatgtgaattatcttctcgttaaaaaaatgtagctgattatcattatcacatatataatcattatttgtatcacaggacaccctcaatttctcaataaaaatagttaatctcaaagtcaacccacaaagtggaataaattaaatttgctattgaaatatcgacaagatcatggtgatttagtggtcacttaacatacacgacacattgagtaattattatatagctttggatattattttcaattcaacgaagttgttgacttaacaaatgtcaactcttcctccacaattggaggtcaagataagatcaaaataaaagctatattcccagaccgtgatacaaatttgaaatttgtgactacattcttttcagaccaagatattatctgatcaaaaactgtagctaaacccaaaaaatttcaataactcaaactaattagtgtctaaacatattgggcttttaagtgttatggcggcgggaatctatggttaacttatcggtcctgtcgtaagcccaatgtattccaaatggatggaaatgtgtaatacttatattaaatcacctgtacagaaattgcgaagaaacacacataatataaattaaattttaagacagtaaatgccataggtgtacataattttgttcaacgtaattacattaatacccctccttcaaagtttcagtacctatcgcagttagaattatttattagtgtaagcaactctagctgcttcacttttcacctttacatcttcatacatttttaaagaagcttccgaaaacttttttaatctctctagaagcttcgccaaactcgaatgcacactcgacaaatccgaaaccaacagtgaaccgcctttttcttcccccaacatctccatatccaaggaaaaccccttgattgacccgctaagttcatcagacggcagtgttttgatccctgcagaccagtcccgacacagcacgaatatcggtggagccaggacacgacgtggggaccatggtcttcggtttcttgtagaacgttcttgagggagcaagacacagttgtgaagccaaccattcagagcttccacataagaagccatactgtgaaccaaatctacaaagcttagaccaaaacactctgtttcttctagaagctccgccaaaatccgcctcttaaggacactttcgtgtgctgttttggaggaatgtcgacaatggtaagccaatgaaatggtaatgtactgtgtatgatgacattcaagcatcgctttccacattcttatcaacctaaagagaaaagtaaggatcaaccaacgagtctatatccaaaagttaataagacatttggttactatatacccttgaagaaactctaagagctgtgggtggagctcatcgtctctgattctctcaatccgctttgaaatcgattcaacagattgaatcgcgactctgattcttgaatgaagatctttagcagctgctcttgttttatccatcgatttagcactgtgatcctttgcgaattggttccttagctgctcgcattttcgatcatactctttcctaatcatctcactcgcctgcataaaaagaaaaacaaatgagatgtgaggaagcacaacaccaacacagccatagagtcatgatttttttaccttgacttcatcatagagttttctctcccaagcgtataaccgatcaagcgaagaagagtgacttcctgagatcatacaaaactcttcgatgaaatcacttccactttcatcatcgtgatcttcttttgatgtctggatcaacggatttctagaagtggaggatcttgacgacgatgttctcttccacacaatgactttagtaacttgatgactcaatggctctacattaaagtttaactcagaacactaaaaccaaaaatagcaaagacacaggtaaatgataaatctttaccttgagaaactggtgaataacttttccctctacaacaagctcgcttcaaagctgcaagaaacgctattgaatttccctttcctggttaacaaaacaaacactcacgaatcaacaacaggtttcaacagccatttacacaatgaaaacagaactcatacctgtcatatcggcgaatccgactctgattttgttaacttcaagcattcttgaaacttctcttccagattcagaagctctaaagaacttatgttctatatctttcatactcgacacaaagtctttggctctatgtgtgataaactccgatggatcttctctttcatcattatcttcacaactctgtttcctctgctttgttttaaaactcgagtcttgcaatgtctctgaaccagattttgctacattcccttgactagtaatcttctctaatcctataactgctgcatcacattcactatcaatctcggtttgttcacttagccctacaaatctaaagctatcaaaatcgtcacaagtgtcgaaatagtcccaagaagacgtctctggccggcgaggacgcggcggaggaggaggagaaaacgccggcattgtcacttccagatcgtcatcaccgtcgctcagagggttaatagtgaaagtcacagtagaactagccgtctccgtcttcatgtaacttagattgaaaaggggtttagggttagggtttggattcgagttatgactcagtggcgagtcaaccgaatcgtcagggtaagaggagttatgagaaggagatttctcaggctcagtggcggttaacgacggagatgattcatgagcagtctccgcctccgcgtattgacgaagacaagctccgatgttacggagtgaacggatgtaagacacgtgtgcagcggctaaagcacatctggaatccatagcttgtttgacaaatctcttcctttctttgcatagatgaagcggctcgttcttcttattcatcgatgctttcgagtttgaacatcccattttctccaatatcgaatgacccattgagaaaaacttaataaaaatcgaaactttggatttgttctaccctgaaatctctcacggtggttacaaaacagaacaaactaaagaactcatttcgaaaaaaaagaaaatgacaagtctttggggttttgttttgttttcctttaatggcgtttgtgagaattaagaagaacagagtgagaagtagctatcaccatgcggaaaggagagtagttggggaatttatatataaggaagaatccaaaatacttattcaatgagagaaacctgaaaaaggagctttgatcagacaaatcttgaacaaaatggtctgagagagagagagagagagagagggtgtggagaagttttgtcttggttgcatcgttttacgagaagaagataaaacattagtaaaggaaaaaaaagtgcagagattttagttcattccaaaacagatcatttacttcaaaagctgagctagaaaataaaaagttaaagcagtgagaaaatcctagcagcaacaatttcagattctctctctctagatgctacaaaatctgtagttatggtctttactctttattgaatatgaacatgaaagctacacactttgaatatttttgttttcttctcatttattaacttcggtaattggattacagtacgattctacgagagttatgtgaaacctagttactctttttttttcggttatggttgtgaatggaccgattgagctggggaaagagagggagggaaaaccaagtcaaaagcttaacgtatatattcctgcttttatttagttttgtgattttcgatttacattattaaatcttccatagtcatctctactaaagattggattcaaaattttataatttaggttcaaaaaaattaaaaaaagtctacggcaaaaagaaacgcttattaaaaataattcggtttaagtttaggttaagctactttaacgtaattgggccacctaagggagggaactcttttgtatggagaatcgtgtaattgtctttgggtttgagcaaatcactcttgtttagtttcgagggtctctctaacgactccttgaaacgtgggctttatttagcctctctacatattaaaattaaaatatctcgactttataactttcatttagaatgtgacaagggacaagaaagaatggaggttaacatttcttaaaagtgagatatgggctgttgcatattgtaagatggtatggagagtaatatagtataatagtgtctatcaaaagtttaaaactttgaaacagtgaatgacactattcccttttcctaggcccaaatcctaccatgacaataactgtctcaaagttctaccaagtactactataactgaaaatagtggcagtaacagtaaaggtctaaaggacacttaatgagtacgatactgttataatccctacgatacatttttagtaattgaagcaatcttgcaagccttgacttttcgtacgaatgcctcttaaagacccacccacaccccccagtatgttactttttcattataatgtcgacactattatttttgggaaatgttgctctacatgatttttatgaattgaatcatatgaacactcaaatacaaaggtttaggcattcttttgaagatcatatataaaaaattccttactccttgtaccatatctaggagatatcattttataaaatgaatagaaatggtaaaatccatatttaaaaaaattaataaatcacttctcgtcgaaaataaaatatagctacggagggatgtttggtgtccacagaccaaatatctgaaattattggcctacctataaagacctgacgaataataattgtatctttaatcatatcatataaaatttaagcattacaagtaaatacgtaggcacgaattaaataatcaatacaccatatgattgcgtctatatttaaactgattggcatcgtaacacacaattcccctctccaagcaacaatctaaattttatagagaaaaataaaaaagtttttctttttctttatagaaacaataatatgttgttagggaatcgaccacggcctcaaatgcagagaacagcaagcataacgaggatcactatcgaagttgatggtgatcagaccgccggccaagactctgacgtgtctatgacggtggttgacggcggagaaaattacgcccagcggttcttgtcgccggtaaatcaccagaggaacgagagaaaatacggtgggagatcctcaccgtcgtcttttcttgtaaactgtggcttttgcaaacgcggtcttgctccgggtcgtgatatttacatgtacaagtatgtttacatatactaactactcttttcttaattatttttcatttttacaagtcttcagttttaagatctcaatttataatagtttaaaataatttttctttttaaatttgaacaagttatttgttttatataatacattcaaaattgaaagcgttttttttttataaatataatcaagggaactaagctacaaccaagttatgaaatttatttttaacaccatatctttccaatggtagggattcaatgatttattcctcgttttctaatgtatcacaaagtagtattgatatatttctttgtaacgtgaataaattgtagaggggacgcagcgttttgtagcatagaatgcagagaacagcaaatggagcacgacgaggggaaaacaagaaaccgcgtcgtactatcaccttcaaaataaaaatacgcatggctcaaatttactattactcttaagtttgtgtgtgttttaactagagattgttgttgttaatcattaattagtgtcatcatgtaaaattaatcctcagaaaaaaatgaaatgaatctatctttcatgtcctgcctattattttagtttcacacttccttgtctcttttataaactgggtttatttagtttgaagatatgctttttaattacaacttttttttttgtaatattaaaacatttagctaaaagaagttaaagaacgagtaatttatgcatacgtgatacgttactttaagagctagtgaaggttgaagtaagcacaccatgaatctcgttttaatagtatgactttgttagcaaatagatcccaacaccatatgcaactcacggtaattaagataataattaataaaagtatttattttgatttaaagtcacatcattttgcataatcttataactagtagtacatgaatagtaacagatataatatttttggccagaaaatcattggtggaaatttagaaaaaagcgttaaatgaaggatttaaaaatggaggtcactgtctcgtgacgacgaaagcgtccggcgattagtaatgggatgaagaggtgtagagtaaattaatgcgaacactcgtcataccgatcaaagcttagtgatgacctaataaccatttgttattttactaatcaaaaagatgtaataagaaaatattcatacatactgaaatggtgtgtgtatggttttaacctgtcgtatcaaagttgatacttattacgatttttttttttttgaaatatttcatttatacatatatttaaagctttagtcttgtaaaagacgtatacatgctgtaaaatagttttctacatgctgtgaaaaggttaaaagtttatagatgttacatttctttctttgtttttcggattagatatgttttatccatctttcttccatcataattttgttttagtgtataagaatttgtccatggtaacactcatctgaactaacaatttctaaacgctatctattagtacttggaaagtatgaactcttgttctctatcatttgaaatcacatcagttttttgcttcagtataaatgtgttttgacatttttcacacgattttttttttaataaaaactatatgcatggaccgttatggttttacaaattaagtatttttataaaattatttttatttactacattaaaaatttattttgattataaaattttaatacaatttttaagaacacaaaaatgcttctataacgatacttaaattaaagtacatatgtctcgttgctcaataattgaagatttgtatattaatggtttatggaaatggatagttatcagtagcttatagataggattaggtttataattagtctatggattatttatatataatttgtttttttcttcactcgttttctgaactccaaacttcgaggcttagttgttggagtttccggagtcatcatattttgtcttcactactaattattgattacttaattatcaataaatatataattcaagggaaataagcagattcatttggtatctttaattaaattaatcctcccacatatataattaatttgaattatttggaccatcaatctcatatttttatgaataaactcatttgaggtcattgatgatgccatggtaatattttaaacttcttttcgatggtttttgaatgaagaatcggtccatacacattttatttattcctccaaattatattatatttaaaatagaattgttatgaaaacgaccattacgttataatttttttgcttgccatcttctactaaactagattgaaatttctcaactgtgataaaaaaatagcagggaacacaaatcaaaaatttgaatgagcaagttttcagtcaaaacctacaacaatttacaccacaacgtctaactaattgtggtatgagcaaatttggtgacaaaagctgtccatacacttgtagatcaattgctgaaccaaaaccatgattatatatctcaaaagataagctgttttacaaacatatgaaacaaaatcataagagatattgaaattatggtccaacctagacacacttgcaaaatataccaacccatccggattactacaaatacaagttacttcacaccctacagagaccaaactaaaagctctttggtctctcagaaacacaagctttcataatttaaaaacattatataaaaaccaaacaacgacacaaattaaagactcttaaattatgagctaattaaaggtcttagattcatgcttcttcatgttcacttgaattccatgatcatgttgttctccggagccagtccaacgcacgccctcataatattctccagcatagcccgctgcttcgacagtgcgttaatcaccggagttcccggcggtacaagtggtgccttggtgaggtagctgagtatggtggccacaggatggaaagagtgaaactttccctgccaaaaagatgtttcaaaacatcaaaaccgcggttcagtgaaaacagagaacccaaaataacatgtactgtgaactgacgaacctctccctcggatttgaactggatcctggtgctgagctccgcgaggagaacaagatccaagatgattggagcagctaagagagagtcctcgcaggtattgtgcatcacaattgtgttcttccctcccatgaatatctctgatgtgtactcgtccatggctcgcttactatccgcaacatacggtacatactacaaaacaaacacacaaattggatcaatgggatctcagattgccaacagaaacaggttttgagtgtctgtccggttctctatttaccttgatgacaacaacatggtccgggtgttccccaggctcaaagaggataccattgctagcaaccatatcgtccacgacattgcttttggagatctccttagatctgaaagtctgtggagctgagagattcattccatcgttgtttcccaagtgattgtagctcacaattgaagtaggctataaacaaaaacacacaatcaatgaaaccaaagtcttgtgacaaatattttcagtaacaagaaagagtaacttgatacgcaagttaaacaaaccttgattcctgcgccaactaggaaatcaaccaagacagatttcatcttggtttgaccactcttgaaatcatctccaccgatcaaaacattgttcctgatcgccatatcaattagacctacaacaaacccccaagaaaatcagtcatgatttccaatattgattgatcaatgagtgattaaaactcaactacatgaaacctggaacaaaggtgttttgagggcttccattgatgaacgggattccctcaagaacacaagcaatcgcataaagtgttgaaggagagatctcagcctcatccctatccacagactccatgagattctccattgtatcgttcatcccaacgaccacattgctataacgctctgtgttagccgtccagagaaccacaaccttatccaccttattcttctccttaaactccctaagattcaacatcacactcgatcacatcaataatcagacgagattcgattcaaccaataagaataatcactagaacagagagtaacctcatgtccttgatgatgtggtcgacttgttccttcttggtacctttgatcacgtggttagcacgtgacccttgattagcagctatgaaatcaggatcgaagatcccagggagtggcacaatgttctccatgtaaggcctgagctgtttctgcaagtcgatatcaagaaccctggctctagccatggcatctgctaagttcatgtcacttatatcccatcctccaaacacaacatcatccggattcacctgtttttatttccacacaacgatcccaaaattaaaacacactttaagaagaaaacctgtctcaaaaatttgtttaaaagctagctaatcaccaaccattggaaggagactcttgaaaggagcatagatctcttcaccgttaaaagatccgacacgaatcgatgaagcttgagttagtgacccgaagtaattcgcttgttgcactttgtccttcgttgcccacgagattcctctgttttatttatccaattttccgattacaaaaagacaaaattatcaaattttaatatcaaggacttgatcaaaaagactcactctttgttcgcaatcacaccagcggtgagagttgatccattgtttcctcccaaacccacaagcataaccctttacgacaaaatcaaaattgattcatcaacgacggagaaatcgaggaattatgaaactttggaaaagagtggtttttaccctaatttggggacacgaatatcggttttgaaatcgtatttgacagtctttggcttcacaatccattggtaagtgccattgacggtcttctcatgaacaacctccgtcgtctcgtaatcgtacacagagtgaatctcattctctgtgtacttcacgttcgggctctcaactttgaagctctcaataaacatttttgcagaggaaaaggaaaatttggttgtctttctcggaatttggatcggttttggggtgtgagttttgtgcttctaatcagcggagacgtgcaagtttatatagacgagacagcaagggagatagagacaccgtggcgtcacttcactggttgatggtccctatttgtccaatgcatgtgagctagtgatgcttctggttcatagtgagccacacgtgtggggtctcacacgtgagggaggagcggaaaattaaaaatagtaattgacacgtcagatatctggtccatacacgtggcgtcgctttgttatgatgatagcaaagtctggtttggtttttttgtttcatgggtcccacatttttgtggggaacgttagttagttccgttaatttggtggaaaacgacagtgtttcgtcaacatgggaccttttgttccgttacagttactaaaaagatagtgttttgtcagttacgaaggaaagagagtgcacaacacgaaccacgtttagctgtcaattggtcgccgtaggaatcacgtgtagcgtttggcgcgtgagatagttaatatcggtgttaacggtcgtttggaacaaaagtgcgaccgtttaaagacttttttgtcgccgtttaaaagtgggtcctatggaatcttgttgactgggtttgacacgtgaattacctttttttaattacgattttttatgttattaattgatacttgcactaattaattggtcaaaatgccgatgatttcaaggtacctatgttttttttttttttaaagatttgtgttttaaatatatttttacacatatctaagaaatttaaaataccttaaatataatattaattcatacttgtgatttcacatttgagtaatgtatcataaccagacattgataactatgaatctatatgaaacaaaaagatttagtctagaacactgattatcattgtctgtaaaacatcttcacactttttctactgctctgtttcacgtgtttttcatgtcttagaaagacgttattctgaatatattatttaattgattatggtcgagcaatgtgtcataaggaaaatatcagttacattttactttcaaatttgaatattttaacacaaattgaaacatttgttaaaaatttaaattatttgttatagcttttccaagttacactagtttatatgatgcctaaaatatgtaatttgatttccttttgtaaccgggattctttcatttctatttcaataatgattagtcatttgaaaggtttagatggaaagaaaatccaactttttgcacatgccttgaaaattattctagacatcggtcttccaatgaatcatttcattagtggaccaatatgaactgatttgtaatacaatttcttttaaagatgttgcattatattcagatttgggtgtggcatgttaaaaaagatctcttattatctgttgaatttatatcattctctttttatctttgtgttgttaattatgatgatttgtaagttaaaggttaaacgtgtgatcttggctctcgtatcacctattcattgcagcaatgctaatttttgaaaaactacataaaaatatagtgctcttgctctagtcgacataagaagtttcaaaaactgaatccaaaaactaattatggaggatgaaaaaaaaaaaaaatggtttttggacacaccttggaaatggaatggctttgaaaaagtttgataggcatggttgtggccatacgtacgtttgtgtattgataatttgtttccctttgtaaactctttgtctgtgttcctccacgccacatacttctctttgtttcacattcattttttttcactcaaaaatcattttgtataaagggtgatgttgatgtgctggaagtttctcgtacgcttgattatgtccaactattttgtttcgaattatttaattttaagtaaatgaaaagactactatccaaaataaaattcacaaacgaataatagataatacgacaaacaaaacatattaagcagtaaatatatatatatacatatatattttgtcttaattataacagttgtattaaaatatataatttaattgcaactatgtagatatttttttttcttcttcccaataacgtagatatattttatttgtttcgtttcatatttgtttttgacaaactttgtttcgtttcacattaataaagtaatcaattatttttgtcaattgggaacagtttatccattgtttcgtttcacattaataacagataaactgtttccaatttaaacagaataagaattaaatatttgatcagaaacttatccaaaattaaattaaaaacaactgattataagttggacaaacttttacgttgaaatatttaattataaaataagatcaagagcttatccaaaactaaatagaaatgaataaatacgacaaaaatattaaaaactattacgttgaaatattaataagtcgtagataatacgacaaaagaaaatatatttaaagatgacaaacaataccaatgtgatgtattcataaaagtttgaggtaaaaatcagataaaaagttgttagtgacaaaatataaacaatatcaattgaattatttggtaatagagtcaatgaaggtataaatattatatacaattaaattcattcttcaaactatttataaaaaaattaacatttaggagggatgcagtaatcatctaagcaaagaatgagaatgattgatcaagctttggagagtttgattgccttgagctttgcttaacagattcttcacattttgtgtcatctgtattaaacaaaaacatttaaaagaaagacaaaatttaacggcaatttaaattctttatgatttgaagagaggggaaaaaaacacaattaccttctcgagactacccttcgagtaaggcattgccctttgggctatttggtaattccttcgacttcttgtcataatcttagaagaagtgtgccattttccttccaaatgattgggaagtgtagattcctgtatatttaggtgatatataaacacatatacaaatgagttaatttgtatatttgaaataaaaatcttgaaagaaaaaaaagaattatgagtatacgacataccaagaaaagcactgttgcacaatgcttgaggacctctaaattcattcgaacatcatcgagactcctgcaattatatgacatatgtgcgttatttcaccttaaggaaaacgtaacagtaatagatacaaacatatatgattaggtacctgtgcttttgaactccaagaccaaaataggcagccaaacttgccatctacaaaatagtgcacaatgaccttcaatatataaattcctaagatttctaatgcttacaaagaatcttggataatggtaccttcatgttaccagctcttttgccaaacttgtcacttaataaccccaaagaatcaatgatccctgagggttcaggcgcagctttaccgatctcagcgaaagcttctttgatcctaacgcaatcaaatcttctaatgttatgacctgcccaaatcctaccgttcaacaaaccatggattttctcagccacgtcttcaaaacttggtgcgttcgtaaccttagccctggtgatcccatctgacctagacgaccttattgagaccaccgacaagtctttaggttgtataagcgttgtgaagctctctagctcctcgagtttttttggacatacgatgatcgccccaaactctagtatgtgaaaatgttgccctgctttgtttggtacgtttgtttctagatcgaagaagacgatttcgttgggaaatgtttggaccgccatatcagattttggtttatgttcggtttgttaatcctgtgagtaggtatgtgtatatattgtggatttggggtttgcgttttcttgtgataaaagttaagcgtagatttgtgttggagggttactgtggggattatttagcttcgcggagaaaattttgctctgtagggtaaagtaagaatctttactttgctttttccaaaccaataaaaaagggttgttatatgaaagaattcgttggtagattcatgttctacgagaattgattcctttgatattgtcataaagatatacaaggaatctgaaagctgaaagggaaaatttctctcaaaaactggtaatatcccaaattattgatccttatatgatcctctcaacgggaatattcaactcaaaatacatggctttaaatatttgatttacccaaaatctctgtgcataggaagagttgcaagaacacacattcttcattagtggttaacggcaaatgcaaaaaaacgttataagaagatgaatatgagaaaacgaatgcaggaagttaccaagtgtttgggggcaacaaaccatttgctagcttacacaacagaaaactacaacgaatttgaagccggtaattgcaacaacagagtctccagctgaggccaaacccaccaagatttgtttcatcattgaagacataaactctttgactaattacctttgtttggaatgaaaacctgcaattttgaatgctagatgatcaatttgcatacctccaatggaaattatatgaaaccaaaacagagaacaagaagtttagggcgctagagaatatcatctctcttatctacctaaccagattgtttcatattcttaagacttcacaatttatcgaagtcatcataacatcaccaatcagttcttagacatgccaaaacctaaaaaagggaaaaattcaagaatgaaacaagaacagagacaatacctcaaactctggtacaagatgaatcaaagtcatcaggagcaacacgtgcaatccaattgtttaacgtccgcttaacatcagtatgattaacataagccaactcatacatactacacaaattcaccaccaagctctcgttcaaagccgcggttggcactctctccaatgcactttccatcaccttaatcgcatccgatagatctctcaagtacatcaaacaaagagccttattgttgacagcgataatatcagagttatccctttcaatgcatttgtcatactctctcacagcagaaacatagtcctttgccacaacataaaccaaagccttattcctaccaacaagattgttgaactgtatctcgttcaataaaccattgctctttccttcattcaacatcttctcaactctatcaaacgtagttttagctccttctacatcaccaaactgcatctgaacagaccctagtttcgaaatcaaaaccgggtctaacggatcacgattgatcaattccttcatcaaatccaaagacaccccaaattccttgtgacctaaatgaaaccctagcaagcaattcatcacaaatgtctctcttttcttccacaattccacagaactctctaaactctgagattctttctctctgattcgatctcgaacaaagtcaagcaaaacatataaacgatctaacccttcctgacgattaccaagcttagtcgggatcaaagcgtagagccatcgtaaagagaaaggaaccatagatcctctccgattagggtaaatctcagggaacgattcgtacctgtaatgcgtcccgtcgaaatcgtgcaaggaattaagctcatgagaagcttcatcggagcgacgaagcttcgcgagagccataacttggtaagtgagataagtgagatgctcgtgaggctttgtgaggaggaagagagctctggcttgagatatcttctcgaggatcgcttgccatgagccacgggtcgaaagctcgtggagcgagccgagatcgtgtgttaattcgtcgagcgaattgaatcgttccggtggtagatcggcgacggatgtgacttgggatgaggctaattcgaatgccgtcggttcccctgcatcggttgactctgccatggcggtggaatcagtggaggagggattgaattcgggtcgggtttcggattcgggtaaatccggatccattgctggagatgactccgtgaacattgtggaagtaacctggtttggtctttggatttgggtcgtctttccaatagataccattacgctaaattcttctttttggcataaaaatttagattattttttattaaaaaaaaacatttgatatgattatgattttaggcggtttattaagatttttttataattagatcaaaaataattagatcaaatactaaaattggaggagaatccaaactttggatttcatatattttattttttaattcactagaaatgaaacaataattaaatccaaaattacaattaacttgtctcggatcgattgatcaatgttgattttttgtcttatgacttttcttcgtgtaacgaaaggagttacttaaatggtggagtaatggtaataaataccatgttataatattgttacatactgataatattattttccccatgttacatgtaacatcattgatttttacgtagatatttaatataacgaccaaaaaaaattaagctctgacttggtccaagagattttttctcgattcttaccattgaccctgagctaagacttgaccaaattaaaagtctatgtggaatgtactgcaataagtaagtctttttaattaactaaagaatttcagacctaaccccatatttttttcggataaggggtatgaacatgtaaattattcaattttctattgtaggtatttaaattcgagatttttaaaaaatgaaatgagtgactaactagctagttcaaaccgtaaaacctattattcatttaatgatttgattaagtattttgttttaacaatagtttaggctttaaaaatcttacaatcaaacatcaaaatataatgtggttttactacggaaaaaggaaaagcagtgtagaagcatcgaacatacttgacttttatgacttacaaaacacatgaggtacacagaatcatatactacaattttactttgctaataaaagtcgatgtattattattagaaattatcactaaatcgtagaaaagtgaaacgcgttttctctccagtttttctccaaaagacaaatgagttatctgtaaacacatgacatgcaatgatctatcgttatgtatatatgaattgattaatctcgaactatatattgaaatctcagcttcttatcttctttgattcttggagacacgattggaaaaatgatgagaccgaagagatcatcagacacagtccatgtcttcaatcttatggtcctctgtttcattgccctgtttttttcttccgtcctctgtcagggaaagatccggagattcaaatgggaagtgaagtacgagttcaagtcaccggattgtttcgagaagctagtaatcacaatcaatggtaagtttccaggtcccaccattaaagctcaacaaggtgacaccatcgttgtcgagctcaagaatagcttcatgactgaaaatgtcgctgtccattggcatggaatccgacaggtacgtaaacatcctcgtaagcactcggtgaatgactgaaaaagattgatttatatatgtttcagattgggactccatggttcgatggagtagaaggtgttactcaatgtccaattcttcctggagaagtcttcatttaccaatttgtcgttgatagggtaaagagttataaaactcacattaaagtttcaatctttctttatgtttttatgttaagttttgaaatttgtttgtagcctggtacatacatgtatcattcacactatgggatgcagagagagtctggattaatcggaatgattcaagtttctcctccggccacagagcccgaaccgtttacatacgattatgaccggaactttttgttaactgattggtatcacaaaagtatgtcagagaaagccaccggtttagcatccatacccttcaagtgggtcggtgagccacaagtgagttcttttttccatcactcaaaagtcagattcttgtttgatcgatcaaattttatgtttatggatgattcttatttggatatattatcagtcgcttatgatacaaggaagaggaagattcaactgctcaaacaacctaaccactcctccaagcttagtgtctggagtatgtaacgtctcaaacgctgattgttcgcgttttattcttacggtgattcccggaaagacatacaggcttcgaataggtagcttgacggctctctctgctctcagtttccaaatcgaggtacttagcttgagaatcaagccaatcattttcattgtcttctctgtttctttctttttcgtattctaatggaagatgggttaaattaaacaacagggacataatttgacagttgttgaagcagacggacactacgtagaaccattcacggtgaagaatctctttgtatactccggcgaaacttattccgtacttctcaaggcagatcaaaaccctcgacgaaactattggatcacctcaagcatagttagccgtccggcgacaactccaccggcaaccgctgtactcaactactacccgaaccacccacgacggcgtcctcccacgtcggaatcatccaatatcgtaccggaatggaacgacacgcgctcccgtcttgcacaaagcctagcaatcaaggcgcgtcgaggattcattcacgcgctgccggagaattctgacaaagtcattgtgcttctgaatacacaaaacgaagtcaacggatacagacgttggtcggtcaacaacgtttcctatcaccaccctaaaacgccgtacctaatcgcgttaaagcaaaacctcacaaacgcgtttgactggcgtttcacggcaccggagaactacgattctcgaaattacgacatattcgcgaaaccccttaacgctaacgcgacgacgagcgatggaatctacagattgagattcaattcaaccgtggacgtgattttacaaaacgcgaatacaatgaacgcaaacaacagtgaaacgcacccgtggcatttacacggtcatgatttttgggtgcttgggtacggagaaggaaagtttaatgagtcggaggatccgaaaaggtataaccgggtcgacccgataaagaaaaacacggttgcggttcaaccgtttggctggacggcgttgcgttttagagcggataatcctggcgtttggtcgtttcactgccacattgaatcgcattttttcatgggaatggggattgtgttcgagtctgggattgataaggtttctagtttaccttcttctataatgggatgtggtcagactaaacgctgattatattgtttaatcaaattcgagtagaaaatattcattgtttaatcattgagacacctgttttttttttagccaatgagacacctgttttatttaatgtaagtaatgttagataacaaggtggatattttgctataatttatgtgtcacaaatttagcaatggtttggtttacctacgttatgaaaactcgttgtgattggaccggggacagattgtggataattcacattcaatttgttaactgaatcatatgatcactttatttgtttctggtcttatgtaaaacagtaaaagtaaaaccaatcaatgagttcttcaaacaaaaagaaacaaaaaaacaatcattgaatatttaatctttcaatacttctattgagttaaaagactaggacatgaacacactaacactagatactataatattctattcccttgttttagtgctatttttaggaatttctcatatttataagcttctgtacttgttgtatttgtgtctataattttcgtgctttgttcatttcttattaatattttattattaaaaaaaaagattcaaagtttcaaagaagaattattattttttttggtcagaaagaatgttatgtgtttagtaaaaattctattcagaatattaaatagtaattttggacgtcaattggtatttgtaaatagatatatatacacattataaattaataaataaaatacactaattttagttttcttataaactaatagaaacaaagaaaaagccaaatatatagaaaattgacaacagaaaaaaaaagttacactaaagaattaaaagattactactactctattctcaaatttatagattgaaaacaattgatgatatttaaacatcaataattcaataagttttgactttgctggatctactatataattttcatttttcatagtaaaaaaaaaaagattagaaaattgtctaaattgaaactcaccaattaaagaaaacaatcaaacagagcatcatagtgtaaaacagagcgtagagtgatgtcaaaaacaagaagaaaaaaaacaacaatcgtcaaccatatccactaacgctgttgcctgttgctgcttaattaggaatgatcggccaattctttccacgaatataaggaattgaaggcaataaaagtgacggagttttacctttaggtaacgaagacactttatctcccaactcacttgccttaagaataataattacataattgtatcaactaaatatatacattatatatttataagtaaaaaagttctttgaaatatatttctaatattcttttacttaaatttgtatttatttttatttgaaatttagttccaatattttactgtatcaaaaaattttggtgttgtttctgtacatgatactatcttttacttgtaactgattctagaaagatattttctataataaataaattgtatatttttttaaaaaagttattaaaataggaaattctctctataaattaatatttattaattcatcgataagttaaaacctctgtaagttaataatattttgtagtcccaacattattaatttatagaggttttagtgtaataagtttctaatttaccttcttctatcatgtgatctggctaaacactgattatattctttaatcaaattcgaatagaaaacattcattgtttaatcattgagacaaaattttcaattaatgtatgttatgttagaaaacaatgtggatattttgctataatttatgtgtcacaaatttagcaatggtttggtctacctacgttaagaaaacttgttgtgatttggactggggacaggttgaagggttttaaatgtgcttttactaatggactcaatttgagcccatttcagtttctagcacatgcttagcacatggtccttctcaccaaaaagtaattcacatgatttatatattcaaaagtaaattttatttttaaatacataaattttatcttttcttatagatatttgatatttttacataggatccagcgatttagcggacaagaaaattaatgtcatgcagactaccagttttttttaagtgtcaggctatttaaccatataagaataaaaatatatattttaaacaaaaagaaaaaatatatattaattcgcaatacgtaagtataggttacatcaagtattcaatattgtgacccaaaaaaaagtcaattattatcacccctgagtccaaagtccatattcacattttgggatttgttcccacttttgtatacactgtattttagatcaaagaccttggtcaaagaatcagattttcatttactagtagtattattttttgataaaaagctactttaccaatcgattaattacatttctttcatagttatactatgatcattgtattatatgaaatgtctatctacaaatgtcctaattatttgtcagtttatatcgcactattaacttgacatgactttcacttttttactaaacccattagtcaaaaagtggtggagtcaaaagtcgttgatcgttgacttgggatacatgggggagaaagtgttaagtgcccaaacaaaaagacagcgactcattagagaattacgtgttataaattaaacttttttggtattacaattcttaagtcttgcagtatttgataatttgggtaattaatcgagtctccaagcaaaatacatatataaccataaacttgaatatacttgcagcactacatatgagtgggatacaagcaatatattttttcattattcaacacattcgtcaaagtcgagttaatacgggccatgtgagtatctccacaatactcaagttactgttaagtgcataatcatcactaagtatagtttacaaacatacaattaacacattgaagtaatctgtatatatatatatatatagtgtttacaaacatacaattagtcatattattaacgaacttgcaactagtcagttattaataaacgtataattattaaattacgcgaggatacaaatagatttattcgtatttactaagcacatgagcaaaaacaatgaaagcgcgttgagaaagaacagaaaagaaagcaaaaaaaaagtgtcgtttttggtcctccatgtgagtgatctgtgatctcaactttctcacttttgcattaaattcttatcctttttctttatttcctttttcatgtttgtatttatttaatttacgagtagtttgcattatcatacattcatactatagattcgctaaacacgtaaaaatagagacaaattattagtattaaacagaagtgacaaataccattttagatgattagatcattcgattgaatagactcccattttaacgaggtcgttatcggatcaatgtacttattcaatatggtagctgcacatacaaaactagatacaatattaatctagaaatcaaactaaatatatagttgtaatattttaagtggaaagatagccttttgtctctcgacaatgggatcaccattaaaccaaatcagatagaagttgtgggagtagttatgcttaaattccttttgttttttcacataataatagcgtatgaaaatttagttacacatacacaaaaatgtctcttctatatttatttataagaaaacgacttttctaattttagatctcgcaaatgattgctattgtttttttactactactcacgtacaatgaaactttccaacaattcattttttttttacttatcacctaccaaatacaaacaatcacataaatacaaaaaaatgcagaatcatataaaaaattagacaagtagcagagaatctgcaacatgacggtgcggttaaacagtagtaagtacattgatattatcaaagggactgaattagtaaattctctggtctccatcttctctcttatcgttcacacacacacaaacactcatatataaacacatatgcacactgtcactaatgcttctctctctctctctttctcttttcctatatattgacaagctt

SEQ ID NO: 690 - DNA, 118267 bp, Arabidopsis thaliana
aagcttcgccaaactcgaatgcacactcgacaaatccgaaaccaacagtgaaccgcctttttcttcccccaacatctccatatccaaggaaaaccccttgattgacccgctaagttcatcagacggcagtgttttgatccctgcagaccagtcccgacacagcacgaatatcggtggagccaggacacgacgtggggaccatggtcttcggtttcttgtagaacgttcttgagggagcaagacacagttgtgaagccaaccattcagagcttccacataagaagccatactgtgaaccaaatctacaaagcttagaccaaaacactctgtttcttctagaagctccgccaaaatccgcctcttaaggacactttcgtgtgctgttttggaggaatgtcgacaatggtaagccaatgaaatggtaatgtactgtgtatgatgacattcaagcatcgctttccacattcttatcaacctaaagagaaaagtaaggatcaaccaacgagtctatatccaaaagttaataagacatttggttactatatacccttgaagaaactctaagagctgtgggtggagctcatcgtctctgattctctcaatccgctttgaaatcgattcaacagattgaatcgcgactctgattcttgaatgaagatctttagcagctgctcttgttttatccatcgatttagcactgtgatcctttgcgaattggttccttagctgctcgcattttcgatcatactctttcctaatcatctcactcgcctgcataaaaagaaaaacaaatgagatgtgaggaagcacaacaccaacacagccatagagtcatgatttttttaccttgacttcatcatagagttttctctcccaagcgtataaccgatcaagcgaagaagagtgacttcctgagatcatacaaaactcttcgatgaaatcacttccactttcatcatcgtgatcttcttttgatgtctggatcaacggatttctagaagtggaggatcttgacgacgatgttctcttccacacaatgactttagtaacttgatgactcaatggctctacattaaagtttaactcagaacactaaaaccaaaaatagcaaagacacaggtaaatgataaatctttaccttgagaaactggtgaataacttttccctctacaacaagctcgcttcaaagctgcaagaaacgctattgaatttccctttcctggttaacaaaacaaacactcacgaatcaacaacaggtttcaacagccatttacacaatgaaaacagaactcatacctgtcatatcggcgaatccgactctgattttgttaacttcaagcattcttgaaacttctcttccagattcagaagctctaaagaacttatgttctatatctttcatactcgacacaaagtctttggctctatgtgtgataaactccgatggatcttctctttcatcattatcttcacaactctgtttcctctgctttgttttaaaactcgagtcttgcaatgtctctgaaccagattttgctacattcccttgactagtaatcttctctaatcctataactgctgcatcacattcactatcaatctcggtttgttcacttagccctacaaatctaaagctatcaaaatcgtcacaagtgtcgaaatagtcccaagaagacgtctctggccggcgaggacgcggcggaggaggaggagaaaacgccggcattgtcacttccagatcgtcatcaccgtcgctcagagggttaatagtgaaagtcacagtagaactagccgtctccgtcttcatgtaacttagattgaaaaggggtttagggttagggtttggattcgagttatgactcagtggcgagtcaaccgaatcgtcagggtaagaggagttatgagaaggagatttctcaggctcagtggcggttaacgacggagatgattcatgagcagtctccgcctccgcgtattgacgaagacaagctccgatgttacggagtgaacggatgtaagacacgtgtgcagcggctaaagcacatctggaatccatagcttgtttgacaaatctcttcctttctttgcatagatgaagcggctcgttcttcttattcatcgatgctttcgagtttgaacatcccattttctccaatatcgaatgacccattgagaaaaacttaataaaaatcgaaactttggatttgttctaccctgaaatctctcacggtggttacaaaacagaacaaactaaagaactcatttcgaaaaaaaagaaaatgacaagtctttggggttttgttttgttttcctttaatggcgtttgtgagaattaagaagaacagagtgagaagtagctatcaccatgcggaaaggagagtagttggggaatttatatataaggaagaatccaaaatacttattcaatgagagaaacctgaaaaaggagctttgatcagacaaatcttgaacaaaatggtctgagagagagagagagagagagagggtgtggagaagttttgtcttggttgcatcgttttacgagaagaagataaaacattagtaaaggaaaaaaaagtgcagagattttagttcattccaaaacagatcatttacttcaaaagctgagctagaaaataaaaagttaaagcagtgagaaaatcctagcagcaacaatttcagattctctctctctagatgctacaaaatctgtagttatggtctttactctttattgaatatgaacatgaaagctacacactttgaatatttttgttttcttctcatttattaacttcggtaattggattacagtacgattctacgagagttatgtgaaacctagttactctttttttttcggttatggttgtgaatggaccgattgagctggggaaagagagggagggaaaaccaagtcaaaagcttaacgtatatattcctgcttttatttagttttgtgattttcgatttacattattaaatcttccatagtcatctctactaaagattggattcaaaattttataatttaggttcaaaaaaattaaaaaaagtctacggcaaaaagaaacgcttattaaaaataattcggtttaagtttaggttaagctactttaacgtaattgggccacctaagggagggaactcttttgtatggagaatcgtgtaattgtctttgggtttgagcaaatcactcttgtttagtttcgagggtctctctaacgactccttgaaacgtgggctttatttagcctctctacatattaaaattaaaatatctcgactttataactttcatttagaatgtgacaagggacaagaaagaatggaggttaacatttcttaaaagtgagatatgggctgttgcatattgtaagatggtatggagagtaatatagtataatagtgtctatcaaaagtttaaaactttgaaacagtgaatgacactattcccttttcctaggcccaaatcctaccatgacaataactgtctcaaagttctaccaagtactactataactgaaaatagtggcagtaacagtaaaggtctaaaggacacttaatgagtacgatactgttataatccctacgatacatttttagtaattgaagcaatcttgcaagccttgacttttcgtacgaatgcctcttaaagacccacccacaccccccagtatgttactttttcattataatgtcgacactattatttttgggaaatgttgctctacatgatttttatgaattgaatcatatgaacactcaaatacaaaggtttaggcattcttttgaagatcatatataaaaaattccttactccttgtaccatatctaggagatatcattttataaaatgaatagaaatggtaaaatccatatttaaaaaaattaataaatcacttctcgtcgaaaataaaatatagctacggagggatgtttggtgtccacagaccaaatatctgaaattattggcctacctataaagacctgacgaataataattgtatctttaatcatatcatataaaatttaagcattacaagtaaatacgtaggcacgaattaaataatcaatacaccatatgattgcgtctatatttaaactgattggcatcgtaacacacaattcccctctccaagcaacaatctaaattttatagagaaaaataaaaaagtttttctttttctttatagaaacaataatatgttgttagggaatcgaccacggcctcaaatgcagagaacagcaagcataacgaggatcactatcgaagttgatggtgatcagaccgccggccaagactctgacgtgtctatgacggtggttgacggcggagaaaattacgcccagcggttcttgtcgccggtaaatcaccagaggaacgagagaaaatacggtgggagatcctcaccgtcgtcttttcttgtaaactgtggcttttgcaaacgcggtcttgctccgggtcgtgatatttacatgtacaagtatgtttacatatactaactactcttttcttaattatttttcatttttacaagtcttcagttttaagatctcaatttataatagtttaaaataatttttctttttaaatttgaacaagttatttgttttatataatacattcaaaattgaaagcgttttttttttataaatataatcaagggaactaagctacaaccaagttatgaaatttatttttaacaccatatctttccaatggtagggattcaatgatttattcctcgttttctaatgtatcacaaagtagtattgatatatttctttgtaacgtgaataaattgtagaggggacgcagcgttttgtagcatagaatgcagagaacagcaaatggagcacgacgaggggaaaacaagaaaccgcgtcgtactatcaccttcaaaataaaaatacgcatggctcaaatttactattactcttaagtttgtgtgtgttttaactagagattgttgttgttaatcattaattagtgtcatcatgtaaaattaatcctcagaaaaaaatgaaatgaatctatctttcatgtcctgcctattattttagtttcacacttccttgtctcttttataaactgggtttatttagtttgaagatatgctttttaattacaacttttttttttgtaatattaaaacatttagctaaaagaagttaaagaacgagtaatttatgcatacgtgatacgttactttaagagctagtgaaggttgaagtaagcacaccatgaatctcgttttaatagtatgactttgttagcaaatagatcccaacaccatatgcaactcacggtaattaagataataattaataaaagtatttattttgatttaaagtcacatcattttgcataatcttataactagtagtacatgaatagtaacagatataatatttttggccagaaaatcattggtggaaatttagaaaaaagcgttaaatgaaggatttaaaaatggaggtcactgtctcgtgacgacgaaagcgtccggcgattagtaatgggatgaagaggtgtagagtaaattaatgcgaacactcgtcataccgatcaaagcttagtgatgacctaataaccatttgttattttactaatcaaaaagatgtaataagaaaatattcatacatactgaaatggtgtgtgtatggttttaacctgtcgtatcaaagttgatacttattacgatttttttttttttgaaatatttcatttatacatatatttaaagctttagtcttgtaaaagacgtatacatgctgtaaaatagttttctacatgctgtgaaaaggttaaaagtttatagatgttacatttctttctttgtttttcggattagatatgttttatccatctttcttccatcataattttgttttagtgtataagaatttgtccatggtaacactcatctgaactaacaatttctaaacgctatctattagtacttggaaagtatgaactcttgttctctatcatttgaaatcacatcagttttttgcttcagtataaatgtgttttgacatttttcacacgattttttttttaataaaaactatatgcatggaccgttatggttttacaaattaagtatttttataaaattatttttatttactacattaaaaatttattttgattataaaattttaatacaatttttaagaacacaaaaatgcttctataacgatacttaaattaaagtacatatgtctcgttgctcaataattgaagatttgtatattaatggtttatggaaatggatagttatcagtagcttatagataggattaggtttataattagtctatggattatttatatataatttgtttttttcttcactcgttttctgaactccaaacttcgaggcttagttgttggagtttccggagtcatcatattttgtcttcactactaattattgattacttaattatcaataaatatataattcaagggaaataagcagattcatttggtatctttaattaaattaatcctcccacatatataattaatttgaattatttggaccatcaatctcatatttttatgaataaactcatttgaggtcattgatgatgccatggtaatattttaaacttcttttcgatggtttttgaatgaagaatcggtccatacacattttatttattcctccaaattatattatatttaaaatagaattgttatgaaaacgaccattacgttataatttttttgcttgccatcttctactaaactagattgaaatttctcaactgtgataaaaaaatagcagggaacacaaatcaaaaatttgaatgagcaagttttcagtcaaaacctacaacaatttacaccacaacgtctaactaattgtggtatgagcaaatttggtgacaaaagctgtccatacacttgtagatcaattgctgaaccaaaaccatgattatatatctcaaaagataagctgttttacaaacatatgaaacaaaatcataagagatattgaaattatggtccaacctagacacacttgcaaaatataccaacccatccggattactacaaatacaagttacttcacaccctacagagaccaaactaaaagctctttggtctctcagaaacacaagctttcataatttaaaaacattatataaaaaccaaacaacgacacaaattaaagactcttaaattatgagctaattaaaggtcttagattcatgcttcttcatgttcacttgaattccatgatcatgttgttctccggagccagtccaacgcacgccctcataatattctccagcatagcccgctgcttcgacagtgcgttaatcaccggagttcccggcggtacaagtggtgccttggtgaggtagctgagtatggtggccacaggatggaaagagtgaaactttccctgccaaaaagatgtttcaaaacatcaaaaccgcggttcagtgaaaacagagaacccaaaataacatgtactgtgaactgacgaacctctccctcggatttgaactggatcctggtgctgagctccgcgaggagaacaagatccaagatgattggagcagctaagagagagtcctcgcaggtattgtgcatcacaattgtgttcttccctcccatgaatatctctgatgtgtactcgtccatggctcgcttactatccgcaacatacggtacatactacaaaacaaacacacaaattggatcaatgggatctcagattgccaacagaaacaggttttgagtgtctgtccggttctctatttaccttgatgacaacaacatggtccgggtgttccccaggctcaaagaggataccattgctagcaaccatatcgtccacgacattgcttttggagatctccttagatctgaaagtctgtggagctgagagattcattccatcgttgtttcccaagtgattgtagctcacaattgaagtaggctataaacaaaaacacacaatcaatgaaaccaaagtcttgtgacaaatattttcagtaacaagaaagagtaacttgatacgcaagttaaacaaaccttgattcctgcgccaactaggaaatcaaccaagacagatttcatcttggtttgaccactcttgaaatcatctccaccgatcaaaacattgttcctgatcgccatatcaattagacctacaacaaacccccaagaaaatcagtcatgatttccaatattgattgatcaatgagtgattaaaactcaactacatgaaacctggaacaaaggtgttttgagggcttccattgatgaacgggattccctcaagaacacaagcaatcgcataaagtgttgaaggagagatctcagcctcatccctatccacagactccatgagattctccattgtatcgttcatcccaacgaccacattgctataacgctctgtgttagccgtccagagaaccacaaccttatccaccttattcttctccttaaactccctaagattcaacatcacactcgatcacatcaataatcagacgagattcgattcaaccaataagaataatcactagaacagagagtaacctcatgtccttgatgatgtggtcgacttgttccttcttggtacctttgatcacgtggttagcacgtgacccttgattagcagctatgaaatcaggatcgaagatcccagggagtggcacaatgttctccatgtaaggcctgagctgtttctgcaagtcgatatcaagaaccctggctctagccatggcatctgctaagttcatgtcacttatatcccatcctccaaacacaacatcatccggattcacctgtttttatttccacacaacgatcccaaaattaaaacacactttaagaagaaaacctgtctcaaaaatttgtttaaaagctagctaatcaccaaccattggaaggagactcttgaaaggagcatagatctcttcaccgttaaaagatccgacacgaatcgatgaagcttgagttagtgacccgaagtaattcgcttgttgcactttgtccttcgttgcccacgagattcctctgttttatttatccaattttccgattacaaaaagacaaaattatcaaattttaatatcaaggacttgatcaaaaagactcactctttgttcgcaatcacaccagcggtgagagttgatccattgtttcctcccaaacccacaagcataaccctttacgacaaaatcaaaattgattcatcaacgacggagaaatcgaggaattatgaaactttggaaaagagtggtttttaccctaatttggggacacgaatatcggttttgaaatcgtatttgacagtctttggcttcacaatccattggtaagtgccattgacggtcttctcatgaacaacctccgtcgtctcgtaatcgtacacagagtgaatctcattctctgtgtacttcacgttcgggctctcaactttgaagctctcaataaacatttttgcagaggaaaaggaaaatttggttgtctttctcggaatttggatcggttttggggtgtgagttttgtgcttctaatcagcggagacgtgcaagtttatatagacgagacagcaagggagatagagacaccgtggcgtcacttcactggttgatggtccctatttgtccaatgcatgtgagctagtgatgcttctggttcatagtgagccacacgtgtggggtctcacacgtgagggaggagcggaaaattaaaaatagtaattgacacgtcagatatctggtccatacacgtggcgtcgctttgttatgatgatagcaaagtctggtttggtttttttgtttcatgggtcccacatttttgtggggaacgttagttagttccgttaatttggtggaaaacgacagtgtttcgtcaacatgggaccttttgttccgttacagttactaaaaagatagtgttttgtcagttacgaaggaaagagagtgcacaacacgaaccacgtttagctgtcaattggtcgccgtaggaatcacgtgtagcgtttggcgcgtgagatagttaatatcggtgttaacggtcgtttggaacaaaagtgcgaccgtttaaagacttttttgtcgccgtttaaaagtgggtcctatggaatcttgttgactgggtttgacacgtgaattacctttttttaattacgattttttatgttattaattgatacttgcactaattaattggtcaaaatgccgatgatttcaaggtacctatgttttttttttttttaaagatttgtgttttaaatatatttttacacatatctaagaaatttaaaataccttaaatataatattaattcatacttgtgatttcacatttgagtaatgtatcataaccagacattgataactatgaatctatatgaaacaaaaagatttagtctagaacactgattatcattgtctgtaaaacatcttcacactttttctactgctctgtttcacgtgtttttcatgtcttagaaagacgttattctgaatatattatttaattgattatggtcgagcaatgtgtcataaggaaaatatcagttacattttactttcaaatttgaatattttaacacaaattgaaacatttgttaaaaatttaaattatttgttatagcttttccaagttacactagtttatatgatgcctaaaatatgtaatttgatttccttttgtaaccgggattctttcatttctatttcaataatgattagtcatttgaaaggtttagatggaaagaaaatccaactttttgcacatgccttgaaaattattctagacatcggtcttccaatgaatcatttcattagtggaccaatatgaactgatttgtaatacaatttcttttaaagatgttgcattatattcagatttgggtgtggcatgttaaaaaagatctcttattatctgttgaatttatatcattctctttttatctttgtgttgttaattatgatgatttgtaagttaaaggttaaacgtgtgatcttggctctcgtatcacctattcattgcagcaatgctaatttttgaaaaactacataaaaatatagtgctcttgctctagtcgacataagaagtttcaaaaactgaatccaaaaactaattatggaggatgaaaaaaaaaaaaaatggtttttggacacaccttggaaatggaatggctttgaaaaagtttgataggcatggttgtggccatacgtacgtttgtgtattgataatttgtttccctttgtaaactctttgtctgtgttcctccacgccacatacttctctttgtttcacattcattttttttcactcaaaaatcattttgtataaagggtgatgttgatgtgctggaagtttctcgtacgcttgattatgtccaactattttgtttcgaattatttaattttaagtaaatgaaaagactactatccaaaataaaattcacaaacgaataatagataatacgacaaacaaaacatattaagcagtaaatatatatatatacatatatattttgtcttaattataacagttgtattaaaatatataatttaattgcaactatgtagatatttttttttcttcttcccaataacgtagatatattttatttgtttcgtttcatatttgtttttgacaaactttgtttcgtttcacattaataaagtaatcaattatttttgtcaattgggaacagtttatccattgtttcgtttcacattaataacagataaactgtttccaatttaaacagaataagaattaaatatttgatcagaaacttatccaaaattaaattaaaaacaactgattataagttggacaaacttttacgttgaaatatttaattataaaataagatcaagagcttatccaaaactaaatagaaatgaataaatacgacaaaaatattaaaaactattacgttgaaatattaataagtcgtagataatacgacaaaagaaaatatatttaaagatgacaaacaataccaatgtgatgtattcataaaagtttgaggtaaaaatcagataaaaagttgttagtgacaaaatataaacaatatcaattgaattatttggtaatagagtcaatgaaggtataaatattatatacaattaaattcattcttcaaactatttataaaaaaattaacatttaggagggatgcagtaatcatctaagcaaagaatgagaatgattgatcaagctttggagagtttgattgccttgagctttgcttaacagattcttcacattttgtgtcatctgtattaaacaaaaacatttaaaagaaagacaaaatttaacggcaatttaaattctttatgatttgaagagaggggaaaaaaacacaattaccttctcgagactacccttcgagtaaggcattgccctttgggctatttggtaattccttcgacttcttgtcataatcttagaagaagtgtgccattttccttccaaatgattgggaagtgtagattcctgtatatttaggtgatatataaacacatatacaaatgagttaatttgtatatttgaaataaaaatcttgaaagaaaaaaaagaattatgagtatacgacataccaagaaaagcactgttgcacaatgcttgaggacctctaaattcattcgaacatcatcgagactcctgcaattatatgacatatgtgcgttatttcaccttaaggaaaacgtaacagtaatagatacaaacatatatgattaggtacctgtgcttttgaactccaagaccaaaataggcagccaaacttgccatctacaaaatagtgcacaatgaccttcaatatataaattcctaagatttctaatgcttacaaagaatcttggataatggtaccttcatgttaccagctcttttgccaaacttgtcacttaataaccccaaagaatcaatgatccctgagggttcaggcgcagctttaccgatctcagcgaaagcttctttgatcctaacgcaatcaaatcttctaatgttatgacctgcccaaatcctaccgttcaacaaaccatggattttctcagccacgtcttcaaaacttggtgcgttcgtaaccttagccctggtgatcccatctgacctagacgaccttattgagaccaccgacaagtctttaggttgtataagcgttgtgaagctctctagctcctcgagtttttttggacatacgatgatcgccccaaactctagtatgtgaaaatgttgccctgctttgtttggtacgtttgtttctagatcgaagaagacgatttcgttgggaaatgtttggaccgccatatcagattttggtttatgttcggtttgttaatcctgtgagtaggtatgtgtatatattgtggatttggggtttgcgttttcttgtgataaaagttaagcgtagatttgtgttggagggttactgtggggattatttagcttcgcggagaaaattttgctctgtagggtaaagtaagaatctttactttgctttttccaaaccaataaaaaagggttgttatatgaaagaattcgttggtagattcatgttctacgagaattgattcctttgatattgtcataaagatatacaaggaatctgaaagctgaaagggaaaatttctctcaaaaactggtaatatcccaaattattgatccttatatgatcctctcaacgggaatattcaactcaaaatacatggctttaaatatttgatttacccaaaatctctgtgcataggaagagttgcaagaacacacattcttcattagtggttaacggcaaatgcaaaaaaacgttataagaagatgaatatgagaaaacgaatgcaggaagttaccaagtgtttgggggcaacaaaccatttgctagcttacacaacagaaaactacaacgaatttgaagccggtaattgcaacaacagagtctccagctgaggccaaacccaccaagatttgtttcatcattgaagacataaactctttgactaattacctttgtttggaatgaaaacctgcaattttgaatgctagatgatcaatttgcatacctccaatggaaattatatgaaaccaaaacagagaacaagaagtttagggcgctagagaatatcatctctcttatctacctaaccagattgtttcatattcttaagacttcacaatttatcgaagtcatcataacatcaccaatcagttcttagacatgccaaaacctaaaaaagggaaaaattcaagaatgaaacaagaacagagacaatacctcaaactctggtacaagatgaatcaaagtcatcaggagcaacacgtgcaatccaattgtttaacgtccgcttaacatcagtatgattaacataagccaactcatacatactacacaaattcaccaccaagctctcgttcaaagccgcggttggcactctctccaatgcactttccatcaccttaatcgcatccgatagatctctcaagtacatcaaacaaagagccttattgttgacagcgataatatcagagttatccctttcaatgcatttgtcatactctctcacagcagaaacatagtcctttgccacaacataaaccaaagccttattcctaccaacaagattgttgaactgtatctcgttcaataaaccattgctctttccttcattcaacatcttctcaactctatcaaacgtagttttagctccttctacatcaccaaactgcatctgaacagaccctagtttcgaaatcaaaaccgggtctaacggatcacgattgatcaattccttcatcaaatccaaagacaccccaaattccttgtgacctaaatgaaaccctagcaagcaattcatcacaaatgtctctcttttcttccacaattccacagaactctctaaactctgagattctttctctctgattcgatctcgaacaaagtcaagcaaaacatataaacgatctaacccttcctgacgattaccaagcttagtcgggatcaaagcgtagagccatcgtaaagagaaaggaaccatagatcctctccgattagggtaaatctcagggaacgattcgtacctgtaatgcgtcccgtcgaaatcgtgcaaggaattaagctcatgagaagcttcatcggagcgacgaagcttcgcgagagccataacttggtaagtgagataagtgagatgctcgtgaggctttgtgaggaggaagagagctctggcttgagatatcttctcgaggatcgcttgccatgagccacgggtcgaaagctcgtggagcgagccgagatcgtgtgttaattcgtcgagcgaattgaatcgttccggtggtagatcggcgacggatgtgacttgggatgaggctaattcgaatgccgtcggttcccctgcatcggttgactctgccatggcggtggaatcagtggaggagggattgaattcgggtcgggtttcggattcgggtaaatccggatccattgctggagatgactccgtgaacattgtggaagtaacctggtttggtctttggatttgggtcgtctttccaatagataccattacgctaaattcttctttttggcataaaaatttagattattttttattaaaaaaaaacatttgatatgattatgattttaggcggtttattaagatttttttataattagatcaaaaataattagatcaaatactaaaattggaggagaatccaaactttggatttcatatattttattttttaattcactagaaatgaaacaataattaaatccaaaattacaattaacttgtctcggatcgattgatcaatgttgattttttgtcttatgacttttcttcgtgtaacgaaaggagttacttaaatggtggagtaatggtaataaataccatgttataatattgttacatactgataatattattttccccatgttacatgttacatcattgatttttacgtagatatttaatataacgaccaaaaaaaattaagctctgacttggtccaagagattttttctcgattcttaccattgaccctgagctaagacttgaccaaattaaaagtctatgtggaatgtactgcaataagtaagtctttttaattaactaaagaatttcagacctaaccccatatttttttcggataaggggtatgaacatgtaaattattcaattttctattgtaggtatttaaattcgagatttttaaaaaatgaaatgagtgactaactagctagttcaaaccgtaaaacctattattcatttaatgatttgattaagtattttgttttaacaatagtttaggctttaaaaatcttacaatcaaacatcaaaatataatgtggttttactacggaaaaaggaaaagcagtgtagaagcatcgaacatacttgacttttatgacttacaaaacacatgaggtacacagaatcatatactacaattttactttgctaataaaagtcgatgtattattattagaaattatcactaaatcgtagaaaagtgaaacgcgttttctctccagtttttctccaaaagacaaatgagttatctgtaaacacatgacatgcaatgatctatcgttatgtatatatgaattgattaatctcgaactatatattgaaatctcagcttcttatcttctttgattcttggagacacgattggaaaaatgatgagaccgaagagatcatcagacacagtccatgtcttcaatcttatggtcctctgtttcattgccctgtttttttcttccgtcctctgtcagggaaagatccggagattcaaatgggaagtgaagtacgagttcaagtcaccggattgtttcgagaagctagtaatcacaatcaatggtaagtttccaggtcccaccattaaagctcaacaaggtgacaccatcgttgtcgagctcaagaatagcttcatgactgaaaatgtcgctgtccattggcatggaatccgacaggtacgtaaacatcctcgtaagcactcggtgaatgactgaaaaagattgatttatatatgtttcagattgggactccatggttcgatggagtagaaggtgttactcaatgtccaattcttcctggagaagtcttcatttaccaatttgtcgttgatagggtaaagagttataaaactcacattaaagtttcaatctttctttatgtttttatgttaagttttgaaatttgtttgtagcctggtacatacatgtatcattcacactatgggatgcagagagagtctggattaatcggaatgattcaagtttctcctccggccacagagcccgaaccgtttacatacgattatgaccggaactttttgttaactgattggtatcacaaaagtatgtcagagaaagccaccggtttagcatccatacccttcaagtgggtcggtgagccacaagtgagttcttttttccatcactcaaaagtcagattcttgtttgatcgatcaaattttatgtttatggatgattcttatttggatatattatcagtcgcttatgatacaaggaagaggaagattcaactgctcaaacaacctaaccactcctccaagcttagtgtctggagtatgtaacgtctcaaacgctgattgttcgcgttttattcttacggtgattcccggaaagacatacaggcttcgaataggtagcttgacggctctctctgctctcagtttccaaatcgaggtacttagcttgagaatcaagccaatcattttcattgtcttctctgtttctttctttttcgtattctaatggaagatgggttaaattaaacaacagggacataatttgacagttgttgaagcagacggacactacgtagaaccattcacggtgaagaatctctttgtatactccggcgaaacttattccgtacttctcaaggcagatcaaaaccctcgacgaaactattggatcacctcaagcatagttagccgtccggcgacaactccaccggcaaccgctgtactcaactactacccgaaccacccacgacggcgtcctcccacgtcggaatcatccaatatcgtaccggaatggaacgacacgcgctcccgtcttgcacaaagcctagcaatcaaggcgcgtcgaggattcattcacgcgctgccggagaattctgacaaagtcattgtgcttctgaatacacaaaacgaagtcaacggatacagacgttggtcggtcaacaacgtttcctatcaccaccctaaaacgccgtacctaatcgcgttaaagcaaaacctcacaaacgcgtttgactggcgtttcacggcaccggagaactacgattctcgaaattacgacatattcgcgaaaccccttaacgctaacgcgacgacgagcgatggaatctacagattgagattcaattcaaccgtggacgtgattttacaaaacgcgaatacaatgaacgcaaacaacagtgaaacgcacccgtggcatttacacggtcatgatttttgggtgcttgggtacggagaaggaaagtttaatgagtcggaggatccgaaaaggtataaccgggtcgacccgataaagaaaaacacggttgcggttcaaccgtttggctggacggcgttgcgttttagagcggataatcctggcgtttggtcgtttcactgccacattgaatcgcattttttcatgggaatggggattgtgttcgagtctgggattgataaggtttctagtttaccttcttctataatgggatgtggtcagactaaacgctgattatattgtttaatcaaattcgagtagaaaatattcattgtttaatcattgagacacctgttttttttttagccaatgagacacctgttttatttaatgtaagtaatgttagataacaaggtggatattttgctataatttatgtgtcacaaatttagcaatggtttggtttacctacgttatgaaaactcgttgtgattggaccggggacagattgtggataattcacattcaatttgttaactgaatcatatgatcactttatttgtttctggtcttatgtaaaacagtaaaagtaaaaccaatcaatgagttcttcaaacaaaaagaaacaaaaaaacaatcattgaatatttaatctttcaatacttctattgagttaaaagactaggacatgaacacactaacactagatactataatattctattcccttgttttagtgctatttttaggaatttctcatatttataagcttctgtacttgttgtatttgtgtctataattttcgtgctttgttcatttcttattaatattttattattaaaaaaaaagattcaaagtttcaaagaagaattattattttttttggtcagaaagaatgttatgtgtttagtaaaaattctattcagaatattaaatagtaattttggacgtcaattggtatttgtaaatagatatatatacacattataaattaataaataaaatacactaattttagttttcttataaactaatagaaacaaagaaaaagccaaatatatagaaaattgacaacagaaaaaaaaagttacactaaagaattaaaagattactactactctattctcaaatttatagattgaaaacaattgatgatatttaaacatcaataattcaataagttttgactttgctggatctactatataattttcatttttcatagtaaaaaaaaaaagattagaaaattgtctaaattgaaactcaccaattaaagaaaacaatcaaacagagcatcatagtgtaaaacagagcgtagagtgatgtcaaaaacaagaagaaaaaaaacaacaatcgtcaaccatatccactaacgctgttgcctgttgctgcttaattaggaatgatcggccaattctttccacgaatataaggaattgaaggcaataaaagtgacggagttttacctttaggtaacgaagacactttatctcccaactcacttgccttaagaataataattacataattgtatcaactaaatatatacattatatatttataagtaaaaaagttctttgaaatatatttctaatattcttttacttaaatttgtatttatttttatttgaaatttagttctaatattttactgtatcaaaaaattttggtgttgtttctgtacatgatactatcttttacttgtaactgattctagaaagatattttctataataaataaattgtatatttttttaaaaaagttattaaaataggaaattctctctataaattaatatttattaatttatcgataagttaaaacctctgtaagttaataatattttgtagtcccaacattattaatttatagaggttttagtgtaataagtttctaatttaccttcttctatcatgtgatctggctaaacactgattatattctttaatcaaattcgaatagaaaacattcattgtttaatcattgagacaaaattttcaattaatgtatgttatgttagaaaacaatgtggatattttgctataatttatgtgtcacaaatttagcaatggtttggtctacctacgttaagaaaacttgttgtgatttggactggggacaggttgaagggttttaaatgtgcttttactaatggactcaatttgagcccatttcagtttctagcacatgcttagcacatggtccttctcaccaaaaagtaattcacatgatttatatattcaaaagtaaattttatttttaaatacataaattttatcttttcttatagatatttgatatttttacataggatccagcgatttagcggacaagaaaattaatgtcatgcagactaccagttttttttaagtgtcaggctatttaaccatataagaataaaaatatatattttaaacaaaaagaaaaaatatatattaattcgcaatacgtaagtataggttacatcaagtattcaatattgtgacccaaaaaaaagtcaattattatcacccctgagtccaaagtccatattcacattttgggatttgttcccacttttgtatacactgtattttagatcaaagaccttggtcaaagaatcagattttcatttactagtagtattattttttgataaaaagctactttaccaatcgattaattacatttctttcatagttatactatgatcattgtattatatgaaatgtctatctacaaatgtcctaattatttgtcagtttatatcgcactattaacttgacatgactttcacttttttactaaacccattagtcaaaaagtggtggagtcaaaagtcgttgatcgttgacttgggatacatgggggagaaagtgttaagtgcccaaacaaaaagacagcgactcattagagaattacgtgttataaattaaacttttttggtattacaattcttaagtcttgcagtatttgataatttgggtaattaatcgagtctccaagcaaaatacatatataaccataaacttgaatatacttgcagcactacatatgagtgggatacaagcaatatattttttcattattcaacacattcgtcaaagtcgagttaatacgggccatgtgagtatctccacaatactcaagttactgttaagtgcataatcatcactaagtatagtttacaaacatacaattaacacattgaagtaatctgtatatatatatatatatagtgtttacaaacatacaattagtcatattattaacgaacttgcaactagtcagttattaataaacgtataattattaaattacgcgaggatacaaatagatttattcgtatttactaagcacatgagcaaaaacaatgaaagcgcgttgagaaagaacagaaaagaaagcaaaaaaaaagtgtcgtttttggtcctccatgtgagtgatctgtgatctcaactttctcacttttgcattaaattcttatcctttttctttatttcctttttcatgtttgtatttatttaatttacgagtagtttgcattatcatacattcatactatagattcgctaaacacgtaaaaatagagacaaattattagtattaaacagaagtgacaaataccattttagatgattagatcattcgattgaatagactcccattttaacgaggtcgttatcggatcaatgtacttattcaatatggtagctgcacatacaaaactagatacaatattaatctagaaatcaaactaaatatatagttgtaatattttaagtggaaagatagccttttgtctctcgacaatgggatcaccattaaaccaaatcagatagaagttgtgggagtagttatgcttaaattccttttgttttttcacataataatagcgtatgaaaatttagttacacatacacaaaaatgtctcttctatatttatttataagaaaacgacttttctaattttagatctcgcaaatgattgctattgtttttttactactactcacgtacaatgaaactttccaacaattcattttttttttacttatcacctaccaaatacaaacaatcacataaatacaaaaaaatgcagaatcatataaaaaattagacaagtagcagagaatctgcaacatgacggtgcggttaaacagtagtaagtacattgatattatcaaagggactgaattagtaaattctctggtctccatcttctctcttatcgttcacacacacacaaacactcatatataaacacatatgcacactgtcactaatgcttctctctctctctctttctcttttcctatatattgacaagcttgcgatctctgttcgctagatctgtctgaaacagtgaggggattcctaggtttcagagcaaagtaatgtctccactcaagtacttgtgttttagaaaggtactcttgttgttgctctattccagtctcttcctattctcttcttcttctttctttgcctcatcagttgatgatcatgagctacaacgaatagatcctcatttccgagtgagaagattgttggtgaaagatctggattcaactggtgatgatgatgaaaccaatcttcctcctcctcctaagaagaagaagcttcttactgattctgtttcatcatcatcatcatcatctggtactaagaagaatcaaaccaagctccttaaacccatctcttcttcttcttccaccaagaaccaaactaaactcgccaagaccaccaccatgggtacgtctcacaaacttaactccacaaaatcttcttctaacacaaccaagaccagctctgagctcaagaagctcaattccggaacaaaatccacaaattctacttcttcgatcaagaaatcagcagatctgtccaaatcaagctcatccaaaaacaaaaccaccataaaacccccaagttccaaactttcttcacctccatcagagaagaaatcacaaccctcctcaaaaccagtgaccaaatcgaaacaatccgagaaagaaatcaaaccattctggctagacgacgaagaagacgaagatttcgtaagcgaattcagagatctaccaacaagattccaaagatccctaatcccagacctagagcgaatctcaacaacatccaaaaactacatcaacaaagccaacaaacagatcaccaaaaacttcaaaccctatttcggcaacaaatacgcaccaaccatagcttccgtagtctctttcgtcttcatcctcgtccctctactcttagtctcactcattttcaacagattcaaagcttatttctcactccagaagatcctaatcttcatccaaatctacctctcgatctacttctcaatcctatgcctctcatcgctcgtcaccggaatcgaaccactcaagtttctctacgcaacatcgagctcaacatacgtttgcttgcagatcctgcaaaccctaggctacgtcttctacctcttgcttcttctcatgtacctcgttctcgtcttctccacggattgtggtttgggccttaaggtattgggcttggcgcagacctttgtgggctttgctgtaggtctgcattattacgtggcggtgtttcatagggtggtgcttcgtcagcctccgaagacgaactggaagatacacggtgtgtatgccacgtgtttccttttgatttgtctgttatctaatgctgagaggaggaagaaagagtacttggaagaaggcggtgacgaagggaagaaaaattgaaattttctttattttattcttctctatctttgtatttttatattttaaattttgaaaaattcggcaaaattttagctgagaaatgcaatagaaagaacaattactggtggatggttggaaactttttttaaaaacttcaattgtatttataataaatcgataaatgtggaataaaatttcataatctcattataattgtctcttttttttctttgtaaaaattacaaatatgttgtgaaatgtggacggcgagaagaatgaattaattaaatgtttttcttgataaccgcgaaaattaaatgtttctgtttgaaataaaaaaaatatgagaagtcaaaaattaaataaggtggggtctacggaatcgtagagtcgacgactttcgtgaggatggggcatttcggtcattgaaggagttaccgacggaactgggtgctgtagtgttttattgacttgtgtcggtggattggcgattgagtgtggggcgtatggtgagaaaaatggggcttttgtgtcctaacgtgttgttgtatgggccactcatttctcaaggcccatcacctcacctcatattgtgccggaatgttgttttaactttatgacgtgacgtgtgtattatgaaactgaaaatagagttcctccaactttgaatctattttacaattttattattattttttttttttgtcaaatcatagaaattacatgcacaactatcacgacgatagaaatttataagcacaattagccaaataaaaaaatcgaggaaaaagtttctaaatgtaggcaatgcccaaatgtcataaatagcctacttattttgtcaatcttgtcacttagaaactcggcacttgtataaaaacgtttcattcaacttttggtatcacatgtacattattcaattgtgaattcctaaatttattgtgtgctgtgataattcaccagatcaaccagtttaaagacccgtgaacaaaaatgcccataacatttttttgtattgggtttcaatcaagttaaggcccattttggtttagtatacggattgtgttgggcgaaaggagtgatgtaatatgtacttatcagaaacaaagtaggaagacatcacagtatcacaacattgatttgtgtgcttcaatcatgcggtgtacaatttgcacttttcccacttcacaaaattcacaccttaaatatcaatttgtgaaaagtattgacttttaactttaccaaattaaactcttttagtgaacaatctttaacaaccattttatttcacatatctgatgactcaataattcgtgcaaatttcaaatgtccttgtatattatcgtgtttgaatttcaactttttttccaaacatgaaataacaatccatgattttattgctaatatgtctatcatatatttaagtttacagaccaatcacaatttcctcaattagaaaaaacaaacttaccaatggaaggatagcagtgtatgtccataggactcgacacttctatacatagtactatttgtattcaaattatacataaaggaaataaatctgtctatacatggttttagtaccaagttttttaataagaaaaaagaaacaattgatagtttgatacattaccaactaggctaagatattttatttatttttacagtacagcgttaacattttttttaacgagaatgaaacggtggctagagttacctgagtaaaaaatctaaaaaataaggtaaaaatatctgatagcattcgtaacgaaatcaattagtactagacaagaagatggtataaaaatagaagaaaagtaaaaaatggcacgagtgaatatgttcgcacgtgtaaaataagcgtcatcatcttctcctcttcccaagtttcggctctcactttctctcgttctctctctctctctctatctctatctctcgatttgggggagttccgtcacggtggactagtacgtctcgttgccgttggtggcgtagtcggaattaatttcctcggcgttgagattcacatggtctagaattctagctaagtggttgttgttgttgttacgatttccgatttctcgagttttttttttatatttagcttctgtttcgtttatccctcccggagacactccttggtcgaatctctcatgctgaggtaattcgtcatggatttgtttaattgcataagcttttttgcaattgtctaagcttttatcggtttgttttgttttttgatttacgaatctagattttgcgctttcttatgtatgtaatcaggatcaaatttgctgggttgttaaacaatttttgtctgtgttaggattctaattacgcgtgttactatacatgaatcattttcattgtttttcttcttgatccaaaagtgtgagaatcttactttaggcgtaattcacattttttgcattaatttcaacggttacacgttttttttctttgctttagatttgttataatttggttgttctaatattcataaccttggagttttggtattacttcaggtgttttggacacttgttgtcaagaagaaaccagttttggttctgattaatcgttggttggaaaatatactcaattccaggccatgccttcacttcaactattgcagttaactgagcggggtcggggtcttgtagcgtcaagacggtaaccatttccttgctcttcattgtattctagatggaagttttttttgttcgtttgggctcagatttcatctttctctgtttcattctttaggaaatctatactgcttgcggctgggattgtagctgctggtggaactgctgtttacctgaaatcaagggtcgcttcccggaggcctgattcttcgcgtctttgcaatggtcagagtgatgatgatgagactttggaaaagctgactgcaactgatcaaaatgcaaagataaccacgaaaaagaagaaaggaggaggattgaagtctcttcaggttctgactgctattcttctctctcagatgggaaaaatgggtgccagggatcttttggcactagtcgccaccgtggtatgcatttcctcttaattaataagtttttacttttgttttatgtttttgcccaagtcagatagattttctgtctggttgtttaagtttgatctcgtgctgttgcaaagtcctgtagatattcatggaaattcacaattgcgaaccgttgctttattgttatggaataccgggtgtctctctttttagctgaaagaaacaccaatctaactttacggccaatagtcgggaaaagtctggttacttctcttacttatgcgggactagtactctttccaatctgttattctataacttgtaggttttcagaacagctttgagcaatagattggcaaaagtgcaaggtttccttttccgtgctgctttcttaaggcgtgcgccactgtttctacggctcatctccgagaatattatgttgtgtttcatgctatcaacattgcactctacttcaaagtacataactggggcattgagtttgcgattcagaaagatattgaccaagattatccattcacactattttgaggtagcaactgccatctcttctgccattcaattgtttactatttctttagatacgagtgtttttgactagtgagagtatcgagtatacttcagactgctggatatctcttcactcagttttaattgttgttttcagaatatggtatattacaaaatatcacacgtggatggtcggattacgcaccctgaacaaagaattgccagcgatgtaccaagattctcctcagagttgagcgatcttatactggatgatttgacggcggttactgatggaattttgtatgcatggcgcctgtgttcatatgctagtccaaaatacatcttctggatactggtgattcatgtttaatcttctatacttcaagattgaccttatgttgggccatttatgctgcttttccttgtatccgttcacagtacaattctttcggtctggtatctataaactaacctatacaattgttgtgtaggcctatgtactgggggctgggacggcgataagaaacttttctccttcttttgggaaattgatgtccaaggaacagcagttagaaggagagtaccggcaacttcattcacgcttaaggactcattcggaaagcatagcattctatggtggggaaaccagggaagaatctcatatacaacaaaagttcaagaatcttgttagccatatgagtcacgtgcttcatgatcactggtggtttggtatgatccaagattttctgctgaagtatcttggggccacagttgcagttattctgattatcgaaccattcttctctgggcatctaagacctgacgactcgaccttaggaagagctgagatgcttagcaatataagatatcacactagtgtcattatatctctctttcaggcgttgggaacactttctataagttccaggcggctcaaccgactcaggtaatgctttatgttggatctcatgtcagacgcttaaatggtgaatactgtttagctgtttctaattattggaatgttgttgcttccggcagtggttatgctgaccgaatccatgagttgatggctgtctcaagagaactcagtggtgatgataaatcgtctttccagagaaatagaagcagaaattatctaagtgaagctaattatgtagagttttccgatgtcaaggtagttggaatagattcatgttactgtaatcctttccaaaatgtcgtgttcttaatgtttcttaacacactctaggttgttactccaaccggaaatgttttggtggaggatctcacccttcgagttgagcaagggtctaatcttctgattacaggtgaacgctttatatctagaacataatatgactatcaatttcccttttcattgctttttttttttgcacagtaaagcgtataccactactgtttagttctatggtccttgagatgagtagcaaagatgaaaatctcagtaccccttgttgtccttatgaagtgcaaaaaaatgggaatgtgaatttgaaatactattctgaaagaattaattcttcttgtattctggaagggatagcactataaacttgtcaaaattagatttggtatgcctagttattgacgaaccattcatatccagctcaacgactagggtgttagtggaatgctggcaacacatcatcttctggggttgatttactggactatttttggctttctgggttttcattttatgttatattgattaagcaataacatctagattcgaaattttgatttctgcttacctgatatatcattatttgctcaacaatatgtatcgtaggtcctaatggaagtggcaagagttcccttttccgagtattaggaggtctatggcccctggtgtctggacatattgtgaagccaggagttggttctgatcttaacaaggagatcttctatgtgccgcaacggccttatatggcagtaggaacacttcgtgaccagttaatatatcctcttacttctggccaagagagtgaactgctcactgagattggaatggtggagctattgaaaaatgtcagtatccttgtttctctattctatactaggatggtttaagttagtgttttgtatgttacgcttatttttgtggacttttgcttgtaggttgatctagaatatttattggatcgctaccaacctgaaaaagaggttaattggggtgatgaattatctcttggagagcaacagagattgggtatggccagactattctaccacaaacccaaatttgcaattctagatgaatgcacaagtgctgtcacaactgatatggaagaacgctttgccgctaaggttcgagctatgggaacttcttgcataacaatctcccatcgtccagcgcttgttgcattccatgatgttgttctgtcattagacggtgaaggaggatggagtgttcattacaagaggttgggattgtttcttagccatgtttgtgagaattattaaagtttatttttatttacttattaaaatgactaaaccttcagggatgactctgcccttctgacggatgctgaaattgattcagtgaaaagttcagatacagatcggcaaaatgatgcgatggttgttcaacgagcgtttgctgcagctagaaaggtctcagccgaagttttatttgtttattataattttcgttgacgatggttctaacctggttactcggtgctttgtaggaatctgctactaattcaaaggctcagtcgtaccagacacagttaattgcaagatcacctgttgtagataaaagtgtagtgttgcctcgttttcctcaacctcaaacatcccaaagggctttaccatcaagagtagctgcaatgttaaacgtgttggtgagcttgagttactagtgtgaattttattgtagatagctgtaccaatcattcttaacttagatatcaatacacatgctttttgcagctgcattcatatatccacctttttctcttccattctcctcagcttggcatttcagtgcatttctttagcttccttggaaaccccaccttttgttttgcatttccacttggctaacttattcgtcctgcgctgatgctaatattgatattatacttctcaaaataactgaccacttcattgttacatttcagatacccactatatttgacaagcaaggagctcaactgcttgctgttgcttgccttgtcgtctcaagaacgctgatctctgaccgaatagcctctttgaatggtaaacatactccatattgttacttgatcagttttattgatagggttccttttctaacaagcaaccatgatttttgcagggaccactgtgaagtatgtcttggagcaagataaggcagcctttgttcgtttgattggtttgagtgttctccaaagtggtgcatcttctataattgctccttcactaaggtaatctttcctttttatgcatttttagtgtttcgaagtcccacccgctatgatcaccttgtcacgacttactaaattgctcaatgaattatgttgttttcatttcttgcatgttgataaaaaagcaagttattgaactaatttaaagtagcttattagttatatttattaaacacctcgctaatatggtttcacataactctttttgttacactcttcaggcatttaacgcaaaggctagcgttagggtggaggattcgtttgactcaacatctgctaaggaactatttgagaaataatgcgttttacaaggtcaattcacgattatgcttttttcatgcattgtgaatgatgattatgaagcatgaacttgtgttattcagtgcaacttgacctaaaagaaagcatgatgcgttatttgcacttataagaaatatgcagagattctgaaagatccataccaatttaaatttatattgatttgtgattgttctatgcttctgtctgtttatatgtttcttgtaagttgatgtcgcatggctagagacactaaagatctcattgggttcatatctattcaggttttccacatgtcaggcaatagtattgatgcggaccagagactcactcgtgacctggaaaagttaaccgctgacttgtctggacttcttactggaatggtaaagccatcggttgacattctctggtacgtacgctatgttggattgatttctaatatttgtttcatggttcttggtttgaattatcataatgcaaaaaaaaaacaaattgaaggttcacctggaggatgaagttactgactggtcagaggggagttgccatactttacacatatatgttacttggtcttggttttctgagacgtgttgctcccgatttcggtgatctagccggtgaagaacagcagcttgaagggaagtttcggtaagttttttacgcttcttccagtttgcatatgatttgtgttatagcgactatcagaccaacttcttcctgcttatgtaggtttatgcacgagaggctgaacactcatgctgaatctattgcattctttggaggtggagctcgagaaaaggctgtaagtttcttaattgccctagctatagctgctggattttgggtagttatttttgaatcaaagctaccggaagtgaacttggaattgttttatcatttatgtgatgatggtcttttcatgtcaaatgtggcttcacttgtgtgagctttaacatgtctcataggtgaatctgctcttattttatttctctccatggagcagatggttgacaaaaaattcagggccctactggatcattctctcatgctcttgaggaagaaatggttgtatggcatacttgatgattttgtgacaaagcaacttcccaataatgtgacgtggggattgagtttattgtatgccctagaacacaagggagacagagcacttgtctccactcaaggtgaagatctgtcacacttcattgtagttaatcacttccttgattaacgtgagccagttaagtatttacatgtcctctacatgatgcttttgataccaggtgaattggcacatgcattgcggtatctagcttctgttgtctcccaaagctttatggcttttggcgatattcttgaactacacaagaagttcctggagctctctggtggtattaacagaatttttgagctcgatgagtttttggatgcttctcagtcaggtactacagcatatataggttcacactttggctaggcgatgcaaaatcttggtgctttatgtaacatatatgaagtcattattcagattgtgatcttttcatgaactctttccatcattacctaatgtctgtacttgagttgatcatattcgttatgtccaactattttaggtgttacctcagaaaatcaaacaagtcgtttggattctcaagatctactttccttttcggaggtggatatcattacccctgctcagaaattgatggctagcaagttgtcgtgtgaaatagtttcagggaaaagcctgctcgtcacaggttggtgaattaatctctgtcattgaatttattgcatgagccccaagctaacagtagcaacattttcaggtccaaatggtagtggaaagacttcagtatttagagtccttagagatatctggcccactgtatgtggaagacttaccaaaccatcattggatatcaaagaacttgggtcagggaatggcatgttttttgtcccgcagcgaccttatacatgtttagggacactgagagatcaaattatataccctctatctaaagaagaagcagagaaaagggcagcaaagttgtacaccagtggtaagtccaaaaattcacttacttcaaaaggtctagttggttctcaaatcacatgatctatctgttaccaccctaaaagaattgaagtacaagttaagatatttgatcttcctatctctcatatgtgtggaatattggtgtgagtaacaggagagagctcaacagaagctggaagcattctggattctcatttgaaaaccattctggagaatgttcggttagtttatctcttggaaagagacgtaggtggttgggatgctactaccaattgggaagacatattatctcttggagagcaacagagattaggcatggtaagtctcttgtagagcaacaccagacttatatagtttatgattcaggtgaataatctgacttggttcgtattgtaggcacgtttattctttcacaggccgaagtttggagtccttgatgaatgcacaaagtaaatgatcagtcttttcctgcagtatccctgtacttttacaatcatcttcccttgtaattataaatctgctctttgatttgcagtgcgacgagtgttgatgttgaggaacagctctatagagttgcacgagacatgggagtcactttcataacctcatcacaagtaagtttcttttccatacactctttagtcgttaccatgaaaccacatcagagctcttaacagaatctaatcaattttctcataaaccgcagcggccggctctgatcccattccattccttggagctaaggctgattgatggagaaggaaactgggagctccgttcgatcgaacagacaacagagtgaactcagcaaaacatttttagaaaggtctatatagttgttaaagaaaaaagtaataaagttaaagccattagacgatgcaagctatatggtatgtagtatatggattcttcctcgatcgcaaggagtggaagagaatgcgtcgatgctagtgcttttgttagaattggaggatttgatttgattctagatatatataaatgtaggcgattgaattggtggagcattttgagttctcctatggagtatggtcttagctttgaacaaacaaagaatatagtgatcactcaaataatgtacagttcgtttcaatttcctttgttgggattagtttttctatcttataattaaaagaatgaaattgaagtggttgaatctttgctcggttacttttgttgccgatatgtattcaaactgagtttggaatggttcaagagatttgtttaatatttggtatttgatttgaaattgaatggttaaaggaacttataactttaacactgtcgtgccagaaaaaaagcttggtaactgaaaattattactatatacaaaatgaattcacaactgattggctttaccttagagaaggaactagcttcccagagtaggtctattttgaaacaagaagaagatcgttttaagtgaagtatcaatgatttcaagtgtaatcagagtcgagagttccggttatgttgatgctacagcgatgctagtaccgagccttgttcactcttgtattggttaagatatagatttgaaagaaaaatcttacagcctatgtcaccgcaccataaactatttctctttttgtattttttgggtcaaaaccccaccacagactatcttcgataatacgtgcatgagccaatgggcttctttttttaaaatataaataaacaaaaaagaaatctttcaaatttgtgggtatgtgtagttgaagatgttacttgtgcatggcgacaattaaacttgagaaagatttattatttggtatttggaagagagttacagttttataacaagaattgggttagagaaactttggaaaaattcttaaaccctaaacccatggagctaataaaaatctttgtgacttgctttctcctcaagaaatataattgatgttattgtatgaaatgaatacaattaattattaataagattatcaactcccgtttttctcttattcttcttctagtgtcttctaaatacatttgaaatcgtaaataaaacaagtaaacaactcgttcccctagatatatacatacgcttaaaagtaaacgttgtatgcaacggtaactttcgtaatagtaatggggaatatgtaattattgtaatgtaacggtaatattttgttttatcaaaaaaaaggaaaataattaacccacacgactctttaaatacggcctttgcttcttcattaacagatcaaaattctcgtactcaagagagaaaaaaaaaccctagaatcgaatcctctctacaaaagtcctctttgtagaaaaacctatttctcaatcgatcagtggttcagagaatctcttacggttatggttctgttctaatttaatcgtcgtagctagtgcgaagatccggcgatgaagacttgcatgaaagcgatggcgttgaagaaactcgctacagaagactcatcgatctgccgccgagtcaccaccgagattcgctctgttttgcggttctaatgattaattcaagacaacgttgggcttcgtgaatcgtgacaatcgacgacatagagagagcttcccgatcacggtggtggaggaatgctttaccgcgatacagatttgtcgtggattagggtgcaatttttcaaagcccaacaacatcaattctagcccatcaaaacaggtcaattctcagcccattcatcttttaattttttctcatcccaataacaaattcacattacaaatagggttttatacacggattttttatatataaataatacaactttttattcaggtcttcttttttttggaaattttagatagaaaaactttaaagtctttttcttattattttaaataaaatattagataaacagttttttaggtataaataatatttttattttttattttttgaagtgttaaattttatatatgtgtaaactaatcggacacaacatcccgtccataatatgaggtccttcagcggtgtcataggttcaacatgtttacacatcatttgaatttaacactttttttttttttttttttttactaaaaatactttttttgatttttaaaataaaatattattttcttattaagtatacataatatttttattttttatttttaagtgttaaattttagatgtgtgtaaactaatcggacacaacatcccgtccataatatgaggtccttcagcggtgtcctaagttcaacatgtttacacatcatttgaatttaacactttctttattttcatacttttattaaacttaattttaaggtttgcaaataatgttataaatatattgatgtatgttaaaaaatttatcacttaattttagacataatttaaaatcttaacacttatttcttttatttaaaaacatttatatatcaatatctaaactgtaaagtttttttttgtttttaacttaaatttagataaacagttttattttcttacataatatttttgtttttaaaaaaaagttgtaagtatttttgtttaaatgtgtaaaaagaattgaatgataacagattctttactcacagaacaagagatattaaattttctttatgtttatagtatttaataaagtttatagtatttatttccatatatacatttgtttctgtaagaactatccatttgatactagaataaatttcttcatttggattagattgttcagtacaaaactctatttctggcatgtcaataaataacaaatgctaattttggctcttaatcttgttgatagaatactaaacttgcaatgctttttacactaatctttatctctttatatatttatttttaaaaactcttctttcctttttttctgatttaaagtacaaaaaaaaaacaatacatctttccattgaactagaagaaaacattttcactgtccttttgaatcagaagaagaaagagaaaaaaaagagatggagagaaacacgccggtgagaaaccctcacacttccaccgccgatctgctttcttggtcggaaactcctcctcctcctcaccactcaaccccttccgccgctcgttctcaccaggtccgtttcttcaacaaatgttctcactttctctttctatagagagaagctgaggttttttcttctttcttctttcattttcagccgtccgatggaatcagcaagattctaggcggtggtcagatcacagatgaagaagcccagtcgcttaataagctgtaaaagattcatttaatctctatctctcattgcattaccagatctaataagtatacctggatttgttttttgtattacaactgaaacttaaagtttaaagctttgatcttgtgattcaccaaaatggtttctttgaatgatgaagtcacttctttttcttagtgataaatttttatgaaagggattggtcaaatgctttttggcttttctgagaagttttagtgttaatagtattttattacattctttgttcatcaaagccccacaccatttacatgtcaaactactactgttcattatctaatgaggagatctttgtcttctttgttatttttgattgtttcattaagtgacttcatcattacatgtaaaggtctttaccggtctctaatatggcgctttttggtacagaaagaattgttcagggtacaagttaaaagagatgactggtagtggcatatttactgataagggaaaagttggatctgaatccgatgctactactgatccaaagactggactccgttactatcaggtagcttacttgtgtcttgtcttatgtttcaacagatttagacaagtgtaaattgaaacgattgttatgtgaattttgcagcagactctgaatggaatgagtcagatatctttcagtgctgacggtaatgtttccccgaagaaaccaaccactttaaccgaggttgcaaagcaaagagagctgagcgggaacttgctaaccgaggcggatttaaagagcaacaagcagatatcaagtgctaagattgaagagatcagcggtcatgacatctttgcacctccatctgagattcagcctcgatctttggttgctgcacagcaagaagctagaggtaacagagacatgggagagcctgcaccaaggaacttacgcacttctgttaaagtttccaacgtaagtcttgccattgcttttgctttgagaggaaactcaaacttagtgcccaaccaaatcagtaaattttctcttctattccaacagcctgcaggaggacaaagcaacatactattcagtgaagaacctgttgtgaagacatcaaagaagatacataaccagaagtttcaggaactcacaggcaacggcattttcaaaggcgatgaatcacctggtagtgcggataagcagttaagctcagctaaactccgtgaaatgagcggaaacaacattttcgcagacggaaagtcagagtcccgagactactttggcggcgtgaggaaacctcccggaggtgaaagcagcatttcattggtctaataagtaagactcggggctgtatggtattatccgcgcatatgctcaactctcacatttcagcttctttagaatttagtttcttagagtctgaagagagctcattgtacggatcctttaaaaccttttggtgttgtctctaatacttgaagtttcttaactgtttctgcatttctcctactcttcacttaaaaaacaagtatggtttcaatacatcatcgttttcgtgttgaaaagagaaacgactccactggggatcgaacccagaatctctggtttcgtagaccagcgccttatccattgggccatggagtcttatttgactaagaatttctacaaaaggtatttatattaaacaactggtttaaaagggtgaagtatacatctctcatcatagctcgtcgccttctcttaccgaatatgatcgtctttttagttaagctgtctcaaaaacactcggcataaaattcagctctttaagaaaaaaattcagaggaaaattaaaaaaagtggatataatagagaaaaaggtaaaggaaaggaatagtgagagagagagagggagagatggtcttcttgtttagaacatgttgtttccaattattctaagaatggcgttttaggtaaatgatcacagcttattacagatggaagagaagctgactcaatttgtggtttagatttgtcaaagaggatcgtgtggaatctgaaagttttcaattttcactaaaaataggattagagttaaaaaggaggaagaagaaatggggaaacacaaatctttcagaagcaaagcagtgcactttgtcaccgatctcaccgctggtcttcttaatcccatctctgataaaccctcctccgctcatcctcctcctcctcttccggtacccaaagttctcatctttttgtgtgttttgtgttgacccaatcccacaattattcttaaaaagggttcttctggattaaagtctttatctctgttcttgactctgggaatttctggtttttcttggcttttgtgtttatgcttagttgtttcaggattttgagtgtttctaggtgggagtttcaatttgtgtgatcatttaatgagagctcttgttaattttcaattgtttttttcttaattaggatgaggaagatgagtctaagagaaatcagctagagtctacaactgcagagcagcctaaggatttggttgacgaaccagacacttcttctttctctgcattccttggttcactgttatcttcagatcccaaagacaaaaggaaggatcaggatccagaggacgaagaagacgaggaagaagacgaagaagaagattctgaggcagaaacaagcgatacatcatcatcatctgccaatcctactagaactatgaaggagactactagtggtggtgctgcaaagaagagttttttgtccaagtacaaacagcattttaggaatttttaccaggctgttaagtttcccggggtcaaggagcgaaagggaaattctgatgtgataccagatgatgaggagactgaatattatgatggcttagagatgaagccgatgcagaataataatgtcaaagaggaagtgacagtagtagtgcaagcaattatacctgaaatttcagaaccctctttgcttttatcggagcagtctagacgctccctttatacttcacttcctgcgcttgttcaagggaggaaatggatattgctttataggtgagacaacacattcaaagcatttcgagctgattataaatcttaagaatggtttatttcatatattctatctgtgtgtgtgtgtgatcatttttctgaaatcttgcaattttctagtacatggaggcatggtatatcactatccacgctatacaggaaaagccttctctggccaggtcttagcctactggtaaaatgaaattcttgttctgattcaaattgtaaaagtgtgaaccttttgttgagctttatggaaactgccggtgtttcaggttgttggagacagaaaaggttcggtttttggtggtcttgttgaggcacctttgataccaactgataaaaagtatcaggtttggttctaaagatccaatctttgtatatagattccatctatccagttttctttcttttcactgtaattaacattcttttgtgttgggttgttttggcagggaaccaacagtacctttgttttcacaaataaatcaggacaacccacaatataccgtcccacaggtatttattatgcattacttggatacatagaacttgttgggagttgtttcattattcacctgtaattatggatcaggcgcaaatcggttctacactttatgctccaaggaattcctagctctgggcggtggtggacggtttgctctctatctagacagtgagctgtaagatttccttaccaaatctcttaaaatcatatttgcatttttattatattgcaagattgcgacagacaacaaggcatttttcctcaaatcgattgatccattgtgttcttataggctaagcggatcgagcgcttactcagagacgtatgggaactcttgtctcgcagactctcaggactttgatgttaaggaagtggaggtagttaaatttcatccctctccttgaaaaataaaagctttatatttcaatattttgcaacaccttttaactgaaacaagcaaacaaacacaccattggttgattgattgttgcagctatggggatttgtgtatggctcaaagtatgatgagattctagctcacagcaaaacaatggagcctggtctttgcagatggtcatgatcattataaagaaaacccaaatgaattcaactgagattcgtctttttgttgttgttgttgttgttgttgtataaatctgtagtaaaagaaatcttgttgtcttgtaacttggctaaaatcacatatatgttactctctctcacttgtaatgatgattttgaaataacaaaataaaaccacctattaggctcattcggcccattaaggcccattaaagcatatgtgtgtgtgaagagggattaattttagtggggaagaatcaaagaagaaaaacccttgctactgcttttcatttctgacctaaaagctcagctccgatttgaaaatggggagtagattgggaggacgagtggttcatttcgcgaatcttccgattaagcttctgatgcctgcgaagctgaccaacattcacgaattcgcgttgaaaacgattccttccgcgtccaagatcgagatcaagcgagtcctggagtcgctctacggattcgatgtggagaaggtgaatactttaaacatggatgggaagaagaagaagcgtggtggtttgttgatagcgaaagctgattacaagaaggcttacgtcacgctacgtagtccattgtcgatttctagggatttgtttccggtgaagtatatcgaggaagataggaagagtaaagtgaaaggatctagctttgttgaggaagaagatgataagaagagtcattggcttgatcgtaaggagaagagggagattggtggttatggtaaaggtaaaggtcgtcgaggtggtgaaagggctaactctccgacgagaggtggtgctgcggcggcggggacggccaagtttccatggagcaacatgagatttgttggtaagtagggtttatgagcagattatgatctggggtttgtgtttctttagctatcggattattgattttgttgtttctattacttgaggtttgtgtattgagaatctgaatcattgaagctctcagtgtttctgagatttggctaataaatctgaatcaagatgtttccaattgtttgtaatctttctcttagtgatctctgattagctatatgatatttgctgctcccgagttctaaagctttttttcttaattgcaatctataagaatgcttaaggggattaactctggtgatggtgctttgtttgtctgttcaagttttgagaaacctcttattagtcttattgtttgtggatttggggcttatgttcaaatgttcgatcacattacgcagatgcaaaacgtatgataaaattgtgacaaatcactacattagccaataaatatagtcatctctgatcatcccaaaaatctcatcactttgtggactagtagcttggtgtttactaaataattgttaaaataattgttagttcagattttggtattcattacagattacaactaggctactactcacctagtatcttcacaaactaacaaaaatttgtttggcttaaaggtctttttttggtttaggttttaattaatcaaataacgatttaaaagattaatgaagaagactttgatcatagaaattttagaaaacattcatcattaaaaaatattattttttttaaacacagatacacccaaccgcatcgacgcgcttcttatataaagtctccgcggaaatcgttgaatatatttgggcgcgtggcgattttgtgaaggttgtcaagtttgtgtgcgaccgagtcatcgtcgtcgtgctctccttcttcttcatcgtcgagacctaagaaagacgagactctgattcttctgatctttgaatcacactttttctttttttccttcttcttccaacggaacggaacatatggcttcggtttcacctttggcaaagtttaaactggtgttcttaggagaccaatctgtcggaaaaaccagcatcatcactcgtttcatgtatgacaaattcgacaccacgtaccaggtatttacacagattcctttcacttgttttgtttattcatttaaattcttctctgcgacaacaagtttcttttgttttcgtttttttattgtttgatctgattcattatttcctatattacgattgttcagacgatttcatctcatattggtcctagattacgtcgctgatatcactctggtttttcttcaatgcatttgtttgatcactctgctctctgtttttttggttgatttatcaatctcttcttcttattatgatcaagatcgatgatgctaagcactgttgcttctttgctttcttagttagtcattaagcctttatttgtgttctctctgactctctgcagcctaccattggaatcgattttctatcgaaaacaatgtacctcgaagatcgaacagttcgtttgcagctatggtgagaacaatgttacttttgctctttacctaaaaactaacatgttaatttcaaaagcaataacaaaacaagttttgattgaaagggatactgctggacaagaaagattcaggagtctaatcccaagttacatcagagattcttctgttgccattgttgtatacgatgtatccagtaagtccacctttgtttctctctttgattcaccttcttttttgtgttcttatgtgttcaatcaatactttgtgttgcagataggcaaacgtttctgaatacctcgaaatggattgaggatgttcacagagaaagaggtcaaagcaatgttatcatcgttcttgttggaaacaaaactgatcttgttgaaaaacggtaaatacaaacattaagcaaagaattggatgggatggactatataattctctcttgtcttatatatgtcaatcttgatataatgaaaaacaggcaagtatcaatcagtgaaggagaagacaagggtaaagagtatggagtgatgttcattgagaccagtgccaaagaaaacttcaacattaaggtatgacaaaacttcaacaaagagtatggagtgatgttcatttgagtgtttcttgttgtctgatttctaaacacaccaaatctcttcaatttgcaggctttgttccggaagattgctgcagctttacccggggtagactcatattcattggcaacaaaatcagatgacatggttgatgtgaatctaaagaccacttcaaattcatcacaaggtgagcaacaaggaggagcaggtggtggtggaggctgttcttgttgattcaaaaatacataattccaaaacttgtgaagcaaacaaaagggatcacgttagttttgtggttttcatcttattaactgacacagaatataaaacatcaaagagaaaaggattactatttttacacatgtgaatcttttgccttgttctgtatttgatctgttttagacattgacggtagcagaatacaaaaccttattctgatcaccaccaaatgaaccaaagggagaaggatcaactgtggtgacagcttccttccactcaattgtaccccaaatctcacctttcgaacgaaatctcggcacaccaaacatccaatctctcatcatcatcattacgctcaagccagaagagaacaatgttcacaccaaaactgttcacttgactgatattcttagagcctccaaacctttaactatcttccattctgattcctcagactcttgccaaaacactcaccggaagctcatatcggtaccgtataacaacaattcctcaactacacaataactcaaaagatgtggcctattcgttcttccccatttaccatcactgggagagtaataaacacttccttcaaaccatttcactccgtaaaccttgtcttccttaacaaggcttccattggcgtttgttttggccactacgattatcggcgggaaggttttgttgtttcttctcttcttggaaaacgaaaaacgttatcctttatttgttcttctcttgttttacttttttattgagccttcaaacattcgttagtgttatcaactcaatgaaacttgtaacacaacaagttgattagtgaattagtttgtgcttactcatctcagacattaacatataatacttgttaaatacttttgaagattcgtattatctttgtatatatttgtatactaaagagaatagtaacgataatcacgatgctaagcactcttgattctacttttttaacctcttgtttggttacacgttaattaggcatttgcaagagcaagtgttattttatcaacattttgaaacttggaacaaaagacaagtttggggaagagattctaaacagcgagacaacgaaggagagaaaaggccaaaagagatgctacagtttacatgtgattgaagctgttgttgttgttgtctccgttttgcttcactctcagtgtcaggtagatcaatatcaatgttcccacacttgatctgcaatccaagactttttaaagttaatactgaatgcatcgttagtatagatttatacgaattaagtacgtagaggaaggatagttacaagatggagaataggatgacgattttccttgaatcaaatgaagcggcacgcttgtatcttctccacctgtttgttggtgcatcgtggcatcgttcggagagagctttatctgcaacagaaattttcttaagattcagtgcataaacacaacagacaaatcttaaaattatgcaacttcagtgaaattatatcgttatcttaccagtgctcaaacttgcttgtctctgtaataccttttgcatatgctgtgaaagatatcatagtaaccacataagaagagtcagacatttggatttcatctttttgatatggaccaagcaaaactagcatatgttgtcgttgtgagatagaaagaacttactacactctcggatttcatacttgcaacaacttcgtcatgagatgtcacagtctcaccaccattccctttctcgacgtttatgtccacaacgcatgattgataggaatcagtgcctcccagtagcacattgatgcggttctgcgttttctgacaattcagttgcgcatcgatcaacatctgatttttagatggaagcagagccttgacgaagctcaggagagtaaagtgcgaggtacattgtgggattgtatttccttcatcaggtaagactgagatagtacacacgtcttggacctattacaaatggaagagtttgaaggactcattatagaacacccacaatgctacttgtgaagatctatatagttcttagatgcagcaacgatctattaattaacatatcatccctcttccataaagtaaggacttgtaaagtaataaagaacacaccagtgaagtatcgatgtcacggtcttcttttaaaggaaatgcagcctccttgacaagaagtgggaaaacatctgcatcgcaaaaaacggaagatcagtttactcattagcataatatttcatttgatcatgatacactgatttagaagagcataatccttatttagcttctaccaatggcgctatgtttgccagtatctccgaaagtcgacttaggtagcttgaagcttggatacttaagtggtgcattcccatcagcaacacttgcgaattgctgcttcccctgtagatatatatacacatcagaagcccttgagtcaaaaaatcaacaccatggaaagatcacaaagagttgaccaaacagtaacactgttacaacttgttgagtcacttagactcaaaatttgtaaacataaagtgatcatttactatttcatcttctcataagtaagaaagtgacgactagactaaaacagtgtccaagattagtaaaattcctaaaaatagtcttctctcatgattcatcctaagaaatgaaatggccaaatgcaggatgatttgaatctattagtggaaaataaaagcttccagaatcgaaccccaagtctctcatcttcttctcattattcccaaatcgaagaagattcgattccaaatccccaaatcgattgtgaaacaacaacagtagagggaagaagtaatgaaactaacctcatcgaagaaatcactcattgcagagagaatcgtgaaccaacgatggaggaaagaagaagcgattctcaaaagaggaagaagacgcggaagcttgaagactcgtcgtatagtgttgtagttgtacaacaacaatgcatgtagagagtgttttgaatcggaagcttccgcgtgacggcagattcagagagaaagtgaagaagaagaagtaaaaagagagagagagagagagagagagagagagagagagagagagagagagagagagagagagagagagagagagagatgaggaagacgctctcttctcctgtgatggcttctccttcatctgattgcgacatcaattcacgggataacgacaaatcctcattcttcgtcctcccttaaattaccaatctacccttttactttttctattatctcctcgatcatgttactaattaaacttgattagttagggatttcataattttttaattattactacatatgggatcatcatcaacataatgacatttactgacaaataaatgcatgtctgtagatttctgctgtttgatactactatactatcagtcataattacaatttactatttatgagctgtctactacctttttgtaatgcacaaaaacacatcattttttattttatttttggaggaaacaatatgataaatggtatatacaagaatcaacagaccatataaaatccacccatgcacttccttttttcttttttgctaaattgtgtaaatgtcatatgcatttaattctcccgtgccattgccagctttttattgtttattgactcactctttcttaactaaataaaatatatatatatataaaaagaaatatggcatagtttttgaagtagtactactcagctaatcttaataactcttgaatctgtaaaaatcacaaaatcaaaacatttatgtatgagaaaaaggcacatacagagctcacgggcctctgtctgtatcttcttcgtcaacttctcccgtgatctttccttttgagttttgtctctttgtttctttcttttttaactttattctcaccaccactacgtgattatcgctgggcctaatttctttatcagcccaatttttcttaatgggtcgtatcagactttatatttattccatcatactgactgatacggcccattaagaacaattgggctgataaagaaattagtcaacaacaatttcgtactctgactctcttttgttgtgataagacgacattaacactaaacaactaattcaacaacacaattgtagccaaagtaattcaacatattgtaaccttcttcctttgctaaagatacaaagacaaggagttatttgccataaactgtacatggcctttttcaaagtatacaaattccagttaaaacttccaattttaaaactcaccaaatatctttgggagagagacacagagaaagaacaaaaaccaaaaaaaaaaaaaagttactgtcaattgagtttgacttttaagacaaacatataccattactaataatagttaagagaaaaaaaacgaagaaagtccttctttctgctttctcagctttcacttggtcggtccaaggctctcatagaacaggatgtaaccatggtcagtattgctcgaatactcctgagacgatccaaagaatgtttgaacagctgattcttcaatcatctcaacattctcatcatcaaagaagagccaatggttatggcttttcacaaggcttacgtaatgaccatggttgggtccacttcccacatgaaccaccactgcaaacagagagtactccacgtctgcgtatggttccactgtgttgctcagttttagctccaaagggaagacaactctataggagagcttcttgtagcggcctagctgttcgatgtatttgaatcgttttagatgaatcactaggatgtgtggtggcttcttgatcttcatccgcttttgtgcttcttgtaagctgcaaatataaacattcaataatcaggcttcactcccatggcgcctaacaaagtctaacactgtggagcgcttattgaaggattaagagggagcttaaagaccagttttcagtttcagctactataaaggaaaggtgaggaattgatatttgaaccaacattttacctgcagcatttgtcacaaaagaatttgtcttcagcgtgaagcgtctctgtggagctgaagtttttcaaacagctagttatcgaactgttctgttcgatatcaaggcttaggtctaggaatgtttcgtctcttgctgtcactgtttcacatcgcagacaccttgtctcgttggtaagtatgccctgtgtacataccccgaatttaaaataagccaaaaatagcacaacatagtcgcaccttataaggagaagtgaaccttttcattagaaacaactgacctgaaaaatattgtgcacccatgtaacaataggctccttgtgcacaacaccatttgcctgaggaactttcagtccatttgctatcttctcgggagatgatgatgacgaggtttcatgttcagtttttgtagcttttgcctctttctccagtatgtcaacaacttcattcagcaaataattcaggaattcatgtgcatcctacatgagataagaaacgtaaaatcaatcaaatgttaattgcttatctcgcatcttctgtaaaatagctcccgaaaagatggggagatttgcaaagatcacctggtgcatataactccgaaacagctcattttgtttcttcaacctctgtacaaatcgcttaggcgcaataacacctgttttcttcttctgggaacttatctacagaatgaataactatgatcagacttatgattacaccctctcttttttttccacagaatgactagcatacaattatctaaatgatgatgacaagatatgatatactaggcacttcatcaagcacatttagtatctcgaagatatttaactatgtacacaataatatcaagttcatgtaatgccaaaaaaaacattgacttgtgcctataaataattgattaaatccacttatgatgtcaagtgagaaatcaagtaaaccaacctcaagagaaatattgtcagagaatacaagattggtcacttgagttaagacagtatggaagacctcgaaagggtagataaaaattaaactctcaaaaggaaaagaaagccaaagatcacaaatacctgcgaaaacaagtctgccaggcaggtcataagattctcttcagcatcggccacgcttttattactggtatagtattcgagcagttgttcacggaaaggaacacagaaataaagagcctgcacaagggagagagattcaatacacattttgactatttcagttgaagaagaatcgatcactagccaatgataaaggtctttctccagtccagagaacttattcatatacatagcacacagagatatcgaaaaatcaatagagctgatacacaattgcaattgcacacatgatttacattaagtattaacctccttgagtaaatctatctacacactccatccaattcgaaagagctaatgattcgagaaatatcaatgcaaccaaatcaaatttaacctattgaaacgaatttgaaatcaaacgctttaaaaacacacactaattcaacaaaatccagaagaaatcgtcgcgatggggaatcaaagaggcagtgaaagcaaaggaaagagagaaaggagcaaggggacctgcaaaacgctgttacagtagcaagtgttgccgaaattctcgaatccaaagtagcgttcaccttcggggaactggtcgccgagagctttctcgagtttggagcccgcggcgcccattagccctagaactagcttccgtatcaccgttttttctgatcctgactcggagattctctcaaaggtcctcttcttagcctctgcgattggttcgattcgatcggagaattcagatttccaacgagcctcagagaagagaagagaagaggatcgattattttactattaaactttttctcttcttttctgtccaaagcgacgaagcaacgaaggaagatgtggatttgattatcaaaaactatttgagtcaaaattgcaacttactcctccaaattttgtaaactttacgacatttaacttttagtttttgaaacttattttatatacctaacccaagtcatgcattgcaaattctctgattcaccttacttcgtctttttgatagtttaaacttaatacatactcttgacaacaacaacaaaaaacttaatacatactatgttgtgcccaaaaacaaaaacaaaaagaacttattctaaaaaaaaattagttttaatatcacataaatttcatattataaaaattatctttacatcctaaaattttataacttaattatatggtataaaaattttatctctattaattaatattacatatagtgaagtatcattacttttatttttatcacctaaaaggccataacttaattatatggtatgaaattttatctttattaatacttttgatattttgaaacaaaaataaaataaatatggtattccattccttaatgtacaacttgattaaatatattcagtccatcttttattttcattttcacttatataatcaagttattattttgaccaatccatgtttaatctcttggtgatatatttccttacatataattattttctaccaaatttactatatgacatattatattttaccaaattacttcttagtcaaattttctataagaataagttggttcagtgtatatattttgattttggttggattttgtgtcaccaattatctatataaaaactcattagatctcaacacaaaacataagaaaatattttacaacaatacattatacattagaacaatacttcaaaaaaatggccaagatcaaatctttagatgttattactgtcgcaataattttgttgttggtgattgcaggttaatcaagcactcttatttttctcattttcaaaatacgttcttagatataatcatgtatattatattttaaagcttacaattcctttggttttatacattacatttctttttaattagtactttttattatttttgtagatcaagcaactgcaattactgttcaagccgattgtattggaccgtgcaatgacgattgccagcagctttgcaagtcgaaaggttacacagactggacttgtgcatcatttagaaccaagtcgagttgttgttgcaaaccaccgagacatcaaatctttgaacaaaatgctcaattgaacaactaaaaccgcttttatattgttctcaatttgtatgatcattaacaaatattcaaagataagaaataatttagagaaatcaattgatatcattttttcttatcacttatcatcattctactcttgattttgggctattttgtaataagataacctgaattacaatagcactgtttgatcatagtattttcatttgattaaaacggcaccgtttaggttaatcttggtcttagttttcgattcgggaacgccgccgtcccaatcacacaactgggtaaaaacgatatggaagacgatggtcagagctccgtcgccgaaaccctagatccggcattgcagaagaagcaccatgatatgctcgagcgtctctccgctcgtcaccaagctcgaaaatcagattcacctgactcttcctcttcgtcgtcctccactcttgaatcgacttcctcgtttctcgctaaattctccgattcaaagcgatccatcgagtctcggatcgccgagtcacgactcgcttcctcctctacggattcgtcaaagcttaagtcggatcttgctgagatctccgtagccattgacaatctcgagaagcttctcgctgagaactcgtattttcttccttcctacgaggttcgatcctctctgaaaatcgtatccgatctcaaacagagtctcgacattctctccggcgagttagtcccgaagaagaaattctcgttcaagagcaaatcaacgaccaaaaagccggaatcaaaactcccggagatacagaaacccgacgtcgttttacctccgaaactcgtccccgtacgcgattctccgggattgagaaacaaacacggagagactcttgtgaaaagcttcgaaggctcgtcgatcggagaattcacattgtcggatcttgattcatgtcaagtaaaattaacaggaacggtcaacgctctgttccttcaccgactgaagaagtgtagtgtctacacaggtccagtgattggttcgattctgattgatgacgtagaagattgtgttctggtattggcgtcgcatcagatcagaatccattgcgctaggaagagtgatttctacctgagagtgaggagtcgtcccataattgaagacagtaacggtgtcagatttgctccttattgtttggattacaaagggattgatgaagatttgaagacggctggtttggaggaggagactaacaactgggccaatgtggatgatttccggtggctgagagctgtacagtcgccgaattggtcacttttgccggaagaagaaagggtctctttgcttaccatttccggggattcttgatcaaaatcatcaggtaccaaaattaccttaaagcttgaacatttatacgagaaatcatcaggcattcttttaaacaagtcgatttgtattcgattatgattgtgtgttcccaaagaatgttgcttctttacatattttgcctttatttgtgatcttggagttggtttcatggaggtaattttttgatcttgaatatagagaaaagccaaatactaagagcatgtatatgggtgatacccatatagtatcataaagaatgttttagtattatttataatatttgtttattgtttgagattttttatgatactcttattaaatatgtttacattgatgataccacatgtttaagtatcatgaaataaataaatttgcaatatggattttagaacatgagattattctttgaaatacattcttcttttttttatctattatcatctttctgtcgttcattagattatatatagagggatgacctgaatcaagcctcaaagttcgatcttattctatgaacacaaagtgacaacacacaaaacaagatctaatccttttgtacataaagaatgcatgaatttatcttaagcttcctatgaacaaaataaagcacactcacacaaatacaaacgctcacacacacaatcccgagtttcggatgattgccatttgccacagtagaaacccgacgcccatgattccttaaggtccctcatgccatgaactccagcgatgtaaataagctgggtgactgagagtatgatcaagaacgcctccatggttctctacatagaaaaatgagagaaaatggacgtgtcatgaaggcaacaatggtgggatttccaaattttaatctataatttggtcacagtaccatttctctcagaatttaagaaagaacctgacagagaaatgatttcaaatcggccctgcaacaacaacacatccaatacagctcaatacaagatttaaattccagctccattcgataacaacaaaggtcaaaatgaggccaaggagcaagcaatgcacaaagcacatgagtaaatttatacctcatacttaacagttccagtaggattgctattgttagcttgacgaagcatcacattagtagattcaaagatcacatgtcgagaacatactagaaaactaagaagccaaatctaaaggcaaaacagagactaatgttgaatcagataaatatatgaagttttttaaaaaggaagtattttttctgttcttctcattacaaatcttttcattctctagtcatatttgtacataaagaatgacaattgaaattgaacaacttctacaagaaacaaattcaagaatcatcaaaacaatgtgcagagagaggatatgtatactcaccaaccttcaggaatgaatactgcatcaccaacgttaagagtaacctcctgtgactgcttcagagaatgctctccccttaagatggtttctcggtgctttttctcacctgtcacagtctgataacacaaaatagcaacgatacactcaatctttcaataatcgaagaacaggcagaagaatttcaactatccggatctgagcttacttgtcgagaaactcttggtcgacgacggcagagacgacgaggagtgggtttctcattcccaagaggattccatcgaaatcagaggaagccatggatgatgatctgagaaggattttcgagaaaagggaagagattcagaaggaatcgaaacagaagaaaattgatcggcaaaattagaaggaatcggaaaattccccacgagagagaatttttttgagagaaacagaaggaattttttttcgacaaaaataaatggacgaccaatcagagcctgccacgtaatatgagactgagtatcagaagtctcaatagactgatacggctcagcccagttttttgtggttggtccattaaaaaattgtaaatgggctactgatactctaaaaatatgagctatgtacatggtctaagttgagtctgccacaaaaaacctagtacagttgggctacaaggcccaatataaatgtaagccctttaacaaagagggaaccgcctgctttgactgttgagaacaacttgctggattcttttttcttcccggtaaattgagaaaccaagaaaatcaaacaagtactgcaataagaaagtgttgaatctgattttggaaatattatttgactccattattcccttcataaatatatacagtcaagcatatttatttgaacaagaaaataaagtcatactaataagcatagagataaagtaagatcataaaataagtataaagacatatagcttattaaatcacatgggtctctgaatgggtattggtaggttggtagatggaacaaaatcagtcatacaatcattttcccaaaagattggcctccatcatcagtgattcagtgattcatgcacacataccaaaaccactatatagttttttttttattattattcaaattacacaaataaataaataaaccttttttattaaccggtaaaatattcccatacctgtttcgtcaaaaaaaataaccggtaaaatactaataatttgttctgttttgtgtaaaaaagaatgtatgattttattttgattattttttttgttaataagacattaagactattgaaatgatgttggaatatggtcatgtgttttttgtggaggaattatatagttggtagtagtagtaccattactctccttctcacctgttttcttcctcttaaagtcttctctatatattttcaatataatccgtctttcttatacataaacttattttgtacgatcacataaaactgtaaacccccacacagttattggccgtcggattcaatggaaggattagctatcagagcatctcgaccgtcggttttctgttctattccaggtctcggcggcgattcccaccgaaaacctccaagtgacggtttcctcaagctgcctgcgtcgtctattccggcggacagccgaaaattagtagcgaattctacttcctttcatccaatctcagccgttaacgtctctgctcaagcttccctcaccgctgattttcccgccctttcaggttctcccatctctctctgtttcgtcatatagcagatcgttcacatttcagaaaaagcaatttaggtttaagcatctccacaaatcgtgttgttgtttttttctgaccatttttacaatctctttaactttgtgtttgcgcagaaactatactgaaagagggaagaaataacggaaaagagaaagcagagaacatcgtgtggcacgagagttcgatatgcagatgcgacagacaacaacttcttcaacaaaagggttgtgtcgtttggatcactggtctcagtggttcagggaaaagcactgttgcttgtgcactaagtaaagcattgtttgaaagaggcaaacttacttacacactcgacggcgacaatgtccgtcacggccttaaccgtgacctcactttcaaagcagagcaccgcaccgaaaacattagaagaattggtacacaatttttcctttcttccaaaaattataatcatgtgtttactaactcatgaaaccaatttctttaacgcgttttatggtatatgcttaatggtttttgtaaagtgatttgtgattgatctttaaatttaatatcaggtgaggtggctaagttgtttgctgacgtcggagtcatttgtatagcaagtttgatttctccgtaccggagagacagagacgcgtgccggtccttgttacctgacggcgatttcgtcgaggtacgtacgctataacgttttactatatatgaatttgcttgttatagaagatatattagtatacattgattacattacgaaaacttactttgatttaggtcttcatggacgttcctcttcatgtgtgcgagtcgagagatccaaaggggttgtacaagcttgcacgtgcaggcaaaatcaaaggtatcccaaaaaaaagaaaacgtacttgtataaaagttgactttgactttttattttgttcgattcgtagagtttgacttattgacctaattgttgagtgtaacttattgacctagctaattgttgagttttcttgaattaattatccaggcttcactggaatcgacgacccttacgaggcaccagtgaattgcgaggttcgtcacgtgaatgatcagatagattttggaacgtaaatttgtactaataaagtattgatgtaatatcctccaggtagtgctgaaacacacaggagacgacgagtcgtgttcgccacgtcagatggctgagaacatcatctcttacctgcaaaacaaaggttatcttgagggctaagtcaaagtcggaaaaatcaacccaatttgtcgattctatatatggctaaaggattgttctccctgattcggtcagaagcttgagacctggaaacgatgtcgtctcgcttcgtcacactatcatttgttcttgaattgtgttgaagtcaaaagccaaagggaatatatctatatttgttctaatcatcatttagttagtttataaagagtttttgctccaatgatatcgactgtgttgtataatgtgaattaataaagtggatttcgttgtatttaagtttgtcttaccagcctaactaaattatgtgatttggactcatgaacccgttgatccacagaacaagcttagttagtccatgaatgtttaattataattctgactcatattagtttatatttcagagatgcaaataattatgctcttaaacacgtacagtttgattacttcactcacaaaatatatatcagatcacctatagtgtgtgcaaatgtccccgttcactcgttcagtgaatatgatcaacagaaaacgtaaactgttctcgtttttttttttttttttttcaaaagtccaacgcatatagatgaatcataattaattaagccagcccataacggaaaagacctagcacccggcaaaaactcagaaaccatctcacaaaattgtgaagagatcaacatccaaaattcaagagcattcacttaagatagatgaacatggtagaagatttgtcgcgcgatcaatacttgaaagttgaaaacatagtgctgatcatctgaaactgcagagaggaggagagctgaatgtagtgcagtaacatatgatttcttttaatttacacaacaaacgatggtctttgatgatctcatgtacttttcatgtagagtatgtatactttggtttatataatcaccttattttttgtcgtttgttgcaaaatatactgtatctttcttttttttggttaaaatggtcgataggtttactaatatcattttcaatacaactataccaaacaatcatatatgaaccaatctatcatgaacttttaaattatgactttaatcaaatatatatttaaaaaaaaaagtatcatgcaatttgtgaaatttgacaggtgagatttggcggatggagcacgtttttatttagtccatgctatatatacaaaaataaactacccttggttggcagagacatggcaaaaataatccacatgcatgattggttaacttttttcccatcactaagataaaattacatacatttatataaaattcgaaataaagaaagcaaaaaaaaaactgatgatataataagcttttattcatcaaagtgggtatggtgataggactacactctctgggttgtgttttggtattactgtgtaagacttcctagattcatgaaaaagtatcgaaagttagaatcgaattaatccaaaaggaattattgtggaattaactaaagcaatccatacaaatcacaacaaaagctcgtcaagtatatataatcagaatagtcaataatttagctttgaatgccgaacttgactaaaactcagacatgttatagtaccaaaatatttgtaatttagggaatatcattgctaatacaatataaaaaagatcatagctagattcaaaatgttgaacatgacctacgacattgttgaattcattgatctggtcttgctaaaaactttaaaattgatgagttcaacatcttcaaatgcatgataacgggtccaacggaaattgacttttttttcatgctcctgatatataataatatctaacgattacgggttccactaattgtcattactcattaacattcctatttaaaagttgtgatagttttagggttttacgtagtcgtgtcatatagcgattaactacgtacttgtagatttatcaattacttctgttgtttacgagaacctaaaaaaaagaagcagatgcctagtttatagagcacgtgtactgtcttgaaaacttaggtaggttggtaaggttaccaaaagaccttaaaggaatataaagttactaattaacttaagtaaagttggtattgcttatatattgcaaagtattacaaaccaatcccctctgtatattgttttaaaccatagatttttttacaattaagtttatgatcaatcaattatttcaccatttctattaaattatgtaaaaagaaaaggatatatatatatatatataattaaataagaataaatcaaaataccgaaattttttattatccattctttgtggacatcgcccctaatatataaaaaaaaaaaactttcgtataactgatttatatttttttgtaaaaacttaaaggaagcctaagaaatatcttgtgatatttttgacaaaatgtggtatatatctttttataatatcatttataaagaaaatattgattacatggtgaaaaacattttgctagcgatcaacaaaattaaataggcacatgttaactgatctcatacgaccttgaaattttaatctttgtgtcgagagaccgatctttatgcaaattatgaaactacacatggtttatgcacggaagatcacattgcatgtataccatattataaaccaaaaatgatcaagaagaaggcgaaaacatttgggtaaattttaaatttcgatcatgcgattttttagctcatcatcaacagacaagaaactatcttttgtactgtaaatactaaatacaaaataaaatcttcatcattttttgcatgtgtcaaataaattacgcgaactttttttttttatcgactattaatagagaaacctgttttatttgccttgatttggaaaaatggagaaattgacttaagacttagtctcggtcacatcggcaacaacggagcttaaacggcgtccgcaacatggaaactcaagccacgaatctgatatattgactatagaagtagtaagtaactttgactcgtcccacatcagtttcaatttccacgagggtatttggcaggtgaactctctacgtacccaaaacataatggctattttatttcataactgatatttagcaattaattattcgtcctttttaaaccaatttctatagttgggaaaataatcaatttttacactttcaatgtatacgttacagatttttttttattagtcatgcacatattttcaatttttacactttcaatgtaaacaatcgattcttaattgttaaaaataggtttacgtaaggaattaaagatttgtttaaaatatgttccggccggtctaataatttacttgacgttaatttcttaaacacttttagataggaggctttgtttatcccaaatgattttgtaccactgcgacaatactagctagacataaaatgttaataaatttttattaagtaatataatcgaagtattagatcaatgtagtagacagttaggttaactaaaacaagagtaaacacttttttttttcttttcaggataggtaaaacaaatttcacactattttgcgtatttccttaaatttgttgttcgttttctcagcaaagatgaatattttgtttcatagtaattcacaagtataaactcgccagaactcctcaaacagtgaaatataatatagcttttaactgtttttcggctggaccgggtttttaagtgcatatataacacgaggaattttggcaggtcaccaacaaaacttttaaaaatattaaaaattcccatcaagaatagaaattaataaacaatgatatctctaataatatagatattttgaaacgttaggaataatcgtaataatgttcaacgttggtggtggtactcaagatggaccctccctcccacattttcctcactccttcgtaagtcctttccacgcataagggtattatagtcatttcacataaactaacgactactagacttgtatataaataggaaggtgaagctctctctttatccatgcagagacaacagaaaccacaacaaaaactttgagtcctcttcttctctatacacaaacatgaacacttttacctcaaactcttcggatctcactaccactgcaaccgaaacatcgtcctttagcaccttgtatctcctctcaacacttcaagcttttgtggctataaccttagtgatgctactcaagaaattgatgacggatcccaacaaaaagaaaccgtatctgccaccgggtcccacaggatggccgatcattggaatgattccgacgatgctaaagagccggcccgttttccggtggctccacagcatcatgaagcagctcaatactgagatagcatgcgtgaagttaggaaacactcatgtgatcaccgtcacgtgccctaagatagcacgtgagatactcaagcaacaagacgctctcttcgcgtcgaggcctttaacttacgctcagaagatcctctctaacggctacaaaacctgcgtgatcactccctttggtgaccaattcaagaaaatgaggaaagttgtgatgacggaactcgtatgtccagcgagacacaggtggctccaccagaagagatcagaagaaaacgatcatttaaccgcttgggtatacaacatggttaagaactcgggctctgtcgatttccggttcatgactaggcattactgtggaaatgcaatcaagaagcttatgttcgggacgagaacgttctctaagaacactgcacctgacggtggacccaccgtagaagatgtagagcacatggaagcaatgtttgaagcattagggtttaccttcgctttttgcatctctgattatctgccgatgctcactggacttgatcttaacggtcacgagaagattatgagagaatcaagtgcgattatggacaagtatcatgacccaatcatcgacgagaggatcaagatgtggagagaaggaaagagaactcaaatcgaagattttcttgatattttcatctctatcaaagacgaacaaggcaacccattgcttaccgccgatgaaatcaaacccaccattaaggtatttatcacgttcctttcatataaggtttcgatcgtaaaaatatcaaaagaacaatttttgttaaattttatttgagaaagcatgcatatcaaatttatttacacatactaacattttgattcataaaacatttataaaagaagaaagaaacattttgtggtaaaagttgattagttacaatatttgttttttttttgctaaacatgggctacttttttgtttgtctcttttgattactttggtcaaagacagatgcatgcaacttaattgtatttatttttatgttatacaaaaattaaagatccaaaattaataaaagctggtatatatgtttataatgaataggagcttgtaatggcggcgccagacaatccatcaaacgccgtggaatgggccatggcggagatggtgaacaaaccggagattctccgtaaagcaatggaagagatcgacagagtcgtcgggaaagagagactcgttcaagaatccgacatcccaaaactaaactacgtcaaagctatcctccgcgaagctttccgtctccatcccgtcgccgccttcaacctcccccacgtggcactttctgacacaaccgtcgccggatatcacatccctaaaggaagtcaagtccttcttagccgatatgggctgggccgtaacccaaaagtttgggccgacccactttgctttaaaccggagagacatctcaacgaatgctccgaagttactttgaccgagaacgatctccggtttatctcgttcagtaccgggaaaagaggttgtgcggctccggcgctaggaacggcgttgaccacgatgatgctcgcgagacttcttcaaggtttcacttggaagctacctgagaatgagacacgtgtcgagctgatggagtctagtcacgatatgtttctggctaaaccgttggttatggtcggtgaccttagattgccggagcatctctacccgacggtgaagtgagatgagacgacgccgtatatattttatgaaactacttttatataatcgcccaaccaagtttggtcaattccggttaccagaagataattggtcaaattgtgaacaaacttgtgtgttggtttcttggttctttttgggacacttgaattgtgtctcctttacctcttcttttgttgttttcaataaaaacttttattaccatttcaataaaaagatcatcaaattaacaaatctgcctgtaatatatatatatttggtcaatttaaatctaattgagaatctatgacatttgtttttactgttaatataaagctctgtttcggttttctggtgaccaacaaacataaaatggtttgttatttaattacaaaaaggcccattagagaaatattgcaatgttgcgtcgtctcttgaaacccaatcttgttgttactctacgcaaactctcttcttcttccgcaagctacgtcgatcgtcatattagtgtgattctctgcgatcagagcttgagcttagagtctctgcgcaaacacaacgctcttatcatcaccggaggactctcggaaaacatcttcgtcgcatcgaagctaatttcatcttacgcttcttacgggaaacccaatttgtcttccagagtcttccatttggttactcgaagagatatctttctttggaattctattatcaaagcacatttctccaatggggattatgctcgatccttgtgtttcttcttctcaatgctcttgtctggccaatcccctgatcatttcactgctcccatggttgtttctgcttgtgcggagcttttgtggtttcatgttgggactttcgttcacgggcttgttttgaaacatggaggttttgatagaaacactgctgtgggagcttcctttgtgtatttctactcaaagtgtgggtttttacaagatgcgtgtcttgtgttcgacgaaatgcctgacagagatgttgttgcttggactgccattatatctgggcatgtgcagaacggcgagagcgagggaggtttgggttatctttgcaagatgcatagtgctggttctgatgttgataagccgaatcccagaacattggaatgcggattccaagcttgttctaatctgggagctttgaaagaaggaagatgtcttcatggatttgcggtgaaaaatggtttagcttcttccaagtttgtccagtcttccatgttttcattctattcgaaatctgggaatccatccgaggcttatctttctttccgtgaacttggggatgaagatatgttttcatggacttcgattatagcgtcactggcgagatcaggtgacatggaggaaagttttgatatgttctgggaaatgcagaacaagggaatgcacccagatggggttgtcattagctgtttgattaatgaactaggtaagatgatgcttgtccctcagggtaaagcctttcacgggttcgtcataagacattgtttctctttagacagtacagtttgcaattccttgttatcgatgtactgcaaattcgagcttctgtctgtggctgagaagcttttctgtaggataagcgaagaaggaaacaaagaagcttggaatacaatgcttaaaggctatggtaaaatgaaatgtcacgtaaagtgtatcgagttatttagaaaaattcagaatcttggaattgaaatcgactctgccagcgcaacctctgtcatatcttcttgttcccacataggagcggtgctactagggaagtcgttgcattgctatgttgtcaaaactagcctggatcttaccatctcagtggtcaattccctcattgatttgtatggaaaaatgggagacttgactgtagcttggaggatgttttgtgaagcagatactaacgttatcacttggaacgcaatgattgcgtcttatgttcactgtgagcaatccgaaaaagccattgcattgttcgatagaatggtttctgagaatttcaaacccagctcaataactttggtgactctgcttatggcttgtgtcaatactggctctctggagagaggacagatgattcatcggtacatcactgaaacagagcacgagatgaatctttctctttcagctgctctcattgacatgtacgcgaaatgtggccaccttgaaaagtcacgagaactgtttgatgctggaaatcagaaggatgccgtttgttggaatgtgatgatatcaggttatggaatgcacggagatgttgaatcggccatagcactttttgatcaaatggaagagtctgatgttaaaccaaccggacctacatttcttgcgcttctatcggcttgcacgcacgctggtttagtagaacaagggaaaaaactatttctcaagatgcatcagtacgatgtgaaacccaacttaaagcattactcttgtcttgtggatcttctttccaggtctggtaatttggaggaagctgaaagcacagtcatgtctatgccattctcaccagacggggtcatatggggaacattgttgagctcatgcatgacccatggggagtttgagatgggaattcgaatggcagaacgtgcggttgctagtgatccgcagaacgatgggtattatataatgcttgcgaacatgtacagtgctgcaggtaagtgggaagaagcggaaagggcacgagagatgatgagggaaagcggagttggtaagagagctggtcatagtgtagtctaataatctttgatacaatgaatatccttgtgattcatctgtttgaaacacatgttcaatggacaatgatgcatagattagaagattaattagctcaccaaataagtaaaattacgagtcgattacgaccactttaattttggttacacacattgatcatgacttgttttgaagaagaaacaatttacgtaaagaataaacaaaaatgggagcagacacgtttcctttcccttggaatattttacatagatttgcattcactgtatcagaaaaaaaaaaaaaatatatatatatatatatatattttacattagtaattttatactatttgtctctatcacatacaactttattattttttaattcttgtgggaataaaatttcaaaggcaggaacgggaagtccaccaaaaaggtgttattgtaaggaatcaaaacatgtcacgtaatcactaagaattatattgtaattatttttaatccaattcttattaattaccttttttttattaaggtcacttgtacttgtctctgtctctgcaagtctcatcagaagaggaagagaatcaatggcgagttgcttcagctacgtgtcttctcgtaacaaatgttaccaatacagcttctctcgtgctggtctccgatcatctacctccgatcttggcgacggcaccgtcttccactgttggatcccacttactcacatccacaccaagcccacgctcctcctccttcacgggatcggagctaacgctatgtggcagtgggaccgcttcatcgaccgttttatcccccgcttcaacgtctacgtaccggacctcatcttctttggcgactcctacaccactcgtcccgaccgctcagagtctttccaggcgacttgtgtcatgaaggcgatggatgcttacggtgttaggaccatgaccgtcgctggcctcagctacggtggttttgtggcctactccttggcggcgcagtttaaggagagggtagatcgagttgtgctaatatgcgccggtgttgctctggaggagaaagactcggaggatggtatgttcaaagtgaagagcccggaggaagcggcggctgttttgtttcctcagtctccttcgatgctccggcggcttctccagttatctttctataaaccgccgatttggatcccttcttgctttgccatggactacattcatgtaagtcttcaccttttttcactcttactatttctatttttctatgatgattgatgcttgtgaaatgttaataatgggaatctttcatatataggctcgtttattgttgattagggatggaatgaaataatcttccgatgaagcttagtatcaataagtttagtccttttgtgtattctttcatttaaatgggcccaccacatacttttgagttttacagacaaaatgtttgtgtgattattatggtgttgagttgtttagtttagtttcaaaggcatcactctttgatgtaagctagactaagagtagtttgtttgaaaagagtatttgtattctgatgttgtgaggatttgttgcaaggtaatgtgtaaagactatcttcaagaaaggaaagaacttgtggaagctctgcataagggtagaagattcgccaatcttccaaagataacacaggtgatctctctctctctctctcagttcatacaaatctatataaatttaaagattatcattgtttgaatcctggtaacattgatatgcagccgacattgatgatatggggagaggaagatcaagtatttccagttgaattagctcatagattgaaaaggttttctaatttcattatcacatttttccataatcatcatcatttttttctaaatgaattgtcttgtgttgttgtttcagatatttaggggaagacagagcacaattggtgttactgaagaagacaggacatgcgattaatgaagagaaaccaaaagagatgtacaaacacatgaaatcttttctttgcactgacgcaatgattcctcagaatcaccagatcaatgctaagagactcatgttagcaaacttgatatccccagatcagcagatcaacaagtgatgttactgcagaaaaaaaaaaagtgttgttagaagacataatagttaatcatgtttttagcttgtccctaaatgtgatttgtatcgttattgttaaagaaagacattgcttctaatagttggaattaagaatacttttatttcaagaaagtaataatcatgttcttgaagcttgccttttctttctcataaggttgtcaattttatttaatctcgtagtactaaaatgatatatatatatatatatatatatatatattttttttttttctcatttgatcaaataaaattatattgggttgctttaattttcagccctatactagttgaaatctcaacattccaccctaaacttttaggcacttgaaaaaccaccataaataattttaatctcgataaaactacatgtactttcggatttgttcttaaaactacgcctccaattgaaccgaccagttaaccgataattatacatccggtttgacttacccataatttaaccgaaactaatccgattttgactctattttagcctaattttgacccacacaaaatgtaaataaattgtcttattaagaagtaaaagtatttttattaatttgtatttgtgataaataattaaaaatattaaattattacttaattttagcaaaacttaatatgacaaaatataccccaaattatattttgagctacattttgttataaaattttgataatatacaaacatatacattttccttttggcaatcatttatatttttttataaatctaaagctatgtcttttttaaaacaaaaatattcatttttcttgaaattataatatatgacctttgaactctatatgtaatgaaattcaaaatatatgccaaatttatttttatagatatccgtaaacaccacaatcaaagtatatattatggtatttataaatttatttttctttatagattcagttttctttttatatattcaagatgagttatatatgtatatatatatatatatatttatatgattatggtgtttttaaaaagaaaatgacctttgaattattaaatttagagtatataccaaatacatttatatatataacaccattgtatttataaaaagaatttgttgtctattttgttatattattttgcggtatattttgtttattaccaaaatatatactaaaattttattatgtaattttgtgtggtatattttgttattttattattttggtaaaattaattaatttatttttaattttttataaaaataaatgaaaataaataaaatgtatttttcttctaaagaatatattttttgggtataaattgggttaaaatagagtcaaaatcggattagttttggtcaaaccggatgtataattatcggttaactggttggttcaattggaggcgtagttttaagaacaaatccgaaagtacatgtagttttatcgagattaaaattgtttatggtagtttttcaagtggctaaaagtttcgggtggaatgttgagattctaactagtatagggctgaaaatttaggcaacccaattatatttactaaaactactaataaatgataacgaaaaacaaattgtaaaaatagtttaatttaaggggtaaagttggaagttggaagagtgagagagagttgtcttgtttcatttgagtctactcgttttttcttatctatcgcaaaactctcccgtcgtcaccattcgattacggtatgattcagcttctctcgtttgattagagtcatccatagaatgttgtttttctatgttttccttcacttgtcttgatttttcctctaactaaatggtggtggctccaagctcgtgtttttacagatttgttcactcgaatttctttagaaagctgtgatttttttctgcttagtggttgaagaattcgtatgtttcgtaatgggtgcaagcttatttgcggtgaaagtgaaactctttttgtctcgggtcgaaatttcatgaaaattgcatataatcttcttaggtttttaaagctttcaactttcggtttgtttgttgaagaaattgggttttgttagctgaatctagttcttgtgttgcagggagtgtaatggctcttatacaatttggaagttcatgtgttgctcaatgggggattcttcgtcctcggtttgctgttaaagctttttatccaagcagattggagtctcaccaagacaagtatgattgttgtagaattttaatgctttgttgagttatattattatctgaaaggctaattgaattgtttttcttttgttaaccttttgcagttgcatcagccaaataaattgtctgggagcttcaaggtcgagtatgtttgcacagggctctttacccttcttgtcattgacgggagtatctcctaatacacattctcgtagaggagctcgcttcactgttagagctgatactgtatgtttacataccctttcttttagactttgaatgaagctttttttttttttttttttttttgctgaagagtgtgtgtatttgtgtgttcaatttccaggatttctattctgtccttggagtctcgaaaaatgcaaccaaagctgagattaaaagcggtatgcaattctatttcactgagttccctaatcaggaaaatgcaacactcatgtgtagcattgatgtttctctttgatgagcttcatgtgttcagcttttaagttgtgcttttctatagtttgacaatgattctactctgcacctattttgcagcttatcggaagctcgctaggagttatcatccagatgtgaacaagtaagtgaagggtttagtttactttgtatccagtataaggtcttcgtctgtttatattatttaccttcctgcatcaagattggtgtgtttcttgttacaactcgattacaatatttgagaaacgctcagtctagaaaattattgcaattcgttggttaagtctctccttatatgaacgaacatacgaccaccaacctgtaaaattttgatgaagaatttctgaaactgcttcaaaaggtttcagttgtcacagttctgtttacactttgattacagggatgctggggcagaagataaatttaaagaaataagtaatgcatatgaggtaaagtcctttagatgtgtttttttatcattctgctgatacttgaagagcctaaacattgtttttattattttcttgcagatcttatcagatgatgagaaaagatctctatacgacagatatggcgaggcaggagttaaaggcgctggaatgggaggcatgggggtaagtatatatgtttctctaagacatttgaatcaacattctgatgataagaatcttatctgaaattgttaattttgcaggattatagtaatccgtttgatctatttgagtcattattcgaaggaatgggtgggatgggaggaatgggcggtggaatgggtagtagaggttcaaggagcagagctatcgatggtgaagatgagtattactcactaatcttgaatttcaaagaagcggttttcggtattgagaaagaaattgagatatctcggttagagagctgtgggacttgcaatggttctggagctaaagcgggaaccaaaccaaccaaatgcaaaacatgtggcgggcaaggacaggtggtagcatcaacgaggacaccactcggtgtattccaacaagtgatgacttgctctccgtgtaacggaactggggagatatcaaaaccgtgtggtgcatgctcaggagatggacgtgtgagaaggacaaagcggattagtcttaaagttcctgcgggtgtggattctggaagtaggttaagagtgaggggagaagggaatgcaggaaagagaggtggatcaccgggagatctctttgcggttattgaggttattccagatccggttttgaagcgtgatgatacaaatatactttatacgtgtaagatatcgtatgtagatgccatattggggacgactttgaaggtaccaacagtggatggagaggtggatttgaaagtaccggcagggacacaaccaagcacgacattggtgatggctaaaaaaggagttccggttttgaataagagcaagatgagaggtgatcagttagtgagagtgcaagttgagattcctaagagattgagtaaagaagagaagatgcttgttgaggagctggctgatatgagcaagaacaaggtagctaatagcaggagataaaccaacacacaatattagtgaaatgtgatgttatatagattcatcattctctgcttgtcgtctttctaatggttcgtctaacgatggagaagataagcaagaggcaaaagaaagacttattaggtgagaggaaaatttgaagaactctggttttgggttttcctcttcaatttttgtgttttacttttaaaacaaattttatggatttatcaggattcagggtaggtcttgattgtattgtactgctatttttatacatttgaatcttcttttcttattaatgaaaattttatcaaacataaacaacaaatgtacagttgcagaagaacagtcagaaatgaataggagacaaatgtcttaagctgcagtgactattgtttgaagcagagtttccaagtccttcaatctacaaacaacaaggaaacaccataaagttagcagatgggtacgaggaacagagagaacctttacgcataatttttgtgagaaacttcaagtttgatatatgatcctacttacttcacattgctgagatcagggtatacggcaatcgcatcattgaaattctggataaaaaaaaacaaagtttccgcctgttcttaaaccaaagagcaaaagaatagagaagtgaagaagatgttgttgttgtagaccagacctgatcagaggttgaagaagtgtacgtgatcacacatgacatccctgcttttgtagcagcctatatatagattaaaagtcaaggcattttaagattttctttcaagaatagcgaggacaagcaaaagataagacttttgacctgcaggccaatcacactgtcctctacgaccaaacagtctttcactgaaacacctagcttctgcaatcaaccaacatatacagaatgtgaaacttgggctaattcttcttgttaagttatattaactttcattttacttgggagttatattacctcggcagctgtaatatatatcgaaggatcgggttttttctccttaacatcatcccctacaaagccaaatatacaaccaaatggattcaaactttagaaaagtgtttaacacataaaatgcaagtataagaagagagagaatgtgatgaaatcacctgcaaggaagcaatcaagtccttggaaccgctcctaaacgacataaagtataatcgataaagaaaaaacttgaaagaagcatggtagatcagagattggcgaaaggaaacaacttacgatatcgattagattctcgagacataagattactgaactctttgtagctgcagaacaaacagctagttttttcccctgaaagcatttcaagaacctattctcataaagagctaaaaatacagtttagacaattataaaaggctaaaaagaagatcttattacagcagcttttgcttcatccattagtcttattacaccaggtcttggttctacctgaaagtaaaaagcagagagagttagtttctctcagagtaagtaatcccaaaactacgatttggctacttacacttcctgattttatgatttctttatacctctcagttttccaatcctgcaaaagataagaatccaatcttttaacatcaacattgcagtaaattatagatttggttcttcttcaggcaagtgacctgaagagtatcgattaacttggctcgatcatcgtcattctgaggaggagagtcaaaaatggtggaagttggccatccattttctttgaaataccaacgcattttcggtttcccacctccgactagattctgaaacttatcgtagaactcgaggctccaatcgagagactcagaggaagaaggaggacatcgaacatcgaaatgcgagaaagcatcgttgtaagcttgacggtgtagattctcggattcgagaatcacgccgtcgcaatcgaaaatcagagcttctagagaacgtaaaggcaatgccgagacaggagaagaaactctagatttcgaataaacgcttcttgatttgaaacgcagcgtttggaaacgaggaaagccgatgagcgacgaggaagaagtaacggaggaggaaccagcggtggatgatggagagaagagaatcgcagagtggttgcaagaaaccgccatatcgatgaatctctgtctctctctgggtgtgtgtggttcttctcaagataaaatgaaaaaaaaaacaatctgtggtggctataatttgcgaaaacctaattttctttacaaataacggtcaataactaacttttaccgctccatttttgtatttttgttcaaataattagttgatgaatattataggattttgaataagattctgtaaaataatacttttttgcagatataaaaaactatcatcatccaataaagacagattttttataagaaaaaaatcaagcaatcaagcatttccaaaactatgatccattaaatgctctaaacttattgtaatgattttggtaggggttgatattcgattttctatcacattaattttatttaaaatccttgtgtttcatatatataaagggaagttagtataagatggtgacaaatattaaaagggcgtggtccatgaattcatcatatcttataaaaggattcagtgtgtgtgttaggtggtgataaacacaaattagtctttagatcatatgcaacttgatgagtggtggtagatttggttggtgaaggctttttttgtcattagcccaatttccggacttccctttaaattttttttttgtcatcatccaaattttgataagtggcatcaaatttcgaatgttttaaatgagctacctaaaaaagaaatattatacgtaacgtggcataaattaagttaacaaacataaatattggaatatatttttatactttccaaattctggtttttcaaccttttgttttgttttgagctttgtaaatcaacaaccaaaagtttttaaatgttatctagtatctaccaaattttggatcggttcaatcaaattgaatcattctttactttttagcatcatctattataaaatttattttttacatgaaaaacgtttcctttaacggtggccaaaagagacaaaagcttccacgtcgcctgaaaaatatctcaaagcacacaatttacataaatacccctacgacggccaacaaccctctttttggtacactagtgttctgtctgcaaaacaaaaaactctgaaaagtcgaaaccaaccctctcccttataaataccttcttctctttccacattgtcttctctctcctcacatcaaaaccgcctccatttctcattctctctctctctaaaaaaccaaatccagagtcagagaaaatctgtgatggctctttccaacgcctcctctctctccaccagatctatctacggcggtgatctttctcaccgtccaagcaaccgtcaatcatccttcacatttcatcccgccgtcaacaccaagcctaaatccgttaacctcgtcacggctgtacacgcggctgagccagctagaaacgctgtttcagtcaaagaatccgttgcgtcttcttcgtctggtgcattgaaatggactccagagagctggaaactgaagaaggctctgcaacttcctgattatcctaacgccaatgagcttgagtctgtgcttaaaacgatagaggcttttcctccgattgtgttcgccggagaagctaggaatcttgaagagagattggctgatgctgctgttggtaaagcttttcttctccaaggaggtgattgtgctgagagtttcaaggagttcaatgctactaatatcagagacaccttcagggttctgcttcagatgagtattgttcttacattcggtggccaggttccggtcattaaggtcagatcgatgaattcaatctttcttgttttttcttttgagcggaatttgagagaatttgtgtgtttaggttgggaggatggctggtcaatttgcaaagcctagatctgatgcatttgaggagaaggatggagtgaaattaccaagctacaagggagataacatcaatggtgatacttttgatgagaaatccaggattcctgatcctaataggatgattcgagcttacactcaatctgcagctactttgaatcttcttagagcctttgccactggaggttacgctgctattcaaagagttactcaatggaaccttgattttgttgaacaaagtgagcaagctgacaggtacacccaactcatcaactcaattttgaaagcaaacttttctagatgaattagtgatggtgatagcagctatcctaggttatgtaaggtgctaaaggttttgctgtacaggtaccaggaattagctaatagggttgatgaggccttggggttcatgtctgcatgtggacttggcacggatcatccacttatgactacaactgatttctacacatcccatgagtgtttgcttctgccttatgaacagtcccttacaaggttggattcaacttctggtctctactatgattgttctgcacacatggtctggtgcggagagcgtaccagacaattggatggcgctcatgtcgagtttctcagggggattgctaatcctctgggcattaaggtacttttaactttttcaaagaaaaatacaaaattcaacgcgtaggtagagcgataatatgcagcttcttactgatatacttaaaccaatgattaggtagatattacttttggtttatgataaagcaaaacagagtaacatttgagaggtttatgcttggtctcgtagcattttttgtttttttcttctcttatcttgcaaatcagacggttgattttgattgtcttttcttcagtgagagactggtagctggtttgatttgccactgaataacgagagtttattaagttgagttttaagcggaatcgattgaataaccaaaactcttgttgcaggtgagcaacaaaatggatccctttgagctggttaagctagtagaaatcctgaatcctaataacaagcctggaagaatcactgtaattgtgagaatgggtgccgagaacatgagagttaagcttccccacctgatcagagcagtccgcagatcaggccagattgtgacatgggtctgcgatccaatgcatggaaacaccatcaaagcaccttgcggtcttaaaacacgtgcctttgactcaatactggtacacactttataagctaaacctctcataagcgtaacatagatttgccataacagagatttaaacttcctgtctttttctacaggctgaagtccgagcattccttgatgtgcacgagcaagaaggaagccacgcgggcggtatccatctcgagatgacaggtcagaacgtgacagaatgcattggagggtcccgcactgtgacctacgatgacctcagttctcgctaccacacacactgtgacccaaggctgaacgcgtcacagtctcttgaacttgccttcattgttgcagaacggctcaggaagagaagaacgggtagccagcgtgtgtcttgagtccggttcttcccttttatacactttttgattccaaacaaatcttttctctttgtcctgtgactgtgagttggtgtctttatgacctaagttaaaagccccaaaagcctctctaggaggagtaaacctgtttctgctgtggacagaccatgtcatgtcattgttctttatgttaactttaatgtcaaaccgtgtcacttacactagtgtatatttctttttacatatctacacgaacatgaaacttgtcttctagttagtactaaagattgatcttcgtctttcggctattcgtaaactagaaatgaacaaatctttagaaaacgatcttccaaaatggcccattagctcagttggttagagcgtcgtgctaataacgcgaaggtcgcaggttcgaaacctgcatgggccatttttcataatatctttttttttcttctgagtttcgtcgtaaataaacaatccgacgccgacggttttgggaccccccactaatcaatatcgtgtcccgctcacttaacccaaaatatgatcccctacgtacctctttactctcttctggtgctcccaacaaccatacttcgtctcgatttccatcacgtgttctacacttctctttattccacgtgtcatgatcttggctcatagtcactctcaattaccaaagactctcacacactagatcatacaataacacaacaatttaaatcaagcagtcaataatcagccaactagctttttaattttctctacaattcctctgtcgctctcaccagttaacagctacagcacaaaactgtaaccacgcttccgatctctaaaacctgagagagagagagagagagagagagagagacagagagaagtgtttcaatagtttggcgtgaagatggccggaggaggcggatacggcggcgcatcggggaaagttgattacgtcttcaaagttgttctaatcggagattcggctgttgggaaatcgcaactacttgctcgattcgctagagacgaattcagcatggattctaaagccaccatcggcgtcgagttccaaactcgtaccctctccattgaacaaaaaagcattaaggctcagatctgggataccgctggtcaggaaaggtacgatttctaagattctctgcgttttggaatcttaatccgaagaattttactggatctgtaaatgtttccatgaaagcgacttggtttgactagaagatgttgcatagatttgtttcctattttgtacatctactttatcttgaccagatcctgaatttgttatcatcgaaatgtatacttgtatttagtgttttatccgatcgaacgataaagggaatctggaaaatcatgtgtaggaataatgctccatctcaattttaatcagcatcatgtgtaggttcgagattttgtgtgatttttagctgatttgaatcaatttggaacagaagatttggaatcggtctttcgtttcgtgactttgcttttgttgctcttagcagatacagagccgttacaagcgcatactacagaggagcagttggcgcaatgctggtttatgatatgacgaaacgtgagacctttgagcatattccgcgttggcttgaagaactgagggcgcacgctgataagaacattgtcatcatccttattggaaacaagtctgatctagaagatcaaagagctgttcccactgaagacgctaaagagtttgctgagaaggaaggactctttttcctcgagacctctgctttaaacgcaaccaatgtcgaaaactccttcaacactctaatgactcagatatacaataccgtgaacaagaagaatcttgcatctgaaggcgactcaaataaccccggttcattggctggtaagaagattctcatcccaggttctggacaggagattcccgctaagaccagcacttgttgtacttcttcttgatctgtctcctactcaagcaagattcattttttttcctcctgaaatttgtgatagagaatgctactttcattgtatattctttttcgaatctggcttgtttgctagttcattaaacattggtgtgcaattggacaccgatagaaagtattggaacaaatagcttttgaatgaaatatgaaacaaacagtctttgagagttaacgtcagcttcaagctgtctcagcagtcttgaaacagttctcagctttttctttttctttacttctatcagaaagcctctggataagttggtgacaatcgactgttgtgaccataacggttaagctagccttgcccttccagcatccaatggctattgttgatgaattcactttgaattgttctgacccgagctgagaatctgtaggaagcacaaacagttaaaatcatatcccacatgaccaaccaaaagtatcttatataaaaccgatacacaccatcaacgagaaccataacgcaagatcccaaggctagttctgctgctttctcaccaatctgtggatgtatgaaatctagaaacttgattgatttgtgttgcaggagattcttgaaatccgccattgttgcataaagtatttgcttggtcatgtacggaaggatcacaggcaatccctctgacgttattcggaatgagcaacagttggcttcacattcttttgcagattgtttctcctgcgtttttggttagttaataaataccgcctctgctatatttgtatttgatcaagagagagagagggatgaaactatattgtacttacaaacatcttgaggccaacagaggagatcttgagcggcttcccaactgcaaaattaagctcaagaacattcttaactgctttcgaaacatagtaaatccttttcacgtttccgtggctgcttatgtcgctgtttctagtcacgagatgaccatacagcggaaacgattcatctttaatgccgtaaaatgtcttgatcccgttgatccctgtttgatctctcaagaaaacaacagggtaaaggcctttccacttcccttgcattgatggtacttctctcttgccttctatatcatcaagtttttgagccaattctacgataccttcattccaggtgctttccatctccggcggctcaaagccattctctgaaactgttgcttctaaaactatttcctctgtaccctcttcaggtttagtaaccacagtgtcagatactgcttcatacgaagaagacttctcagatgagttgatgttgtttctagtagacaaattccttttctgagttactttctcctgaaagtctgcaagaaaatgatccggaattcgtattaaggaatcaactagagaggttatgcaacagaaagttcttctaattcacctggtaaaggtgaaactttgtgaaggactgcaatgaaaaatcccccagtgttttgatcatgaggcagtatcctcatacaaagttcaaggggaagatcacagacttcttcggctgattcatcagaagagatagaagccatttcttcatagctgtttttgccacccgatgagtctttatcacttttaccagaaggaaacatgctcctaagaactccgtctctctgtgactttggaacatctttgtaagatctataccagccacctctgtcatgcacctgaatccacacagatacaaaccatgattaaagcttcattactactcatccttacttcaaagtaataggtaattttttaccttccatttcgtaagacctggtcttctaataagttctggaagcttatctgagacatctacaagctcaacagagcatccacatctcctcagaatctgaagaatactaacaatatatcagtatccagaagaataggtcaacggagaaagaagaaagaaactatcaaattacttcagcaacaacagcttcatcttcaattgggttcattgagcaggttgagtataccattctcccaccaacttttagcagagataaacctgaaaccatacaatgcagataaaaatcaaaacataagattctgagactcggatcatctgagaaaaaagcttacctctcatggcaagcacaacctgtagactatgaagtccattgccagatccagaattcctgtgcagaaaccgaggaaaacaagtaagaatcttgaagcaattggaatcaacacatgtcaatttaaaaactcataaatagagaaaccatcttcgccatatgtctggagccttgcgcagagtaccatcaccactacacgggacatcacataagacacgatcaaaaagaagctgatcgatgggatgaggattagtctcagatgctacagacaaggttctcttggtgttgcaactggggaaatgttgaccttcgttgttagtgaccatcaaattggtcgtacatgttcttttcgtttggtgaataagaagattagatcttttataatcaacatcattcgccaccacctgattcaaccaaacaaaattagaaataaacatgatctatcaaccaaaaaaatgagtaaagatgagagagtattacaaaccattccattaggtagagatcctggttctgatgattcatgtattatttcaagcagctgaaatgtcttggaaccaggtgcagcacacactgttcagacaagtgaatcagttaactatattactcctcaagtccatagccatctgtaataatgtcgaatacagttcactcactgtcgagaacaaaatgatctggatgtacatcaaggaagagaggaggtacctacgtaatcataaaagtcaccacgaaaactataaaatgtaccgatgaatgtcattaaagaatgtaacacaaccataccatgctaactgattcttgcctggtcatgttcccagcttcagtttctaacttaagaaactcatgaaacctgaataagacaagtaagcgaatggaattgaatacttgttctgaagcaactggcatgaaaatgtacctctcaagtgtctggtttttcctaatctccttgcgtgaaaaattagaatgccaagcaagattcttaggataccaaggcagaggcttgatagcctccaattcaccactctctatagcctaagtaaggaaaacaaatctgagtgcttcttattaatgagagactataaaagagaagagtcatgaattaacctcagcctgaagagatatcatgaaatcattctccaatttcagtcgaatctcatcacaaaattgaccactgaagaatcataaacagagaccacttacttagtcaaacaaaaaaacttatactttgaaggatactaaatgaagtaaggatacatacttggaataaactctgaaagcagcaggtaatggcttacgaagaaactccataaacgaatcccactcttgagctttcactattctttgttccttatacacaccgcaacaatgttgattagaagaaaagtttccaaatccatgcaagtgtcattgattctatacaggtaccttgtaatactcctcaaaatgaagatttgagcagatgggcttttgcaagttgttggaatcaaaggaagcttcggatttgaggggttttcgaacattgtcgtcgttgctattttcgatttgatttctcttcgaagttgaacctctgtgtcgtctccctcttcccatttttgttgttaccgtcgccgagtttttttgttttcgccggaggcgtcacagcgccgatgggttttatgggtttttaaactaaaattgatttcggtttggtttacattgcttttgagaagaaaataaataaataagacacgcgacataaagcatgctttgggcttacgactgggccgataaccatatcttccagccgtcttaacactgaaaagcccaatacgttttgacttctctgtttcttgctttttaagccaatgactctgttttttgacttctctgtttcttttacatgttgtgagtgacttttacagaaaaaaaacagttctcattgtccgcatcacacgtggatatcctcgcagacattttctcttgcgttgcgtctcacgcacagcaactaaacaccgacacagtccttagaaggaagttcaagagagcatgctctctagtctctccaaaacctaacagagcctcaactacttaacttcgagaacgaggcttacaaaacctacatgatgttcctccaatacatggttacttgcaatccaaacgtctccaaagaactagatctcgagtctcttctagtcactgaatgcgcaaaaatcgtgaagatctaccttaaatgcacagatccacagcaacaacaacaaagaaaaccggtcttatggggttcttccgatggaatcagatcgtgtagaagaagcaacggcgagaacttcgctacttgtttcttcactcgaagctttgtgctcattagaagcagagtctctgaaaaacacacatcttttgttatagtcgagtggatagaccaaaatcaatggttattttttttttttttaagggaccattagcttaggttgagaatcatcgattgtgaacctattatgttttcatttttgtttatgaaatatttgcatttttatcaacaaaaaaaaaagtttaggaatcagaagacacaattacatatatatttttctatggattattctaaagtgcaaaataaattatatacatatatctttggattctagttaaacaagagaagtattgcaataaaggaaagtaatgtaatagattatagacatatacataataacataaataaagacgcacaaagcttatacgtactttatttaacttgattagaggtgaatgatttccacttcatcatacaaacatacaacacaagatcatctgatattctcaagcggcatacatgtaaaacatatgcatagacatactcacgcgtgcatgcatatgaaatcatagagcacatacgaaatcaccatttctctcctcatcatcatcaacatcatcataaatatcagcatcatcaatatcatcaagatcaatgctcccatctattaaccctaatccaccattattatccgtaccatttactccctttcttgcttcctctattatcttcactatctcttcaacactctgtcgacacttctcttcttcttcttcttcttcttcaactccattatcgcatttctcttcctccggcggcacaaccaaagggcccttcaagaaccacgggtgcttttcgatttccggtacagttattctctatgtcatggtttcaaagttcaaatttcagttttaaaagtagtaaccaatgtagaatcaatccatatgaaacatttgttaaaccaattatcggaaccggtatggtataatttacataaactggttagggtattatgtgattaccttatcagggtcagccacaaagatacgagacaagagatgcttgcactcggaggaaatcctgacgtaatccggtatggtgtagtgtacacttaatatcctctgcaagtaatattgatcattcacattaattattattcttaaataaattttaattagtgaccaaaaaaagattatatataaaatgctaattagtggaaagaacgtttgatataatttaaggggttaatcttacagtacctgaatggtgtttctaatgttccgtggatcttcgggatcttcaaagggataagcaccaactaacattacatataaggtcaccccacacgaccacacatctgcaatctatatacatttaagatcatatgttaatataaattatatgaccttctttatcaaacaagttgttgttgttattaatttactttaatcaatctattattgtagttaattaataatttaatttgtacctttccattatattctttccgggacaagacttccggagcaacgtaagccggagttcccacggtggattttggttgagagtgtaaaactgatgactgcaattacagttcaaaatcaaaattatactcaatgaattgtgtctaatcactgaaggttacttagattacatggtgtacatatagttataccttggagtatccaaaatcacatattttaagatgcgacgacgggctcccgtctaagagtgtattctcgagcttaaggtctctgtgacatatttgctacattcaaaatgaacaaaataaaattcagtaagcagtagtttcaatggtatgatatcacttttggagattattcatattagaagactaaacgtaccatagcgtgacaatagctaactcccgagataagttgtttgaaataatatcttccctaaaacaataattagcaaaagttaattatcaatgtaattattagattaatcgtcgctaatgatgaattaaagttatacttcgtcttcgctgaatctaccggcattgcaaattctttcaaaaagttcaccaccagctgcatactccattactatggcaagatgtgttggtgttacaaaaacctgcaatatagcccaacaataatccaaccaaataaacatatttattttaattctttttttattatattcaagatcgagacgacctaacgattgcttctatttttatataatcttgaatttgtaattgctgtcatatgaactctaatttggaccgtttgagaatgggacatatgaaatttaatacattcttttagaacttagaagaagtctaaccatgtgaaattaatacacataaattacatggccagatatttcttacttttatattaccgtggatcgaaattcaaactaacgtacggatatcaaatttcacgccaattttatcttgcagtggaaaaatatatgttaaaattgaatattttgtacactaaccataattattgccactagcttattatcacgtattggctgaaatttgtcatagatttcttttttgttttgttcgtttatgtgtgttttctactaaaccaaaaatcagacacgattatatatggatatagtcatggttttgatcattatcatatacatacgtacctctttaaatctgatgatattaggatgcttcaagtctctgtggtttatgatctctctctgaacatgttcatcaatctgtataaagcccatttcataatttgaaaaaatgattactaaaaaaaaagaaaaaagaatatttacgaggagattaaagaagaaaaaaaccttaaggcctctttcgatgtatttaacggcgtaaaactctccgttggctttttctctgacaagcttagcaactccaaagttaccggaaccaagatctcttaagatgtcgtatctctccattgatcggaggatcaaagaacagagaaaagaaagagaatattgttgttctatgtctctatcaaaaactatgtcgttttgcttcctcgaggttattaaagcaagatgctaaagaatttaagctttttttctctcatggttcagtcacatattagcatatttatatacagacatacgtacagatacagtcagcaccaacttacctttatgggcccacgagactgttgggccgtcaatattattgttgaatataggcccatttgacacgtggcatctctcaaaaacatgaacaacaaggacaggaacaaggtggtgaacttgcaaaccgttaaatttggtttgtctcttcatcgatatttatgatgtgtaccttcttcggaagagaccaagaattatacgttttctcgcaagagaaaaataattcattgtcaatacatataattaatccttgtatgttatatagttcatcaacatctcagagattgaaaagtgaatacctgattaataaatgcgattacccatttttagtaatatattcaatcttttaaattgaagttttctaccaaacttacctgttttaaaattaaataaagatacctaattttcttatcttagaaaacataaagaatggcccacattttagatttcgtgatcattttccgcaacccaataaacaaacaaactcatctaaatattataaatgaattaataattgagcttaatctttatttacaaaacaaaattttagatgtcgaccaaattaacaggtcaacggctaaatgatcaaaagctaaaagccaataaaaaatgttgcttaaacaaattacgtggtctattaaacaatgcgtgccttagatcattatttgatccttctgtttgtttctttcattgtgtataatctttttcttgctttttttttatagataggtaagcaaaatgtttagcagacttcgttatagtcgccccccataatgtttttgtttttttctttcatttttatcgttttagtataatgtatttgcatataaataatgtgtgtataatcaaatactatattcgtgatgattcaaacagctctgttttttttaagatacgcttaacaaaatcctctcaatgatctcttgtgatcttaaggaaaattatccagcttagtgttatcttatacatatccttcatatgttattttgttaagacttgagatatgttaatctaaacaatttgttaagacacgaacttatggaatagagatatagagggttaagaagtcaacgccttgagaaagcgaaatagtagaattaataaggtaaaccaaagcattcgtatacgtggcgatatactatccgtacatgtggcaatttcgaagcaagtgacaaaactagatgccaagtggaagtggtgttttgtgcgtcagggcgtaatggaaaaaggttacgtgggaggttaatattgggccgtgatgtaaaagcccatcaccgttgagtggttgggtgatagcagaattgtccccacattttggttgctattattggaaggctattatacatttgaaaaacttatgaatttcattatgatttcccaaatatcgagaccaaaaactattataataatgaaatttcttaatttgttggaatcttgtatacctttttcccacaatatggattacatttcgctttgtaatctggttaaatgcgaaaaggatgtcaattttattagcataaatagaaaataaagctatagcatacaaacacatgggaatttttctagtaaaaagttaacttttcaaggcttttagaaaaggcaataaaagaatcgcactagaggatttgaggagtgcaaatgcgaaattggctaataaaaaattgattttctacatatattttatataacaaaacattttgatttcactttctatattcaaataaagtggatttcttttttaatgtattaaaatattttcattgtaagttgcaactatgacacctttaccacattgtttgagctttttcagttttatttcattttgtgttttacataagaaaatcgaaaaaggtctctctggcccatataaatagacaaatagtgaaacaagttaaatatatttccaacaaaataagccttgtttatgttcatttatttatagagaatcttcgttattgggccgactaaggcctataacgagaaatcaaatcataccgaaaccatagcaaccggttcgttccggtaaaatcataaagcgattcaacatgttaagaaagacaaaacctgcacatattaaaatgatcaagtccttattacaacacattcaaacgtttggctggctatgtacaaaagaaaagttcctgcaaaactcaaactgtagaagaaaacacaacaatggcatatcattaacacaatgctcttcagggctccggagacatcggcggtagtggcggagatggagacgtgggagtctgaggttgctgcttatcttgtgaatcagtggaagattctttcttgtgtgagaaacttaagcttttcctcctaacaagaagatcaccaaatctacgtataaacgccttcttcttccttgctactgctcctttgtcatttaactctccttcttctaaatgattcccatccaaattctccaaatcctctggatttatcgtctctacttcttccaaaaacgtacacgaagacctccttttgtgatgcatttgtgcatgtggcgtctctgctatatcaaagatcgaacctttgaatagatatgaatctgaacttggagagtttccttcaccactttcgtcactattctcttgatgattcccaccgtttgcgttttttgtctcttcctctgatgtttctttgttgtgcttgtggttgtgattgtgatgagctagcttcatgatactgaaactacaagttttcccaatcatcctcttatcgaagttctgatgtgtctgctctttcttctccttgtcttctttcttctcgctatgttctttcttctccttcttgctctctttcttctccttcttgttctctttcttctcttccttcttctccttctcctcaatcttcttctcaacaacttctacaacttcctttggcatcgactcttgtctgtttaagcttctctgtttctcttcctccatagctacctctatttcagacagcatcttcttcaacttcttaatattgtcattagccacagcttcattaaccttcactctctcaatctccttcaaagcaaactgcagttcctcttccttatccaacaaggcatccttcaaattcgaattctcagctctcgcaatcccagctgcttctttcgcaacattagcttcgttaatcgcttgttttagtatatccctaaccttatgattctcttctttagccttcttgctcaaattctcagcagcaacaagagcctcaagcaacctattgttctcatcaagaagtgaattcttctcatcttctcctctctttatacaagtcacaaacacagattctttcccattccaagccaaaagcgattcctctgcttcaatccttagtctctcactcgtgttcttaagtaattcagcatctttcctcacttcctcgtacttgtccttccattgctgagactctatcctagcagcctcgagctctgtttccacaatcacaagcttctctttcgtttggctacaatcagtagctacctctttcaaagctaaagccaaatcatccattgctttctcgttagtcatctctgcatcagtcgctgatttaagctcgttcttaaccgatttcatctcttctaacaattcagaaacctttaaagaagaggcttgtgcagcctcatgagcctgtgcaagactctccttggtcgattccatctcagtcttcaaagactcaatatcaaaatcctgaacagaactatcgtcttcgtcttcctcgctggaatcttggctattgtaagatgtatctatcttctcttttaatgaagcaatctctacctttgactcttctaccaaagctttggtttcctctaactctctcgattgatctttaaacgaatcaagcagtttcttctctgcagcttcaagattcttgatgaagatgtctttcttcaataactcttgttttaaagaaacgacttcgttttctctgttctcaagggaagctttcattttgtaaagctctgtaccaatatccgcaactttgttcgatgaataccttggagaagctacatcaatggacggtttctcatcgacttctcccatagatgatagaatgttttttattcagcgtttccgaggaatttttggtaatggccaatgggtttattagaagattgactaagaatatatttaagaggttgacaaaaagatctattggtcaaagaaagaaaatttggttcaaagaggaacttatttccttatttttagggttagttttatcgagagccgtctattttatcgtctgatattattattttctttggtcaaaagtccaaaatctgattcttttaaaagaaagcattcaacaaatccaaaattatagaaaaaaatcagccattatttgaagagaaagcaatggtgacgaacaaacgagttaagaaaacataagaatttaacaaaagagttaaaaagagttcgcaacacacataataataagcttaaagaacacaacattcttagattgcagacttcttactactcttactactacatacccagagatttaaaaaacacagcaattaagatcttgctttcataaaaaacaaaaactacttgaaccaaatctcggattcttggttggcttaagcgcgttcacctctgatacgacgagcgagctgaatgtctttgggcattatggtcacacgcttggcatgaatggcacaaaggttagtgtcttcaaagagaccaacaagatatgcttctgcagcttcctggagagctaagacagcatggctctggaaacgcaaatcagtcttgaaatcttgagcaatctcacggactagcctctgaaatggcagtttcctgataagcaactcagtactcttctggtacttacggatttcactgaacaccaaaagataagaggaatgttaacacacaatgttacataatctcaaagaatcacatacaaatcgaagaagggacaaaccggagagcaacagttccaggacggtaacgatgtggtttcttgactccaccagtagttggtgcagatttacgagcagcctgaggttaataaagaaggagattaacattcaacttcacaacacaagtattatttgaaaaaagagacaagaaggaacaaaaccttagtagcaagttgcttccttggagctttacctccggtggacttacgagcggtttgcttggtacgagccatctgcgcatttaacaagaaattgaacagtcaattggggattttcattatccataactaaattttgaagaaattggaatactaaacgtcaccacttaaaaccctaatccagatgaatcgttatcgaaccagatataaccaaaaggggcaaaattgactcgaaaaccctagttctcgatacacggctaggtaatgacaatcgcacacagacaaatctggttatacagaacttcgaagcaagaaaaaaacgatgaagaatggatcatccaataaatcgactagactcaatcttcacaggtttatcgatccagcaaacttaaaagacggacctttattttcaaactggaatgggacaaaacccgaaactctattgtcgtaaaatcagatcgcggagacagtaacagaaaaaacattaaaaagtaatggaaagacctaaacccctgatctaattacaaacaaatcatacctgttcttcgcctgagctgacttttgttttgttttgtttttttgtctttcgtaacaaaagcagtaataggggatgattgaagtagtggttgtggccgcaatgtagttgaattattatttataatactcacgaaagggttatcacgatacgctcctttgtgctttctcacattctttatcctacggttcaaactattgtacattgtgttttctcaacacagcccaacggccacgattagagattttaagtgtcacacggattaccaatttcgtgaacgtaaaagttgttgatattgaaaagaactttgaaacagaaagcttattgataaacaataaaactcaatcatacaatatcgaacagatacagatgaaacaagagtcagaaactttaacatattcatatgtttcagagatgaattcaacaacaaaaggtgttcaacattgccaaagaagaaagcaatacacaccacaaaacgtagctaagaagaacacaagcaaatcataaaccgactagacaagaaacagaaagaaaagaaaaaaaaaacaccattgtttccaagtctcctacacccaaaagctttttaagccattatctaattccaactatctatttagaaaaccacccacattcacataatccaactacttcccaatcacaattaagcacgttctcctctgatcctgcgagcgagctgaatgtctttgggcattatggtcacacgcttggcatggatggcgcagaggttagtgtcctcaaagagacccacaaggtatgcttcagcagcctcctggagtgcaagcacagcatggctctggaaacgcaagtcagtctgcaatcaaagagacaagataagaacacaaggttatgacaaaacaagtaaaaagttaaatccatttgtagactgaatcagacgaacagacacattaccttgaaatcctgggcaatctcacgaactagcctctggaaagggagcttcctgatcagcaactcggtactcttctggtacttacgaatttcactgtcaatcaagatcaataaaacagagaaacagagtttaatcaatgacgatatcaataaagtaaaaacacaattgaatttggggaagaaacagattgcataccgtagtgcaacagttcctggacggtaacgatggggcttcttgactcctccagtggttggtgcagacttacgtgcagccttaaattaaaacatccaccaattagaacaaatctagaaatgtgtttatcaagctactcagatcacatgtgagagcccgagtcttacctttgtagcaagctgcttcctaggagcctttcctccagtagacttacgagctgtttgcttagtacgagccatctgttcaacaaattaacaagatttagatccatacgtattcaattgccggaatgtatcgtaagatcaacacaaaaccaaagaaaatccctaattgcaatcgcataatcaagaaaatcaaaaccctaatcaacaatcgccgaataagaacaatctatttacacatgtgaaaactatcgagaatttcagagattctagacaaagaaactatctggtgatgaaatctagctatacgattcatctctaacctaaaatctttatccggaagatcattcggcgaagaaacaagataatggccaagaatagaaactaatctcgcctaatttcgtaccacctatcgagcgattccagtagtttcacgatcaccgaaaaaatatttccaggaaaatcaaagaggatcgaagaatcgtacctcagaaaactctctagcttctccgaatttcaaacttgagctccgaattcgaaaaagataatattgtcagtcttcacgcgtgtacggctattgatattaatttataggcaacgatggtaaagcggatttatatgatcggacggtttttatcgattatcaatgtgtttctcaagttttctaatcgtacgggtaaaaatatcacaacatgtgctttcttgcaccaattcaacggtccagatctagctttactggtttgacgaggatcaccactgctacataattgattgctattggctgaatacaaaccgtcgcggatcgctgaaataaaccgttcggatttagtttaggccgtcacatcaattaatgggctcacagataaggcccattgaatacaaaatccgattggtgcgttacgtacggtacattaaattggttgcaccagtcaaactttccggttcagtactaaccgaaatattggagtcgtcgtcttcttccgtcaagaagaaaccagaatttttacagagatttgaaaatcgtctccattttctaggtatagaatctccaaagagatcgatctgtgcgattcaaattttgttatatcggatctaaatcgtaattttgtgtttttttttcttcttcagatatggattggcaagggcagaaattggcggagcagttaatgcagatcctgcttctgatcgccgccgttgtgtcgttcgttgttggttacacaacggcgtcgtttaggatgatgatgttgatttacgccggaggtgttgttctgacgactctgatcacaatacctaattggccttgctttaatcgtcatcatcttaagtggttagatccaagtgaagcagagaaacatcctaaacctcaagttgttgttgttagctccaagaagaaatcctcctctaaaaagtagtgtctcttcttaatataacttaagcttaataaagtctcaatgaaataactttaatcgattctcgccattgcttttgattgtgatatatcaatgcattgcttcgagttggatcataagaggtgttaactttgagatttgaactggttcgtaagacattcttcttcagtgtttcaagaagagggtttaaaccatgttcgaattcacaccaaacttgataccaagctcaaatgtacattcatgcatgtatctgtagtaattcttcaaatcgattacaataacagagtagaatctgaatcgttgttggtacaaattctttagtagtaaatgaccattataaagacaatagtagacaaagctagaggagagtgacgagaatgaaaatgagtagagcagcgataaatgaatacttgagagcagcgacaaggatggcgaaagagatgaagaaaagctgagacaagacttgaaggctagcccaagtcaacactccagctaatccaacagccacaaagttatcttgatctggattcaacagctctccccacttgaaactgaaaccagcgaattggtctttcttggaaccattaccatcatcgttagtaacaggtctgtttccgccaccagaagactccttggccgagtcgttgccattttgagcatttgttctcaagattaatgaaggagatttgcacaagcgaatgtgatgatgatgatgcggaatgttgtatgaaaaacgaggctttaatgttgttacaggcacaaaaggtctcaaagttagcatagtggatggaatttaggtttttcaaatcaaagatctttatgggtttcttggagtagtcaaatccatctgcaattgaaaaacagatatgccaatatatgaatattccctgaaaacagatctaaaagcttctcaaactaataatcgcaactccaaccaaacatagttaataccagacgaaactatccaaagatttattcaaatctctgcaaactcacctcgaaatctccatgtttcttcctcctttccactaaagcgatgataggtcgcagaactagaagacagcgaaatcaagcggttccggttagaaattggactcgatggctacgattcaatctcacagagacacctttgttcttggcgttttgatttattatttgacggctaggattcaatctctggcacctttcatcatttgtaaaaaagtatcaacctttttacttcgttcttgagctcaaatgttgaaacttaaaacccattcatcacaaagttgaatagataatttgggtaaagtttcaatctttaattcgttcttggctcaaacttacatagatgtttatgaaaaagcgatagaacaatgtcacactttcttagtttctttaatgcaatgcacagatattgttaacctctcctcgtacacaaagcaaaccatcctaaagaagagactaatgattattaccttgttctaatcttttacaaatatgacaaaactaaagaatcatcaaatcaaaataaaaattacaattctctcttttctttataccctaaacaaatacaaacttctataacaaaaacgaacaaacaacctactctctcacccaccaacctactctcaaccacagggatggatttttctaattttatgtgttggtgaagtggaaagatttggcaacacccaagtgctcagctagtcgttgtactgaggactgcaccggtttagataccgaagagagcagctctgggagattcgggtggcattgaggtaaatacgggtcatcatcctctgtgcggctgaaggaagtgagtacagaccggcagaatatgaatctacacaacaacaagacaatatttgacaagagtccatgctttgtgaggttttgattccgaaaactttgagaaaaactcacctgagaatcagccgtctcaagaatggatcaggtaagacctgtgcccagacaagattcaagactttggaagtcaagagaatcgtttcccactcggaaaaggaagcagaaagtatgctctctgcttcatcacataattcctgaagattgtaatcagaaatggtaaagacgcatgccacactataaaaaggttggttcatttacggtttttcaaatcacaagtgcttacagggtcaggtttggtgtttgagaggcccagcatttgacagaatgcttgtaaaggagctgttaagaaaaaagtaaactgacttccatttagtgcttccgtatcatcagtagatgggttctcgaatgatggcttcagaggagaaagaagcatagcaacaggctcgcctctctctgcgccgcccaaaacctggagtttgtttattttattacaatccatcagcaaatatcgcatagttactgagagaaactatcagactctccagagaaatgaaacactaagttatgacaaacctgccttgaatgcacggctagtgtcgctatcaatgatcaagaaaagtggtttccgtgtaaaagggattaggtcaccagggtaaaggttgtttgaacctaaacaaaaacgagacagtgagtgagaaaagtctgatctttggagacatactcaaatgttaatccgaagaaaacgacttaccagagcttcctcctctaggacctaaccagaggtgattttcatagtactcagccgacattagttttccattgctatgaggttctgacttgtaacttttctgttcttgggaagctcgggcaagcagcttgctttttgatgttctgcttgaaccgacagagttctctggttgcgcaacattttcacgagcaggaccacctggataataataaccaatatcgttgatacaacatgataagaaattaccaaccattaaagttttccaatgacaaataaaagaaaactaacctgaagctgacaaatataacagcatcacagtctctggagagagctcatcacaaatcattgccaagacctggaatatatatcacgagtaaacagttaaatataatgaatggatactagaaaggcgcagtcaagaagtcctatatgattgatactcttataaaactcaccgctagtaagtgtgatactgtgggacgataaagaatagctttcctaggattaggaggtaatgatggatcagccatatcagcagccaagttcatatctataagcccagaagttaaagtatgatcaaccacaaacccattctccttggcttcaacaggctttttttggtaaaaagatccactgggttcccattctaaacactgcatcattctatacgtatccaacgtcacttcagcatatttcacctgagaaaaaaaccaacacatataaccattactaagaaggtaacaaagttgaaattttaggtttccagaaaaacaaacaaacagtgcttgtttacctcattacggtgataacttgccaagagagcatcacgaaacttaaacaatttcttagcgtggaagcgcgcaagataagtttgagaagctggatatgaatcaagcattgcacagtaacgtagaggcctgagataagttaaatttgtatcagattctataaagcgagtgatttcttgcacaactagcctccactccttaaagtttgtctcctacacaagagaagaaatatgtataaaaaaagagacttgaaccaatataaatcacaacaagggtcagatcaaaagtaccctaaaattggatatgctgtgatcaaccaaaagcctaagcttgtcagctaagtgcaaaagcatttgtttccgatcaacaatcaacgaaacaagcagaaacctggcatagaagcgtaactccttaaatcgagcaccaagatctttcccctgagcttcatcaaagtagctccttttcaaaatcgcttcatagaaaacaaaagcctcaagaagaaacctagcttcactagtcctcatgtattgactaaagtaaagctgaccaatccggctcgcgatctcgccgatttcccatcggtttaaaccggactcgaccagctttgacctatgagattgctgatagttccatagtttcatataagctttgaacaccttttggaagtaatgactctgtgctcttccaaacgccggaagatcgcgaactcttgcgaatttccggtctgcgttctccaccaaagctcggaaattgcttgaaacatcttcacccgccatgtttaccagcttaatttccctcagttccggtgaaaaccgccgtcgtttatcatcggctctggagacaaaggaaaagagagagagagaaactaatcaatgggaaacgacggtggagagagagagagagagataaatatgatattatttactttgttttattattttccactctgtttttttataattattttcctcgttgagttgttttgttgatgatcacctttctaaaagcagttgaagaaaaaaagcttgggattaataatattgttaactcgtacctataattttgagagaaaaaaacaacaagagattataaattctatgaaattgtgtatattataagatgatcactacaaatgatcttatttacattgcaaatgtgtgtaagtaattagtagcatatatattgtttgttttttatatttaaaattgacgtttagcaacaatgtaaacactaaacattgtttatttaagctggattaatatataagatatgcatcgttattagcaaaaacgcatgtgagcacgaacccacaaaagaattttgcacaatcataaaatactagtacatctcgtttgtgttgtgtgatgatcgtgagacgagctggcatcaacgcacacataaatacatgtatactttataactcatgtccgtatcgtacgtacatagcttaagacagaggattagtattcaagaagaacccttttcataaccatgtgtatatatatgattcttttatctgtgattaattaacttatatgaagatgtatatgtgttgaactcatgatagattgattcggtaatcggcagcacgcaacagctataattacttagagaatcctagggaaacaataagtgttataatacagtaagtcgaaaatggttagagaagaagaaatgttgttttcaatcggttgctttcgactttaaatatggaaataaatatacaaccgtgtaagttagtagttgcaaaaccataattcacaaattagagtttatagtataatgatttctatcaatatcatcaccatacatcattcgtctttcacaatatgtggaatgaaacttagattcactatttgaaaattcttaactgataaaaatgcaaaaaagaaaaaactcgttgactttttctcactgattagtggtctttttgcttttcggattgttgttctatataattcatgtaatagcactgtaatcatcacatctactaaaacttattttaaaggtggaccgaggtgacatgtcccgtcgctaatgctcatttttattccggtcttgttgagtacattaacatgataacgaaatcgattttaagtggtcgggattaataatatgatcatgaatcaataaaaccatttaaggtgctacgtttcatcttagccatgcataataattatctagtgattactcagatgagaatctatagatgattaacacacacacaagaaccaataggtaagaacgaggatataagtatagttataaagaaaaacgaatatatgaaaatgtcatatacacaatttgtctttacatatgcgaattaaaataccagtggggcacatttccattaacttattatcgtagtagttagatgttagttgtctgaactctattttatttatgtatcttctgaatatccatatttaaatgccggtcttattcttggttgatacatggaagatggaacaaataaatataaaagtctaaattaattttttcatttgctttcgtagatcaaatggtacatcgcctttttaagctaaaagcattattaggtgggaaactttatttgctagttacaaaatgtacctctactttggacatgttttagttttaatttcttatatgtgacctatcacatgattacattccgttggactaaaaaacaaacatgaacctccaagcaaaaaagtcaattaaaaaattcgtaattgtttttaaatatcagtccaaaactatggcttatttgtcttatatgttggaacgttcaacatccggtcttacgaataaccgagagaatatcaaagtttaatgtgttatctttgttatgaatattcgaaaattcagctcgattgtctgactagtcgcagtcttgtgacaacaaaataaacagttggtatatatgctaatttcataattaaaatgaatttcctatgagacaacactactccattatgtaaagagagaaagaaaagatggagaaaaatataaagagcgaaaggaaaatgtgactccaaatctattagtgtcaaagtagaagagaaaaggaaaaaaaaaagtaaaaagtaaaaagaaagaagtaaagattgttcttttataatgtcaacagatttgtttgtgagttgggcacaaagtagattggaaagcttttgcattaccagataaaaaagaaggtacttaatgatgaagagtaaagtaaaggttgctatatttataaagtaatgtatttttcttacaactaaaatattttaccttgcaatcacatttcttaattatctttgtactgtttggtttgaatgtaaatgaaaaagtaataatgtgtttgcatatattttataagattgggtctttctttgggccgaacagcttaataagaaaaacaattgggccgttttcttgaatgtcaaacgtatttaacgaaatccatccagtggttaaaaaactttacaaactacataaacatacgaattattttgctaatagccatttacttattgtgaccttgagataactctctacattgtgtctgtcccaataacagagtcagagactgtctcagagatcaaacgaaaataacaaaggttcggtgatatattcagtagtaataatttcagttttttacttctgggataatttgacttttataatatctggaaaacaaaaaagtgaaaaaccaatatttgactccaactgccgactcaaactattgggagttaggaccactggttgataaaccgtgtcaaattggctttagacaagaccaaagtgtcgtcgttttgataaaaacctattgctctctctctctctctcgctgaagccggcccgagccgtatataagctgtctcctacaatggtttttttcaatcgtattagaatattgtttataattactatattcgtttgtagtttatcactattctactgtattagtattaattttaattatcttttgtatcatccattttcctgcaaaacttatctatttttctaatcgcactagcgtgtgagttgtttacaactacattcaattgtaaatctcttttccgaaaaatatgaaacagaggaaaccaatgatgatgtacaaaaatgatctctaactaatgttttaatatattattatattttattattagtttatatagattcgattcgagtcattcgaccttccccgaatatagcttggtaaggctaatacttgattaatccatagtcacgtaagagaatgtgatttataatgcttaagaagtgaccatctttcttaacaaataaagttataaggaagaaaacaatgcaagttttcatatgttgggattcacgtacatacataagacataattatgtgcaaaactcattaactttttaacacgattaattttctttttttttgggtgttgcgtttaagagtacatatgatcaagtacatcttcggtcccaataagttagaagccttaaaagaatttaaaatgtggctctatatatatttttagtaccaaaatctgatcatctagttatttacattttgtttgtctagttatatatttcctctctctttttttaactgatattctaaaaaaacacatacattaagaaaatatattaaaatttattataaatatattcatttttgtgatttgcatttttctataattctaaaccaatgatattcaattatttgtcttgaaatttaaaattcatcaataataactaataattaatgcataaaaacttaaaaaatcaatctgtttgaaataattttttctccaaaaagtcaattaataaggaacagataaagtacatcataatccatgtcagattatcttttaactaatagtatattatatacttaacaaaaacttcagttaattttaaaaacttagaaataatctcaaaaccaatatatatatatatatatatataatttcgagtcatatgtagttgagaacttgggatagagttttgggaggtttaagcaagttactaccaccataacagtgtaaacatttactcatgtgactcctaaaattactactaaaagctaaattataaagaggttttagcaagttagcaaatagcaaccaacaacctcgtttctattaagctttcaacatgtccaaaaatcacaaatgttcttttttttaccaaattttgtgtaattaataaaaggttttaattatatatatgaggatcacatcaactaattaaatgtttttaaatttggagtattatatgaattcccggaattaaagacttgagagggacctttgtaaatgaatacaccttgtaattatttaatgacaaattattttttattgtttatactttataccattgcatctcactatcaaagcatatttaaaattctataaggagggcccaaaatacacgggaatgttgaaaaccataacctatcgagattaaaaagacgattatatttttgttttactttaaaatatcatttattttatcttcaaaataaaataaactctgattgtcttcttataagctaagtaatcatacatcaactcaacatcaatgtcaatttaatctttcataaatctattcataaattctacacttaactaatagattttatctaaaaactaaactactcaacccagtcaattaacaactttagatctatgaactgaaaataaacaaacaacaatcaatttaatttacacgagttcacaatagaataaaaaagtagtatagggtttaaaagggacgacactaaaagtctttatagcagctacataacatgatcaattcttttgcggtaatatcttttctataaagaaacttatgctttttgtcaagtccagttaatcctgtagcaaataatattcatgataaatacttatacgccggtttataaaaagaaaatgttttaatcagattttgaatatttactactacttgaacttcattttgctttatatcgtctattatcgaattcgaaacaatcaagtgtttagtgtcaaataccatcaacataaatcttacttcgactattatgtgtgctaatttctaattgtacgtaggagatttccatttcccttcatttgtatataacatatgtacttcatattgatatgtttgttcacatgattctatagttcttatataaggcacgatacgaagttacgaaccaccaacaaaagcattaatggtttcaagaatacaataaagttttgatgttttcattattgcatgtagatataaataaaagactcacgaagattcttaaaagctaaaaccattgtgatctttgcccagagaaagtgaagcacacaacacaaatgttcgccgcttgaaaatagtacaacaaaatgctttaattatcatagaaatttaattaagcatatactaatcaaaacaatgtgaagatgttaataatgtaagcattgagttttgagaggtgaaatagacatcactaatgtacattttacaaagcttcataagtcgcactaaagttaattactaaaattctaaaccgacaaaatcgaaaattgtaccgaccgacgaacctctctaactaaaccaaaccgactctacagcttaagtaaagtcgtgaaacgtgtcgagctatgagtggtcaaataaagttgtgaaatagacggctgtgagaggtggaaacagatgagatgtcgtgaatcggagggctaagaagagaaagcactgtacacgtgtctatccttctctaacgattttattctgattttctccctataaaatatatgtattttttaaataatgttatttcggcgatagtgacaaatgggaaatgacgaaaacgacgtcttctttgatgcaatgtttggcccacaatcacatgggtatgtgggccctcctgtttcgcagcttcgtacaaagaaaataagtaaatttacaatgtaggtccctttctttctgtgccatttgactgtatgaaaaaaatgacattaatattttatacaactaaaagttaattacctttttttcctcccttatgaatattatcataattttctatttccagtgcatgtatatagaaccgtatttttccaacggaattgaattgtttttggtaggcattatcagtttatcactactagtatatttcaaatctcttgtattaattttgatgcatttaatcagcttactaaataaccgtttcatcaaggtattccgactaatttaaacaaaacattcatttacccatataaaataaaattagagaaagtatataataatagtaattttgttggcgtcatgacgtgatttgaatgcctcaatttcagatacgatccgtgacaatggtaaaagcttctgacagaatgttttcatcattcactaaaaacgatgtcccatgcttccactgaaacacgtacgcacaatcatggtaacagaagtaagtaccttgatgattgatgatgatagcattttctcacaagccaatcctatttctttaatccaatttcacctttattattaggaactactttattgtctttcaccaaaagctaaatttctagctaaggtcaaaaaaccttttcacgaatatcaataaatttccaccatttcttaaaagctagattgaattaactatttcaatactctcacaaaagtgatttattgtttgttttttttcctttcgtaatttttatgttgatagtaacattaatattcgatccaatacaatcaagtaaataataaagatggatttgggttttgtcgtgatcactagttcaatgtctttttcactaatgaatttggtcttcacaaaattaccaaaaaagaaagaaagaaaaaaagaaagagatgtcgtgtcgtgggattagatgttacaggtccgggggaaaaagctgcgtctttctttcctccattttgtatttcactccctctactcctttaaaacccctctattcctttagaaacttcatattttatctttctttcctcatattttatctataaagaacaatataatttgcataatgataaatgtatgattctttttttccaaaaggtgtgtcctaaaatagaaattgaatttggtcgatctcaaaattacaaatcaatgaatcacatgtttgtatttcatgtttattaataaaataaaatataattttactaatagaaactatacgtttacaacacaatattaatagattattaacatatcgttttgttgaatgttattatatcacgttgattttaatagatgatgtgttaactaaactttttacgtgtaactaatacaaccaaacatacacactttaaattacaaacaaaaacttataataaagttgggaatggttggataacttgggttatttagatatttttttagtttttgataaatagtaaaaaagaaatttggctttctaatttttagaagaaggtaaattttcaaaattttgttggattaagatataggttatattactcaattgaaaagtttaggggtaggaaatgtaatacaattcagacttaaggggtcaaacgtagttttattgctttcatatcagagtgtccccattgattcctatttctgtgaaagcccctctcgacatcgttaattacatgaagagccattacaatcttaaacccaaaattaacttctcccgcggatttaatttaataatccccttcatccttaatccttatttatcaattattccacctttgccctcttctctgttttcccattgagactaaacagagcaccaatttgataaacaattctcaagtccaatgatctgaagcagagtaccaatgaagtgacggcggctgttcatcggagaagaaaccacaagcttcttcaccgcttagaaaatcctcgtgatcctctgtttgctctgttttcacaaactgtaagaaactcccgccagtaaccgtcacaggcggcgtcaatcttccgttatcagaacttgtttcgtcgttaagaacggcgcttgaatcgcaactatcggaagatccagcctcgacaacggtggaattcggtagaaggtcacggaggtcagtgaagcttcgccggtagttaaaaccagaggaatgttctagaaactgcagaggagacgaaggaatcgaatccgtcttgtgaacttcctcttccttaacaccctccgtaatagctttgttgttgttgttatcttcttcaccgtttaccttagctttgattttactaatctgcaaccaaaaactttaaaaatcaaacctttttgcattttcgtctctgaagtttcaatttttatggtttaaagtctctaatattgtacctcttggagaagggaatcattgtcacggcggagagaatcgaaattgtggcggagagaatcgtattgacccttaagaacaccgtaatctttttcaagctgttttgttttccaccgtgcacgacggttctgaaaccaaacagctacttgacgaggttgaagtccaagctcttgtgctaatttagttttcctctcaggttcgagtttattctcaagttcgaaattcttctcaagagctttgacttggtcaacttttaatcttctcttcttctccgatagacccatgtggtggtggttgccggaatattcctcgattagtgtagcatcttcatcgtaaccttcaagcatagattggtaattacttccgtaccctcttggactctgttcatctgttgtgtaaccaaatgaatcttgtcaataaaagaaacagtggaaagtgaagaaaggatcacatgggttttgtctgacattagcaaaaagtagaaagaacaaagatggtaataagaacctgtagaagtggagattagaccacacattgaatctgagctgcttagtctcttcatgatgacactttaaaatagttctactccagctttttctttattatcagagaaattcttatgaagttttgaaattacaacaatgttgtaaacataattgagcttcttcacttgaacaacaacatgaacaaaacgaggagactttagaggctcaaattagaaaaaacagagagagggatatggattgagaaagtccaaaagagagagagagagagagagagagagagagagagagagagagagagagaagcttttaatctagagagcaatggttcttttcaatatgaacaagttggtttcacactttctctttctttaaataaaccaaacttatctttctttaaataaaccaaacttagagaaagggttaaaatgtaactaaggttaagtttgaaccaatagttatacggcttggctcggctcggcttagaacaagtggtggagtctgtgatacgtcaccgtatgggtttatttttggtaatgcttaaccttattttttttaagggtgtttctattttcttaaacttaaaaattcagagaaattaataaacagcggatagtagagagatacgtaagatgcatttaaaaagtagatttttaaaatataacatcctctgaaaaacgtcagaaggtacgtcacagaagatttgatgacaaaatgataaactataatttgtttgttgattaatgaaaccaaatgtaattttcctgagcaaacttaaaattcgataggataagttataaaattatacggatggcatatttaatcccatatattagatgtgggatatattattaaaaacattagtgttatatgttattgttggcaacgcaggggagtggaaagaaagacttgtgggtgggggaacaagactgacgcaatttgggtttggttcattgaattgtccaaaaactatgggctcgaacggcaccgtcaaaaaatatcaattcttgttttgaacgacctgtaaaaaacatacaggaaagtttaaaatggtatagtgataaatacaatatactatagcatatgtcacaactcaaatcgaagctttatagaaaagttcaatactatatttggtgattgttttttttcttctaattttgcatttgcgttcttctaagtgaaagtacataacgcaaaccaaagaaacaatcctatgacggttctctctttgaaacggagcttttccgagagacaatgaaatgtttttagaacacaattaaaggctttgggtcatcacttattcaattttaaagatttgtcatattcatttcatttgtgatcaatttcgagaaacgttatctaaatgagagaaaatgaaatgtgtaagaagtagaacttaggtataaagagatggcaaggcaggcctctgcattatgacccagtttcagataatggacccctaaactgtagttttttgttataggcctgaggcctgatccatttattgtataagaccggttttgttggtcttggtatcaggtttaaatttaaaataggtcgaattcaacgttcccgtacacgtttcatacatgttacaatttaatatgtatatagctactcgatcagcttcgaaaataatattagtataaacggaatttggatgatgatgcccgagcacatgcactttgaagatataaagatgatgaaaaagaatgaaagagattttaaattctgccatgtatgtctctatggattattataagttcaagtgtggaagattcggaaattctcatttatccatatcaaatttgaattattatatttttctgtctgaattattcatgaaatagcaaccgctaagggtgatacatggtggagtacaagttacaaaaaccagcagaaggaactaaaattctcggtaaaataagtcggcagaacaaaataatatctctaaaaacaagaaccaaaaaaaaaaaagtataaataaccaaaaatacaaataccataagctaaaacttagaaaataagcagaaaaaccttcaatgagtgaactaagaatcatgagaatctgaaaggaaaatgactgaacttgaaactaagagatcgacgcataattgtcttatttgtcttgtggaaagatccgaatcaaaacccattgaatagctcttctctctactgaaagacttgatagagcattgaatagtattaaacgttccaaaccaaccccgagaagtcgataaccttaaactggaagaaatacaacttaagatggcaaattagtgacccacatactccaaacgaagcagatcttaaagagatagaagaaccaaccaaaaatttttatccaagagccaatggcaaaaagcatcgagtccgtctcatcacaaggagagattttccaggaccatcgatgtcaaacacaacaccaaggtagacaaagcagatggctagaaccgaaacttcattcaaacaagactcaacctcagaacagtcaaagatccgcaaaagagagactccgaaaatccctaaacaaatctaacgcaactcgccaacagagacacattggaggaagacgacgagggagataccacgagcctatctgatgttgcatagattcatcaagggaagaagataaacgaatcaagaaggaaagccagagccttcaatggaggcgttgactcaacgaagagaattctcagacagaacagaagctacttgtgactccactttgaggcaaggagcggatccgcaactttaagcaccatcgaccatcagaattaacggatctaaacactcaataccatgtcttatcagatatgagacacgaaagcaaaccaaaccacaacgttaaaactctacgattccataagtagaaaagacaaatacaaaattgaaaatctaaacaagaaaacaagggaggtgatcgacgttgacggtgtatgagccgccacgcacgggtcaccagctaatcaagtttgtaatctatctgatgtataaatatctacgactttttttagcatataaataatatattttacagaaaaaatgtggtgtaataacatcaaccaattaattgagtgtaaattaattttgttatcatcaatcaactggtatatacatattttgccaaatccgattttagacggtgatccaaccaaaaccattagctgcaatgttcagttgctatgatcgatcactagtattgttgttgtgccataaatatcaatctttattttcttatgttgccaaggcgatcacacaccacttatccactttgtgttgtttttctgtgtttgtttgttatttcttgtctgaaaccaaggaaaaggtaattgtacgatgaaacattctgacctataagtattgattaaattgaccctatcgaagagacaaagagtttgtgtatttgcagcgaacatgaattaaaaattgacatataattaatcctagcacacagtttagtggattagactatttcagtaacaagtggagaaacatgactaaattaaaaatgaaattgtaacgaacttatctccccccaatttgacataatttttgccctattgtcttcatcaaaaaaactttctttaagttcatctaaaagtcaaaacaatataattattaaccttttgaagtttattcgggacagctatatgcttctcctctctaagtatataaatcatatccttcgtatctgacatattttgcgtctaacaagtaacaccctaataaacatttgcatttgcaagcagaaatctaattcatcgtggataaatctcagccgttaatatctttccggcgtcgcttcgaacgaccgatgatgacacgcgtcgagtgttttaatcctcaccgttggattatcttacacgtggcaatcatcatacagagcaaagccaatgcccaatctttctcaccgagtccacccgacttgcaaacgggtcacactccgtcgaagaccaccgtcttcgccgttctcgtaaccctcttcttcctcaccggattactctccgtctatattcgccattgcgctcgctctaatcctgattcctccaccagatacttccgcaaccgagctaacgacggcagttcacggcgaggcggtcttgacaacgccgtcgtcgaaagcttccctgttttcgcttactcctctgttaaagaatccaaaatcggatccaaggatttagaatgtgcgatttgtctcaacgaattagaagatcatgaaacagtgcgattgcttccgatttgtaaccatttgttccatatcgattgtatcgatacttggctttactcgcacgcaacttgccctgtttgcagatctaatctcaccgcgaaatcgaataaacccggcgatgaagacgacggtgttccgttagcagcgatgagagaccacgtcgtggttgatattgagaccgttgaggtagcgaaaagccaccaccgacggttgagttctgaaatctccggtaagtttccgagatcgaattcgacgggtcattcgatggatcgattcagtgacggcacagagaggtttactctgcggttaccagatgatgtaaagatgcgattaatggcggtgaaaggacgtaggttgaaacgaacgagaagctttgacgttgatttgacggcggaacactattgccggagcggtgaggaaagcagtaacacgatcgggtctggtgcgaagtcgggtcgggtcaactggccggatcgatggggtttgactttgttcgtttcgaagtcaaactcgggttccgttagatcacagaaatctaacggtgaaccgttgaaatgaacgacgttatattttgccgtgaaagtggtgaagatatgaatggtaaaaattggtttgtaattttgtatacacaaaggtccagcttgtttagcatctcgctaaacatgtttttgaacttttctaagaatgtttcaaatttaatatatgttttcttatacgagtggtaaaaagtaatttcaaattggtttgtaattttgtatacaaaaaagtccagcttgtttagcatttcgctaaacatgtatttgaaagtttcgaagaatgtatattattaaagaagatattgtttgagttttagatttcatttattggttcattgatgttttcacaactttcatgatctgatgaaagcatgtatcctctttttttgggcaacaaacaacttcattagagattaaccaattagaagcatacaaggatagagcgttttttgctagggattcagcttccacattagtcttacgagagatgggagtacaatgaaagctattaaaggaagaacaaacgataaagatatccgctagaacttcatggatctcagtgaggatggaattaatgttgatcgctttgacaagcgcacaacagtccaactcaagatgaatgcgcgatacacaaagggttcttgcattttccaaagctgtgcgggcagctaaagcctccaccataagaggaaaggccacattagtacatagagaggagaagttctcagatgcaccagtacctgacaaagacaaagtccaacccaatcccgcaacacatagattttttctccaccataagggatcgatcgagagtaggttctataaagtaccaatttatttcacatttagtttaaacagtttatcattaaccattcgtgttggtttcacaatggtaatgtagacaatattgtttttataatattaatttacacaaattaataaatagtgcattaaaaattacatgactagcaatttagaattctcccgtcaggaaacaaaagagtgtcacaagtcccagataaatagatcgttacctgattattacgcgttattagtagttgtgaatttgatgattgtgggctctttacttgttacaaattcagtaaacataatgaatatcttgttttttgcttgcgactctcgtcccactccactcatccattgagtgatggttacaaagtctcttattagcttttcttttcgctatggattcttatttttgtaaagtatgaatgaccttagtgatagtttataacaatttatttgttttggtttccttacaatcaaatttctccactaactaagcgatatatatatgcacagaaactatatatattttaatagatcggcacccatgtttacatatttcacgtttcttaaaattattaatcgtagttgacaaaagatagtatcttcacacctcacaatcatagcagtaacaccgtaccattttattcactagtcttggagtaatatttttgataattatttttccttctatccaaaatctacttttgtcgttttagggatcgaaatatttaaaaataagataacgggtaccctctatgaatttggtgaataagaacaagaaatcatcagaatgttcgattcgaacgattacattccatttataatttgtttgaatatggaaagtagtttgaaaaagaccaaaaaccaacaaaataataatgcaatcgacgattaagtgattctccatatatattgattatttgacccatgttggttgcatacttgcatagaataaaacagtttcctttattgaccaaaaaaaactactatatattatcttctttttagtccatcaaaaagcaagaaaaacaaaacaagtcatatctacctggtgtagtagatcatcgtcgattcatcgatgggaagaataacaagttttgcagatctaataggtagaatcaaagacaaagcttctcaaagcaaagctgctttagtatcatcaaacactaaaagcaaaactctctctttccatctctctgtcctccgtgccactactcatgacccttcaacgccgccggggaatcgtcacctcgccgttattctctccgccggtactggctcacgagccaccgcttcttcagctgtcgaatccataatggaacgtcttcacaccaccggagatgcttgcgtagctctcaagtctttgatcattatccatcacatcgtcaaacacggtcgtttcatcctccaagatcagctctctgtatttccagcttccggtggtcggaattatctgaaactttctgcttttagagatgagaaatctcctttgatgtgggagctttcttcttgggtccgatggtaagttcacaaaaaaaaaaaaaaaagtttcgactaagtttggatttttatatgttttttgattattattgtaggtacgctttatatcttgagcatctattatcaacttcaagaatcatgggatttttcatatcttcaacatcgagtacaattcacaaagaggaatacgaagaaatggtttcttctcttaccaactctgatctgcttcgtgagatcgatgctctcgttggtctactagaagaagcatgtaaaattccggatctacccttctccggtgggaaatccctcgcagacaaaatcactcagttggtaggagaagactacgtgtcttcgatcaacgagctttacacgagattcaacgagtttaaagaacgatccaacactttgagctttggagatacgatcgagcttgtctgtgctttgaagcggctcgagagttgtaaagagaggttgtctgaaatctgccatgggaattggaagagaggttggattgatgggttctggggtttggttcttgaggtcaagggtattattggtaatttagaggataattatgggcagattgagaaatcgattgttgggtttgggaagagggataaaggatacgaatcggctcggtttactgatcggttaattatcggttatagtaatcctgttcggttttcttcgggtagattttcgaatgttgatcggtttaattttccggtttctggtcgagtgttgtgttgagtggacgacttttatattcttttgatttttttttaaataattttttttttggtcagatgtcttgtgaattttaaaagacaataatcaacatgtagatgattattccattatatgtgttgttgatgtattaagtcattta

SEQ ID NO: 691 - DNA, 80770 bp, Arabidopsis thaliana
gatcgtggttttcgagcttggctgtgaagatcttaccgatcctgggcagatttacatgtttcaaggccttctagctatgctgccgccaacgactcctaatggaaaaataatttgaagtgggagagaaaagaaaaccatttggatggttgaagaagaaggaaagctctccaataaagccccggcttcaagaacttttgtctcagcccggtattcggttgagtttcagtcggattagtatatccgttttaggcttaggaccgaaatagtgaaagccaaggagtcaaaacctttctgaagttgcgcttttggcgtagatgctattaggacacgttctacactcggatcttgagggactaatagcttggaattggattggatctcaggataggatttgatgtgctttgtgttagtaattgtttttgtgtcattgggtgaatttaggtggtttaagagatgatttcacttagagtcgtggtgtaatttatctcgttatggttgaaaaaatacagtgaatttcagttgggtaacgttgaatccatcttagtgtttcagggtgatactagactgattcattgtatttggttaaaatatgttgtggtctaatgatttgtacctttgaattggttaatggaaagttgttgttgagccaaaaaaaaataaaaaaaaatcaaccgactctgctaagaaaaggaaaatcagtcgattactaacggctacttatggaaacaaatggaaattaaccgactttaattttaagctaacagtaaaaaaaacactgacgttatatgttgaaaatttgaaataaccgactttggtttattatttgtatcatcactattcaaattacctttacggcccaactaaataatatagggctttgaagaagcccatctagaagttaatataaattaagtttttaagggcacaagaatgacgtcatattagtaaaccccaattacaactctgattctccttcccggcgatatgaaacgagccggcggcggtgtcgacttcatcagctctctacccgacgaaatcctccaccatatcctcgccaatacacctaccaagctcgcgatcagaacctccgtcttatccaaacgatggaagcatgtatggtacgagacaccttctatctcaattgtttgcaatagagtagatcctgattcgctaaacaaaaccctaagtagctactcgactcccaaaatcaagagtttcgatgttactataagcagagatgtcaccgtacctgagattgatacctggattaatctcgctctgtcacgcaaggctgagaatgtatctctcagattcacatctcattatagattccgagatacattcttcatcaattcctctctgaagcagcttagtttgactttggtttattgcattctgaatcccaagtgcgttgtctcttggtcatcgttaaggaacttgtcgttgaatcgttgcaaggtgtctgatgattcaattgccaaaattctcactggttgttcattgctcgaaagcttgacattgaatctctgtgatagactcaatgatcttgatctgagcaagtcactaagtttgagaagactggagatacttggagaccgttggacaccagagaggattgtagcgccacacattcgttatttgagattggaaaactatcagcgaccatctactttagtggatgtctcatctttaaccgaagctaatctcggtctttcaaaacatgtacttgactatttcacatgtgaaatggagactgaatcgcttcaatacatggtgcgacagacggtggttaagttgcaaaacataaagaagcttactattgggggaatttttcttcaggtaatgatgaccaattctctaatgcctacgattttctatgtcgtagagtcgtgctataggataacttagttgcacattcaaatgttggattatggataagttttcaactttaaggagcatatgaagtctctctgtggaatatggaaacttgaagttgttcggtatagtagagatatatgtctctgtagtcacttactttttgtgcttttgtcattcttttgctagattctatctcttgccgagctctgtggtgttactcttccagtcttccagaattcaatatcgaagctttgactgttgaaacgaggattgatcagtctgtgattcctggtctagcaaggctgctacaaaactctcctggacttaaaaggataacagttaacataacgaagtgcaacaccacaccggtatcttttctacagattattctttttaagaaccgtttccttcactttttgggctaatgcagatagatgtgagatattttgtagaatcaaagatcacttctagtagtttgcttgagcattctttttttatgtcgacaggataagcatcttgacagacacttgaaattgcgaggcttgaatcctgatcaaagctggatatcgaaatatggggtctttccaactgtggagcagacatctgcaaagatgaaacatgtggattcgttcataaaacttgtcatgggaaacacaaagacattagagaagctggttttacagtttggagattaccttgatgcagcatatcaaatggttccaacattatcttacgacgatatccaaattgtgatcaagaaaagacgatcttaaatagtactagtatattagtatatgctatggaccaccgtagatggcttaattgtcttggttaacgtgtctacaaattaattgttttgatcttaaatttatgattcagagctttaggtttctgtgttcacattgaagggaacaacagttatagctagtcttgtaggttagtctccgtgtgattgtcgtttttgatgtgtcttcactgatcagtacacgcaaaaggcaaaactttcctccgtccaaagcggatctctatattacgtttctgtagaaacttaaggtctctctcacacatgtggtgaaaagtgatagttgaagcaatgtttgaaaattaatatctaaagcttctaattgacaaataaaaagtgtcaaaaaggaaaaaataaaatttcaagggttgatttttttttttttttttttttaatatatatatatatatcatgcttttgctttagtttgatttatttgacttcttggtatagtttttggtttattccattcacgaaaattaatttgaagagaaatcttttgacttttgctttgaatgtttagatgaatgaaatctagaaaccaaacaacaacttgaaatttaatttggtttaatatagattggtttagttggattccatttcccccattcgttatttttgtttaggttatatgtggctaaaaaggaatatatttgcatccatttgtatttttgggttgatatgtttgatgggtttagtgagaatattggtagtgggagacaagagttgatttggatagttgagtgttgctattgtttgtctcaaaagatttccactttatgtttttagtcatttccaaatcattaacatcaaaagctaggtcaaattcatacttcatatgtcccaaaatatttatcaaggattctgcttttagaccatcaacttctagtgatctcttattattattggccagtatatagcaattctggagttgggtccattctataatccatagacaaatttctttcaaaactttgggtagatttttgtaatatcgtctttaagtttattattcagaacaatgttacttctagagattgtaattttacgtatgtagattgtagatccatcatatttatttattatcgtagaattatcctaaacacgtgtatgaaatattttggtttaaatcgaacgagtcacaaaaatcaaaatttgtggacatgcaaattttgaaatgtactcatatttcttttggatataagtcttcgtccaaaacaaagtcttgtttgtgtatgatgttgaacttcacaaatgactgataacgtaacgtaatttcacacgagtgacctcaatataaaaaagggattgtgttccatattcaacaaaacgacactaatgacccatgattaaactaagaaatgtagatttaaatgttctataagattcgtttcaaagcagtcaaagactcaaagtcgcataaaagcacaaattaaagaagattagtctatagggaatcttaaagaataagttgttgggtttacccatatatgcacttattaatctatatagtagggaaccacaaagaaatttaaaaaccaaagtagattaagaagttaatctccaaaataagtagagaaaaattaaaaatacattaatcaacctataaagtgatatcataaagagcctaaaatcgattcgtccgttgaggacaaagacaaataaaagaaatgttttctttaaaaccattaataagtgatgcataaaaattaaataaaaataaaaaacggaaaaaaaaacaagtgcagacaaaacgaaaccagaacacggtgaagagaagaggcgagagagagagagagagggaaaaggaagacgatgatgatttctcggagacccgtttcaagtccgggtcgggtagagaaatatccaccgccttttatggggtttttgagaagtaagagcaacggcggaagtacaagcaggagtagaagtcgaagcagaggaaggtcacgcgctagtcctcttttcgttcgccggaataaatccgcggcggcggtggctcaagaaccgtcgtctccgaaggttacttgcatgggtcaagtccgggtcaaccgatcgaagcccaaaattaaacccgaatctcgagataacccgacccgacgacgatgtgagtggctccgaaacgcgtcgttttataacaaattcgccgggaaaatcaaaacgatgacgttttggcctaaatggagactctgttcgttttcgtgtgcttgtcggaatttgaaggagaaagattctccgagaagtcaattagatcatccgacaacggaatcagtcagagaaatcaaagaagaaatcgaaggagaagaaaatttcgaaatccctaaattatttgtgtctccggctactactccgcctataaacgctctgttgttgacgagaagcagatctgcaccgtatagatcgtcgtcgttggctttcagattctgggaagaaaataaccaacgagaagttgaatcacagcaaaatgtgagatcggagaaaactgattcggaagttcccatcgagaaaatcaatggttttcacgagccggagtatgttgacagagatgaagaagaattcacgaagttaagatttgtacggcagccggtgttgacaaggagcaaatcggagccggcgaggatcggcgagaagatgatggtgttgcttcccgatgaagaagaaggttaggtagggtttaggtctctcacgtgattagtcaataattgcactaatcttaattaattaatcgctggtatgactaatttaatttgcattgtttaggataatttgactgtgttttagatatagtagaggaaacaaatttgtataaagatttgtaaccatacatataacgtaaggtgtagatatgtttggcattcaaaaaaaaaatgtttaacaatacactatgtaatcattttcaatttgtaaatttacattatctgtttgattttagtatgctatttaaattttggcaatcaaacaaaacataactttttctagcttctagagcaattcaaaacaaaatttacatattcgagaattgaaccgtagtattattcttttatgttttacgttattgtaaagtactaaaatgtataaatgtttgagcaaaccatgtttgacttgttgttataagaaaaaagaaaaaaagagctaattctggcccaacgtatagatgggcttatatattgtaggccatttgttcgatactaaagaccaattgaagacccaaaatgtaaatatgtttgtaaattcattttattactaatccgatattagatcattgatgcataagttaatgcatggtaatgacatatgaaaaataagacaaaaaaaagatgggtgggtgtgaaaatgaaaggaggcgtgccttaaggaaaaacacagccatgaaatagctgtagagatggatatggacccattacaatttatgatttatgaataagagaaccacgaagatgttagacaaaattatttatggagttctctcactagcacttataatatatagtagtactatatactatataataccaaatatttaaatttgacttccccaagactgagacatctctgatcacctatattcttgaaaattcaactttttttttatttgtgattttattagtatctcattttatgaaaccacaatgatttgaaaacggatgtcgttggatttttaagattatactgttcaaggtttgatggttttcttaaaaaggtttcgaataaatatgaatcaaaatatagttcttttcgcatctcagtacggtgacaaggaatacaaaatgaagaaagaaaaaaatgacattttgaaatttcacttataagtcaaaaggttttcttttgttttaagagtatgagattctcaaaaggttcatgcatgcataattgcatattcattggaatgtacggatgtacttcggttatatataaactatataatatttcaataaggatttaaagctttcaaacaagctagttgatgatttttggagtcaaactttcttaaacatgactacatgagtatagttattggtccaatttgtacgcgtccattttctataggatcggatagtctctggcttcaattagtgatacgttggagtttgaagtaaaaaaacgaagatgaatgttttgctctgtttaatattacagtagcattaatattatcatcctacacatatatgtttaatgatggatgaggaatataaaatatgtgttgatagtgtatattgggggtgcacgatccatccatcgaccgacttgaaataaatggaaaggtagagagagtacagagatgtacagttgtaagaaataagtgggggatagaggaaacattataacattatcatctcctcatttaattttatcattaaactctatataatgtttcaacttcataccagcgatttctccaattaataatgatgtttatttaggagaattttataaaaattctatatttgtatatcaccgccaaattacaataactgtgaatggaatgtacttacctgtttttctaacgacattttctaaaacgaaatggaatctatcataaattttattttctagctatgtcagtttttgtactgtaaactgtaaagtaataatacgacccaaataagattgtcattggactaaagtcatcacaaaacatagttctagcagcgacttggatcttattgatccactatcgacttaggtttactttggaacgaacttcgtaactaaatgtttggtttggtatggatttgttattgtatgtgttcaatattaacaaagcaacatttatttttcaatagagtaagtaatgctatatataagtcgtccttcgacgaaaataaatgactactactaatggtcaataaatacgtttggatgcaagaaagatgatactagataggaacacgaattcagcttggaagccatgagattgaaagctaatattgtccctcacacatgaacttgtcttttcttatttttatttttagatgaatggtcgtgaaaagaaaagaaaattaatactatgttccagtctttttaacccgccataacatgttgcccatctatacgaatacaagagcacagtgttcaagacttcaaatacaagtggcatacaaattcaataatacgaaagacacaaacattattcaaatggccatgtaataaatcaaaattttgcatatattgaaaaaacggatacaatgtaggtacctctttgcatggacctctaataaattgttttttcttttcttttcagttgatcacctagaaaaaaaagattctatgttatagtggaacagaactagctactcacaatagacagagtgattggggaaaaatatatagaatacaaagttagacatatttacttctctattttaattattttgaagaaacaaaaaacatgacacgtttttcagtccacgttatatataaatatggccatcatgtacctgaaatatcaccattcaaattgattgagtttgttatacaaaaaaaaaagagaagaagaagccagaagtctgagagttttataagtaacgaaaatgaaatcgaccgtcatgatgattttcctcattatctacctcctcatcgccgtgccttgcttcgctaaaggtatttttttagttctttgtttttcttaaaacgtttaactaggatttttatttgtatattatatcgacgttgtactataaaacataattcaggatcggagcaaacggattcagaggtgtacgagatcgattacaggggaccagagactcataactctagacctccaccggaaactatgcacggcaagccaccgtacatccaccataatacctccgccgctgggctcggtgctcatgtaggaggaaagagtaagttgccatctccacctttactaatatttatttatggcatttacgtaaatatgagtctttggttttttaaggggaaaaaggtaaataacagtcattaaatgatatatttattattatcaaatattcaaattgtatattttattcttattcttcgaaattattatgatccaatcaaatgaagtaaatttccctttcttgcatataatggtgaccaaaacatgcaggattaattaattaactctgaatttgtttccaaattccatgtattttgatatgttctcttctccatatatcagactagagagagagcgagaccttttccaaggagaagactcagaagttgaagaggaagattacgagagttgtgatatatatatgagtaattaatgatgttaattgatacaaatttatactttaattatttatcatatgaagatgatcatcgatgtgtgatcagtacagttagtgtgaataacacactactctcctgatgtcatgtccggtcttttatttatttcatttttcaattctcatgcaccgttctctatatcatttttttcggtctgaatcgttttgaacttttttttttttaattattaaatcagggtaatgtgtcactaaatgaatatcaatatagtaattgtttaaatgtttgtttaaaacgataaatgtataataattttgcactctccatatacaaaatgtttgggatgttgttattacaattacaaatacgtttattatatcatctattttgtatctatgtttacaaataagtgtattatatactaacataagaatattggactatattatatttgatattaagaaaatatttagacactccaactccaagaatgcaagattgcaactttgcaaggtgccaaggtctgaaacaatccaaacacttatcattgacaactgacgaggtttattttggttgttgtctttcttttattattctatgaaaattataatttaaaattcgcaagaaattgtttgtattattgtaacttgtacatgatattcaacaaattaaaattatgatatagatgatcatatatggagtaatctaagacactggctccttcggacccaccttttaatcacttcctcaatcattttcatttttcaattattcattcattttaaaactggaccatgtgtattatttatcacaatttttagccagtacagtaccatttctttcgcctgagagaaaagtttatgaattatgaaaactttgtaatagagagtttgatttgatttattttatgatctgtcaatgttggagtataattatttataaacatgactttttaatgacacacgaacacgagtacacgacaaatgttctatttaaaatctatatctttgtagtttttaatgacacattactattatttatatctttgcaaacgctttttattttaattaaattttaacggcatgcttagtcagttttttttttatgtaatataaactttaattaaaagaaaaaccttttgcaaaaaaaacctaaaaagatgaaaaacacttttttatgaaaatgccaagaataataacattaaagagaagaaacaaactagggatacatcggccgacttatgttgaaaatactataggcctcataaacagaatgggccgtggctttaagcccagttaataactaatgaaactcgttcagctggggttgaacaagttcttgatgttggatgtggagttgctagctttgcagcttatcttcttcctttaggtataaagacaatgtattttacccctaaagatggtcatgagctctgccatagccaccaatgtcttttgatatggttcactgttcgagatgtagtcttgattggcatgaaaatggtacgactcttgtgttcttctttctgtttctaaatgccttgcttggttttgtatcaattggaactaaagacagtcatctgggcttgattctgcagatggtatcttgatattattattttgtttctaagatttgggaaattctttttttgttttgttttgttgtagagaggttggtccaggagcagtaaagacaaacataatgcacgagctccttcatatatatacaagccattgcattttgtggtctcaagattcttggactcatgcagtcttcggaggatgcagctaaatctgtcattgatgatgtagtagctccacctgtaagatctgctctttaggatttcttcatcttatctacataatgtggttgatctgctccattgtatcttcagtactttcccgtgaacaaaaatttgctaaagaacgttgggacacatcatgtcacttatttaacgaattgcagcaaactcacacttgaagatcaaagagcttctagtggttgcttgcttatgacataatcctagcatccaaactctatcaacttctggtttcttgtagtacttgtaaacaaacgcacacctgcttaagtagaataagggccaatgcttcaccactaaaaaaaagtttagttaaagttttgatttgatttattataatattttgtatattgattgatgttagaaattagtaagattcccatttagtgtatgccaattttttatgattatgaccaacctccattttctaacatattttatttagttagactttgccattcttctactcaatctcttgctcactttttgtattactttttctttctattgcatgagataatttgtctgaattttgttagtaaaaacacttaccaaaatctagacgttaacttgaacttgaattacaagacgtttttattactaatgccagagtttatatcattcaagccaactgtatgtaagccacacaacgctctgcaagctatgtattcttattatgcaaaaacaacttttttggtggacgcaaaagaacaacattttgtgtgatatgatactacgagtggtctacttgatatgttggtatgattaccaaccaaattatacaggttatacagtttttttctctgctcccacttgtagttaactaattatagacatgggaccaatttccaaaccctttcttatacagtagaactcttatcaaattcaacgtaaagaaagcgacattcaccaaactttaccatccaaagttgaactagtaaaagtgtcgaactattatagtatttctctctactgaaattgaactattttatacacattgttacaaactgtagtcttgactcttgaggttccaaaaccaagaattattaaaatcgaacagaaaatatacatgtaaatccaacatttttacaattagtatgtttttggtttttgtttattttcaatttacgtacaaaattgtgcttcgtattttatattaattgtcatttgaataatttatttcaaaccgatcggtccttgccgacaatgaagatgtcgtgttccgacgaggaacaagaagtcgttgaaatcggagccaaaacttcattacagtccgatacactgtcttgtaacgtaagcaataactccgacgtactaaaactcatcgacgacgacggtttcgcaatcggaacttccggcacatcagcttcaccaacaagaatctgaaccacacttctcatagtgggcctggtgaccggatcgggttgtgaacaagcaaggcccaccatcataacccgactcatctcctccgggttaaactcactcaaccgctcgtccacggcggtcaataacttcccttctctatacaaaccccaaacccaatctaccaaactcgacctcaaaccgggtcttaaaccgggttccggttcgggtcgggttatgggtcttctaccagtgcatacttctaaaacaacggctccgtagctaaaaacgtcggttttctccgtcgctcgaccggttaacaaatactccggcgctaaataccccattgttccagcggcggcggttgcgtccggcgatttatcgtgctccgtttgcctcgcgagtccaaaatcacctaacttcggattaaaattcgcgtcgagcataatgttacttgttttaacatcacggtgaatgatctgattctcgcactcttgatgcaaataagccaaagcagaagcgactccaagaagtatttttctccggtgaggccagggtaatgtagtcggagactcgtagagtgctttatcaagtgatccattaggcattagatcataaattaacagaatttcgcctttttctctgcaatagccttgaagacggagaagattccggtgacggagggttccgattagagataattccgataagaattctgtgtttccttgagaaatgtggctgcatcttttgattgcgataatttcgccggaatcttgtaagattcctttgtagacggtgccgaatgctccgtttccgatgactctcgatgagctgaaacagtcggtggctaatttcagctccttgtaagtgaactctctcggcgatttcattatttccgatgctaaagattcagactttcgagtgtatttgatctttttagagtaaacccagattatcactccggcgaataatgctaagaaaaatgctccggcggttactactccggcgacggcggctggtgattttttacagagtttgttacggcaagaggacgatggatcggcggtttttctccggacggtggatagggatggtgtgattgatgaagacggtgacgacggaggaggagaattaggcatcggcggtggtgattccgatgattcttcgaaagatgaactaaagctccaccaatcgacactgtgaatctcagtgcttccttgtgttgatccagagaatccaacaaacattgaatcgcttacgtaacgatcaagatcgagaggaaccgacaaaatcggcgatttaggtttcaagtttgagtaagagacgtaaactgttaaaacccgacccgacccgtcataagtgatccatgaattcacggcgtttccgctcttgagatcgatgtcgacgtttcccaaatcggctaccgcggctgaaacgacggcgtttagatccaatcccacgtggttcccgttaacgtctttgaattgcacatccattaacgtatcgaattcaaccgccacaaaacccgacccggatccggtttcttcggttagaccgagaaatccaccggtggatcctaagtaatcttcatcaggggagattacgaaagctaatccaccgccaattgaggaaggattgagattcgttaccgagaaggagaagtaagtagtgaaactcgccggagatttagtttccgggtgccggaattttaccggtttcccataaagagcttttccggcggtggaagtgggaacagagagttcacgagtgagcttaatagttccgttgttgagatgagcatcgccgagaagtttgaggcttgagagagtcaacgttccgagatcgaatctcgtcgccgggaaatcgcctctgacgtcggaggagcagaggaaggaggcaagaatgtggatgagagttgagtaaacagagaagaatctcggaggaagtttcaacattagtttaagtttttcattggattcctttggagatctgaggaagaatttggaggttgttgggttctctcactgatacaatcatacaaaagagagacgatgacaaatctctactgaatcagacagaggaagacgaaagacgacagaagagagtgggaaataaaaagcagaagtgaagaagacaggtggatctgctgattgacacgtggaattatgaactgttttaaaaaaatggaattttccagcgatggagaaggtcctcacgtgcaagcgcgtgttggcttctgtttgagatctcgtcaaaaaagtctttggaagtctttagtaatgttattgactttatggaacttatgatcaaagtacttctcgaattaaagcacttatttatttcagcgttatagaaaaaaattttttaaaaattcattagttgtcataatagttacagatttttttattatttattattctatgtaagaaataaacttatatcgttgtgaaagttttatgtcatatgattctttttatttgacttttatgttgcatattgtacccgttttcttcaaagatacttccttttataatttttcgaaaggaaagttcgtatggatcatcatatcagcataaacaaataatacttcaatgtcttaatcattatctctaactaatccacaagttcacaacgcagccactcgttgtcattaccagctcgtgtcgatatttgtattccttgttgcttttgttttatgtgtatttctttatctccaaatgtactaagagactgttaataaatttacttggttggtagcaaaaaaaaaacaagggaaaataatcgccaatctacgagacatcgtgtcacagtttgaagtatttatgtctatctgacgtatatttattgtggtcaatattagatttaagacatctctttttcttttcatttccttactcttttgaatttatagtctaaattttggttggtgataagatttcctcaagtcctaccaaaaaaaaaaagatttcctcaaatggaaacgtactagtacaaaacttaaaaagcctcaaacgtatcttatggacttgggcctgatataaacaaacttgttattaacttgggcttcagcccaaattggcacacaagctaacgttgtacaagagtgttatctcgcggaggtggggataatcctgatgaaaattaaagagcctccatattagtatgtttatgtgggcttttaattgcgaagaaacaaaacagatcaattactatctgggtttctattgggcctaaggatttgggcctatcctctttatctactagcccatattgtttttcatacaaagcaaagtgaatattagtctttcaaagcggggatgtttaattaaaatcatgtcggtccctgaccttgtgttctagttgtaacttgtacttgtaacatactaacattgaacccacaacgtatctgtctttcaaagttccaactaaaataaactagaaaactaatgctgaaaaaagaagaagaagaaaatgtcgatatttcatgctcaaaataatgcatcactatagctttcaaagaacagaatagaggaatgggacctcatatccgaaaaacatacctttatataaaattctgatgtaatgtctttggtttatcaaaatcatgtttttctctttaaacgttgaaatgatagataatgctttacaatgacgtcgaactaatttttttgaatattgaccggttgagtttaataagaccggcgtccatattcaaatagaattgtgacacagtaataattaataaaatacaagttgagatataaaatgaagtttgtaacaatattaattagttgctgctcatttcataattgtatgcatatctattcaaatttaactatacatctaagcacttttatggttgaagccaaaataattaattaagtttgtatatttgtgtatatgcatataattaatgtgtgactatgataataattataataatacgtttcttaatcgtagacacaaactttggataccaagaggggaatatgatagcatccaatggaccaaaagaaggcaaacacaaaaggccaaaagagaggttgagttgcattatttatggaatttttaatgtaatctaatctaatctataatatatgataattattgtactactagttcattttatttaatatctagacaatcgtctttcataagaaaaaaaaacaaaaattaaaaactacggtcggtcttcatatatctgtatgtctgcgttaatatttatacttttttcaagacatcttttttcttctttttttttgctatttagaaagttcagacccattatcttaatattgtgatgcgtcaactgtatttggtaactagcaagtggaactagaagcgtttaagaaacccatcgctattagacttgaatccaaaatcatattcatagtagactcacagtcactattatcaaaaggatgataatagaagactgatatgctcatgagcttctatatgactgaagatgattgatgaataaaaaaaactatgattcaaagggatgataatagaagaccaatgtgcatgagaatcatagctccaaaaagagggtcctacagacagagagacaggcgtcacggactgtcctatcgtcttcatcgggaaatgccaaaagatcctctctctctctctcacattacacaaataacatgcaacatgctatgtttggtccaacttgtaattatgccttaatcatttcttttgatctatttccttaaaggcaattcccttttcttgtaacttcctcgattgcacaaaccaaaagaagaaaagcaaaagatgatcacacttgaatgagtaagaaaataatttgtagtccattcaagaaatccaataattttattttgtccaaagcacatgatcaatcgcatatttcagatctgtttgtactctttttttgggtgctcgaattagaagaaaaaaacaaatcaatcgtcaatgaacccatgcttgttctacttctaacaaaactttcgttatgattttggctaactatgtacatgtttttattttattttttgaacaaagatgtacatgttttactaggtgaagtttattactagactatcatttcatcgcttctgaatttatttattagtgaaaatagaggttagatttagtgccaatatattgttcgatatcacattttgacttctctcgggtgtacactaaattacgtttaattcttcgtattacttttcttggctttaattttgtttacgagtaatttgtacttccaagttttgtaaaatctttatataaaaagtagtggaaaaataaatacaaattacaaaaaggcttttttgagttcctaaaactttttgggagtcaaagatggtgctctctttaaacaacgggaactttttgcatcgacctatatgctttgttcttgggacacagaacattttcctttgccaaatacaatttcttgggtggataaaattttccttttatattaaaataggagttgaaactatgtccaattaaattaatatgtagatccgaaacatagctagtacatatcaacgtagattttttataaaataagtaataaataaagagctactgtttcttagtctcaaaataccttataaaaagatattgttttgttttataaagaataaaatgaaatttgttaagaagatatatatatatatatatatctcaattagtctatatatagggagtatatatatatatagttattgattactgcttctaaaatatgcaacaattatattggtacgtatataaattgtttttttttaaaaaataaataaattcaatttgtagaaaaaaaaaacttattacaaataacataaaacaataaaatgccgaaactaagaaaccctttaaagttatgaccgtaatagttaaatgttgtatctacaatcctttgaaactatatctatgtgaatgaagattttagttgaataaagaataaatccaaaaatatcatcaaattatgcatcaacattaagggtgtcaaaatggatcaaaattcatggatcaagtcaactcaactcaatccgtaaactctaatgagttcaaaattttgactcaaatgagttgatgagtcaaatgagttgatgagtcaattggtttgatgagtaaaatgagttgatgagtcaattggtttgatgagtaaaatgagttgatgagtcaattggtttgatgagtaaaatgagttgggttgtaatggttaatggtttcaatggtttacccaattaacccatcaagttttgtaaaattgaattaaaccaactaaaatctctaaaccaatgccaatttaagtttaaccaacacaactaaaccgatttaataaaattaatatttttctaaatttcttaaatatacaagcgatgaaattgagaaaaaagtaaactcgtaattttccaccaaaaaacataaacccgtgattttcctgccaaaaatttaaacccgtgatttttcccccaaaaacgtaacccgagatttttctgccaaaaatataaacccgtgatttttctgtcaaaaacttaaacccgtgattttcccgccaaaaacgtaaacccgagatttttccgccaaaaacgtaaatccataatttttccgccaaaaacgtaaactcataattttcccgccaaaaaacataaacccgtaattttcccgccaaaaacgtaaacccatgatttttccgccaaaaacgtaaacccgtgattttcccgccaaaaacgtaaatccgtgattttcccgccaaaaacgtaaacctaagattttcccgccaaaaacgtaaactcgtaattttcccgccaaaaacgtaaatcttttaaacaccgtgattttcccgccaaaaatgtaaatccgtgattttcccgccaaaaacgtaaacccgagattttcccgccaaaaatgtaaacccgtaattttccgccaaaaacgtaaacccgtgattttcccgccaaaaacgtaaatccgtaaaaagtggaatccgtaaatatcctaagtttgatgataatgaattaataatgataattatttattattgttttataatagtaattaattaaattattatttaaatgggttaatccatttaacaactcaacccatcaaattaaatgagttatgggttgacctaacccatttaacaaaatgagttgggtcaacccataactcatttaaccctaaactcatttgattatgagttgagttgagttgggttacccattttaacacccctaattaacatacactaattgatgatatatatttttcaaataacaatatcatctaaaatataatttagattacatcccttaaatatttataccttctcccaacttataaacacaccatagatgtacacatgcacgtgtgtctatctaaactgcaagaaaggaagagactggccttttcgaagaaaataattatttacaaaaaatcactttcccttttagaaaataatttactagtcgactacaaaaaaaagggtagatctctatatgtacatctcccagatctctcaacattatttatacaattttttcttttattcctgcaagagtttttttttgtttataacaacaaatcctctttcaatataatctttatatatacgtatactttcgtgccttgaaattttcttcctcatcttctttggtcttttcttgtcatttggcataaccaaagagtcaagcacattcaaacattctcaagccctaaaacccaaaaaaaacttatatgctcttgttcttgttcttcttctcccctcagcatattaaaccctaattaactatctcttttgtttgtatactgttataaacctcctgatcatcttcttgttttcttgcaagattttataaaaaaaaaacaaaacccagctgttcttgttcttgttctttagctccgatccgttttaaattaaaacacagatatgcagatgattccaggagatccattttctatttcatcctccatgggagggtttgttcatcaagaaacacaccttcatcatcttcagcagcagatccctgaccttaaccctaattctaaccctaacccaaatgcgaaaccaaactcttcatcagccaagaagaagagaaatcaacctggcactccaggtataactcattccacaccataatatactcacatgtatacccaaatctatgtgcatgtgtgtgagtcatagatacttgtatgtctatatttctacatatacataagacgtagaaagcagctccatatatttgcagatctgttttctgatgaaaataacatctccatatatattatttgctgaaataatcacaaactcagtattcacatatgcatatacatccctctctatatttcttatatgtatatttcctccttttactgtatccggatggtcatgttacatatttgtttatttataatctctacaacatatttggagccattagatcaaaatatgcgttgatatatcatatttaaacataaatatggacagatccagatgctgatgtcatcgctctatcgccaacaacactcatggcaacaaacagattcgtgtgcgagatctgcaacaaagggtttcaaagggaccagaatttacaactacatcgccgtggccacaaccttccatggaagctaaagcaacggtccaaacaagaagtgataaagaagaaagtatacatatgtcctatcaagacttgtgtacaccatgatgcctccagggcccttggagacctcactgggatcaagaaacactacagccgcaaacacggtgaaaagaagtggaagtgtgaaaagtgttctaagaaatacgctgttcagtctgattggaaggcacatgcgaaaacttgtggtactcgtgagtataaatgtgactgtggcacgttgttctccaggtaatatttactaacgagattaacagttggtattggttaatgtataagttgagtttttttctacatgaagtattagaactcggtattctattcatatatagcaatatcggatgaaagcaatgcaaaacaattcatgtgacagtgttagaacctaaaagaattgtgtaaaaaactcaaacagatataggtgtatatatcaagtgtcggcatgcatgaatgtgtgtgcaatgtcttgtgatttgttatatctgttgcgaaagttggaatagagcagagcattaattgaagacattctgacttatgggagcaatttctatttatttttgtttaagattttgaaataatagctgcatactttatgagtatatgatattcgatgagattttgatggcatgagcatctattcattttgtgtggttgtatgtgtacatgtctatttggcttcattcttttcttctattcacaccatatggcaagaaactagatatcatgcatatattttgtcaacaaacacatacacacacatgcatatatattatatatatatatatatatataagttctatgtttttgtatatagtaacaattaaggtttttgtgctttttttttttctttttttttctagttttatgtttatttctgtcttcatgtcgcgagtttgcataggagaaataaatgcttactccggccaagaatgtttttgttttgcaaatgatttcaaattcaatgctctattgaataataatcaatgcagttgtctcactcttaaaataattatgtctttatttttattatttattatctaataaataatcgatctctgttttataggaaagatagtttcatcacacatagagcgttctgcgacgcattaactgaggaaggagcgaggatgagttcacttagtaacaacaatccggtgatctctacgacgaatctgaattttggaaatgagtcaaatgttatgaataatccaaatcttcctcatggatttgtacaccgaggagttcatcatcccgacattaatgctgctatctctcaattcggtctagggtttggacatgacctaagtgcaatgcatgcgcaaggtacatcacataccaatcctctttctaaattagttattcatatatatgaaatattttttttttttgatgaatatgttataatactattatcaattcaattgcgttaatttaggtctatccgagatggttcaaatggcctccaccggcaaccaccacctcttcccgtcgtcatcatcatccctccctgatttctccggccaccaccaattccaaattccaatgacttccacaaaccctagtctcaccttatcatcatcctcaacatcacaacaaacctcagcttcactacaacaccaaaccctaaaagactcatctttctcaccactcttctcctcttcctccgaaaacaaacaaaacaagcctctctctccaatgtctgccacagctctcttacaaaaagctgcacaaatgggctctactagaagcaattcctccaccgctccgtcattcttcgccggcccaacaatgacatcctcctcggccaccgcttctcctcctcctagatcgtcttctccaatgatgatccaacaacaactaaacaacttcaacaccaatgtcttaagagagaatcataatcgtgctcctcctcctcttagtggtgtctccactagtagtgtggataataatccctttcaatcgaaccgatcgggtctaaacccggctcaacagatgggtctaacccgggattttcttggagtgagcaacgagcatcaccctcaccaaacgggtcgtcgtccgtttttgcctcaagaactcgcaaggtttgctccattgggttgattatgtgtttaattaggtactgtgtgggggggacaagattttgggtttaattaggattggaagttcctttgaggagacaagtctaattaagaaccgtacccccttgtgaagcggtcggaatgtggggacaaaggttgacaagacatcatcatatcaatttacattgaatgttatgtacttttttactatgtttatgattatcgcaattcacataatatataccaccatgacatgcatggatatgtatttccgacattgtcgttttgtaaatgttgtttattttttctcgttcttgtaatgacattcaaaaaattggtaaatcttcaggcttttccaagtttgttaacgaagacattgcttaaatcgaatattgtgatatatatgttcaattctctaaaatccatggttttctgttttagacacttctttgattctattgtgatgcgatcactacacttatacagttatattctaaatttagatatgttgacaataaccctacaaaacgttccccaagaacagctcaaagcctcaaagaaagtcgcttcaaaagttttaaaacaaaagtaaactcattttataaccaacattatgcgttcatatataactgttttctttaataaaaatacaaaattcttacataaagtataattgaaactgaaccaccttgttgaaacttcctttcaagagaactcaagttctcgaggtgtgtgtcaatgtaaccttttggattctgcgtaaattaaaatatttttaactgatactcttttcagtagactgataggcttgtgcttgtctttattttgacttatctctaaccccacacatacaatagtataactaaatagctagtattattttcctagaaaatatgaaatctgtcgtcttgtggatccatgcgttattcgtttttcattgtcaaacactaaaagatttagtatgtatttatgttatttgcttccccccaccaatggtaaatcctattataagtgccactaataggattatttaaatttaaattttgatgcatgtcaaaatcaaaatcacaaaacagagtaatatttattttacataacatattattctttccaaaatctgaagcaaaaaaaaaattagatgcaagttttgtgatactgatccggttaattacacttccaacattttgggcccatcaagtattctgttaggcccatatttatctttcagttataaggttggcctttaaggcttcaattctaataggcccaagaatcgcagttatcttacgtggcagagtaagagccagcgtggaatagttagtcatacgtgtttaattatcattggttactatttacgaaattgaaatttacttaaaacaagttccacgtgggtcataacgattggatagaacaacgtgttgttataactagttacacttaaaacatgcaaatcaaaataaaaaaaaggcttcgaattcgatcgaagaacgataattcgaaacacacaaatttgcttgaatcaaagactcttcttcttcgttcgttcgtttcagtgattccaaagattccaaatttgtcggtgtaatcttcgttgtattcagaggtgtatgtatatgtattgaaatcgagaatggatctgttccgagtttggtcagggatggatttcttagcttggagaggaatggcttacacacttcttcttctcaacttcgtctttgcttgccaacttcttcttctccaacctctcgtttccgctctaggtatattttattctctttgattttcctatcttcgcttcgttttcccctggtgagattgatgtttgttgtttagctgatttgggaatcttagggcttagaaatttgctctaaatggcgaattgcttctgtacttttcgaaagttttctccttttcgtgttgggcttgtcgcaaattgaggttccctgtgatggtattgaaatcgaatttaggactctgtttttgctgctccacattatgaattgatctaatttggatactaggttatgagagtaatgcatctttgtatactcgttgagtgttagcgttgctgtttattttggtacagatggtcaatcggtagatgctgctgagttattcgagagagcttcacaaagtatcaaggttaagcgttatagtgatgccctcgatgatctgaatgcagccattgaagcagaccctgcgctttcagaagcttattttaagcgtgcctctgtgcttcgtcatttttgcaggtataggaatgagctaaaggtcctgtcggtttgcatttttattcttataaggcgttaagccagaagttgatttctcttctatttctctgtgttatatagatacgaagactctgagaatagttaccagaaatatctggaattcaaatcaggagattcgaatgctgagaaagaactctctcagcttcatcaagctaagagtgctttggagactgcctcgactctgtatgaatcaaaggatattgcgaaagctcttgaatttgttgataaagttgttcttgtcttctctccagcttgctctaaggttctcttcttgattgctatttgcagtatatctttggactctctgatcatgcagtttcttattatttacattgttttttcacttcaggcaaagcttctcaaagtgaagctccttatggtgtctaaagactactcaggtgcaatttctgagactggttatattctcaaggaagatgaaaataacctcgaggcgttgctccttcgtggccgtgcctactactatttggcggatcatgatatcgcccaaaggtttggtctaacttcaaccttattttcaatcagagagagtttggggtccaaaacagatatacttaagtaaactttctgtttcaggcattaccaaaaagggcttcgtcttgatccggaacacagtgaactgaagaaagcatacttcggattgaaaaaactgctcaagaaaacaaaaagcgtgagttctgcaaacctctttgtcttcttttaacactgagctttagctgccaatttcttgtgttgaaaacatgtgctctattgcaggcagaagataatgcaaacaaaggaaagttgcgagtttcagcagaggaatataaagaagctattgctctggaccctgaacacacggcaaataacgttcatctctatcttggactatgcaaggtctcagtcaggctcggccgtggaaaagacggcttaaatagctgtaatgaagcacttaacatcgatgcagaactgattgaagctttacatcaggttcaaatcatcaagtgttaaatcataacattcataactattttaaccaacagggttctgattactacttcatcagagaggagaagctaaactgttgcttgaagattgggaaggagctgtggaggatttaaagcaagctgctcaaaactctcaggttggtgaaagattagtgttcagtgtttctgatatctaaaatgtagcttagatcttgactcaactaaaacacacatctaattgtaggacatggaaattcatgaatcacttggtaaagcagagaaagcactgaagatgagcaaacgaaaagattggtataagattcttggaatttccagaaccgcctctatctcagaaatcaaaaaagcttacaagaagcttgctcttcaatggcatcccgataaaaacgtaggcaatagagaagaagctgagaacaaattccgagaaatcgctgcagcttatgaggttcaacaaaattccacatcactctttcatattcacacacatggtcatggtctctctcattctcttgacattttaaccttttaattttaccagattcttggagatgacgataagcgggcgagatttgacagaggagaggatcttgaagatatgggtggaggcggcggtggaggatataatccgttccatggtggtggtggtggtggacaacaatacactttccatttcgagggtggttttcctggtggtggtggcggttttggtggtttcggtttctaacttgaacaacatgatggaatcatgtaacttaagactaatcttttcaaattatactcaatatcacattttcctttctttcatcaaaaaaagttgtgtgcaatcttaatcaaaacaatcacacgtaataacacatctataaaacaatctcaaagtacaacaaaaacttaaagctctcgttattcttaaaattccaaatgtggagactcaagaaaagctctctctcgagttatatccacagagaagaagaagcagcaatggctgcaacggtagtgattctgatcccaaacccgaatccagtcctctctgcatcagatgaatcagtagaatctcctccatcatcgccaccggaagctgagccttttgaaacagagccgcctttctcaggggccggagcaggagccacgcttgatccaaacatggctaatggcagcaaaacttgatcaacctgataaacggccagctgcttatcgctgtagacagagttagccacggtggcgctgacaactccagtggtgatgttaacttggttaccggagctagtgatgttaagagggaatttaccgttttggccatctccagcttgcgtgcgtaaagggttactaacggtttgaaactgaggcatggttatgagtgtaggtaagacatggaactgaacaagctgaactttttgttggtcagacaatgagtttaaggttccggatttgaggctgttgaaggcgttatcagtcggggcaaacacggttaagccattactcgaggaagaattgagctgagtgttgatttggtctgaggcttgagtgcttttaagaagtcttatgaacaatgtgaattgaccagccttttctaggattgcggttatgttcgttggacctgaagggcctggagctggagcctgaccataagtagtggctataacgaggaagaagatgaagagattagagaaaatgaatgttcttgaagtagccattgttgtagttgttgtgtgtgtatgttgagatgttttggggtttgttatatagagagagatgtagtttggtgaagagtaggattctcttactagtgtgaagattattactaggtaactaaatgagattctatcaactaagtcattagagattggaaatgtttcttttaggtttaataaagtttgtttgaattgagaaagagagaggagagacattgctttgaagggagagtttgggtgggtgaggattgaaaatgaaaaatgaactgaaaaaggtgttatagtgacctgtcaaaaaagctgtgaagaagtgttatccaagaaatatggattgctaatcatactactgttcattatgattttatgtgtcatgtgtgtgcctatcatcattccttatattttagttggcaaaaaaaaaaagacttggaagtattgaaaaccaaatctgatctcaacctagacaagtcgattaaagctaaaccgaaaaccgaatcccgaccggttaattgaaaaccgatccaaccctttagggactctagcttcactcaaaagatctacgctgctgtcaaaccacctgagtacttgctggctcttctggcaggtgggaattgcttctcctccatttcaaatactcgttaatagctgttgtgccggtcatggtgagtccaaatccgatcatagtggctaagacaatgcacattaccggctgcttcacctacacacaagttaatgagagagagtgtgaggaatcaaaaactcttcaacaaagtaaggtttctctgtgacaacaaagtaaggtttctctgtgacattacatcaaatcttacaactctgtagaaaagctgagcgaaaaggaccacaaaaccgaactgaacggtggcgtagatccatacatagttcttcttcactgcaacaaaccaaaccacttaagactgatgatcaatatagaatacgaaaaaatatataatttcgaagtagcttctttattacccattgttgttgatatcattgatgcaagaagaccgataatgcaagagaacggtaaagctattgcaacggcgctagatttcatatctataatcagaagctgttcaaggaaacagaagtatgcaagcatgcttacaatgacaagaattggaatatcttgccatacattattgaaccgtgaaatctcgatatccctggctgctctagaacggttttgagaatcctgcacacgtagaagggtaaccgggagatttctcacctcttgcttacacacatcacatgttatgttccctttaattgtaaaccatttgatagtgcacgttttgtgggcaagagctagttcccctttgcacatacattccatcttaaaagcttcttcatcttcttccatttcaaccatacagattctacacacagcttcttcttcaggaacatcttctccaccatcatcattttcatctgaacacatatcacatagtttgttacatagagtcaaaatatggcatcacaaagatatgtctgggaaggtgatttgtaaccgtggagtttactcaatttcgatgcctgcgtcatctctagtctcttctcatccccacgagacggagtaggaatcacgcggaaaacacttgacggctttacacttccatctttgttgaagaatgtggggacagagcgtgtacgacgaataggcagtaaacgctcccctttctagtaaaaagaacagtaaaatcaagtaaagcagaagataaacagcttctctaaagctaagacaaatggaaaatgaatcaattcatcaactgaaatactcaacaagataatctcccttattaatggtataaccaagttttgtaagatagaatactgaccatggatgtaaccggatcaacctcaacggcatacctcccgttcatggactcagggtttgagtgagttataaaagactctgtcttcttagattttctaggagctaagagattagtgagagaccatgttcttggaatataagacttatcactaccatctcctaaaggggacacaacaccttcctcaatatctgcactgtggttcctgtttttgaaattcttctgattcgttctgtttcttgacgaggaaggactcattgatccaacacgtctcccagttctagggctggacattggagaaaacttgaaccttttggaaacggggctatgaattaaggaaccatttgctctcaagaaatcgccatgagcttctctcgattgtatatctaacacaaggcctcgccatcgttgatgttggctcggtgatagcatttctgttatctcagtagaatctccaacctggaaaactcaaaagaagacttttgtatcagttcctcacaaagttggatccttgaaaactcatgttcctcaatgagcaattacaatccctagattttcacaaaaatgtgtgccttaaacctggaatctccggaaaacataattgaagcagttccatgatttacaagtgacaattcaacaagtactaatgatcaaaacaatcccttaaaccctgatcttataaccctaaactctcaagagctaagctaaatcagaaagaaagaaaaagaagatcaattttgagatacccatgaactaaaaaccactgaaattagcttaaagcatgaatctttcaggaaaaattcaaaattttgggaattgagttaagacttaagagtgagaaaactcaccattagagctggagaagtaccttcgcaagaccaatgttctactacttcgcgatatttatctttatcatccatcaccatcaaattacaaaacccagaaacagtgaagtaaaagaagaatctcaggaaaacaaagtatcaatctttgggattaatttgcttaaaaggactaatttttaggagaaatgataatctgagaaagaagcttttgatcaagaacactcatataggttgcttcaattttgtgtgcttactcagtgcctgccccgtttctctcaactaaagaagtaaattggattcggcggtttttatttttattgttttgtctctattacttacttaagtaataacctcttttttttttctaattttggtatatatctttaaccagtggtgcatataattttgaatcaaaatttccagcttacatgtcaaataaaaattgtcttcaacattcttgtgaaagaagaaaaagaaaatcatgtttctattcaaaaatttgaatgcatcaaatgtgtaaagcaatagtaagaaggtaatcaagtatggcagcccactcaaatgtatgtacagattacagatattcataacattttaaaaaatgattcaaaaatggtttatggatattatctgaacttctgctgaatgttttagaacatttcacaaataggttatgtgtatttctgatcatatttggaacaaaatctgattaaacaaaaaaaagaaacaatgaattttttaaaaacaaaatctgaacatatttataacagaaaaagagattaggaaaaaaatattatgtatgaaaattttgttggaagaaaaatacagattgtctttacttatttagatgtgcaatgctgagtttatcttatactgcttttgaaagataaaacaacaaaaaaaatacttttgtaatttatttattaattgggaaaaaggagaaaaagtataacatttcgagagaaagaagtaaataacattgagagtgataaacctttggacaacaatttaaaattctgtcgagataagaacgactcataacgcaaaatatggtagttacgctgacacaaacaaagaaataatggataaggcaaaatgtaacacgcatcacacctaagtaggatcgatgtctcaacaaacacatgtacaagtgtacatcaaaccgactaaatgtatagattatgtttatgatatgaatgactataagatggttaacaatgtgaattttttttcacgaaactatatcaacgacgtgtcgaaagagcatgtaatcttacaaatctgatagcatttttagtgctatactctgaaggctgaagcacatgaaagatgaaatgaaatcatgcttgacagaaaatgggacggtgacgatatcaaaagcaaaaaaataattgtggaaggcccaactcggcccaacttagccaaaactgtgtggccaccactcgactcgtgttcgatccaaaacataataggtttacattttacaaattttcagagtttttttttgctaacttaaaaaaaaaaaaaaaagagagtttatctatgctaggttggatgattaatatgattagcgtacaatattatttcttttttacaaccattcaaaaaaattagtttcctaaaaactttttaagaaaattaaaacagaaactacttgggatcaacacgtatgtgttcaccacccacacggatatggacactgtgtagggacaacagccaaattcaacatcaaataattatttcgaaggcacagacaataagtgggagccactcgtttttgtcaaaaatattgaataacaaattagcgatataaacaattctcacttattctgtttaaaaaaacgattattggtagtttggtactactactcaataatcatagaagaccatgaaaacgaaatccacgtagtatgtgtataatcacaaacggtcaaacatttaacattagcataaattcttgtcacgtggcaatattgtggcggtagaattttaacattgtggttagcttcaccattaaatctgttaaaagcgcttcctcactcactcttcttccccaaaaaaaaaacaagacagaggaagagaatcacgaaaccatagtcccaaacccttcgaatctataagcatttctcaaacacaatcaagaaactgtgtttagcttttagatttctacaagcatgtaagacgagattttgtttcttttttttctgcatggtggatcgaacggtgagaatggggacggaggtgaagtcgattagggttccaagaagggtctggtttggatcacaaatatctatagttctcctcgtgggtggaaaccatacctcctccaggttttgtactcgctagattcttcgattttctctttgcgattcttctttgttcttaagatctgtttagcaaatcgtactagacattaatcatattttaagattccatcggagctgaagtatttgaagaaatcaatgggtataaagatcttgaagcttaatatcttccgtggatctacgaataggcatgctctgtttcgtgctctcatcatcgcctctgctctatctgttgtccctttgttggagttaaccgctaaaaatcacgtctttggtgatcatggagcagtggatttggtcgatctcggccgatttgttattccaggaccgaaattgttcttccataagctcgttcaaccattctggggtaaaattgagacagagaagtatccacaagtggtaattgctgatctcgttgatgagctcatggggttaaagctattgcattatgatgctaagattctctgcattggtcagggatcggattctgctgtttcagggttcaaagagatgggtttctcagttgttcaaggggttcctaagcatccattgttttcctttttcagtaggaagcatgtcaacgagcttgagcttagtggtgacaagtcttttgatttcgtgctctgtggggatgttgatcatgttgcttcccctgctcttcttgtgcttgagatggagcgggttctgaagcctggtggaaccggagcagtccttgtgagtactaatgccaatcgtcttgtcaaatccgtgacttcggggcttaagcagtctgagatagtgcgtgtgaacaacttggataagttcaccgtcattgtattcaagaggaatgtaacggagactgcttattgtattggaaagtctcagctaccaagagattgcaaatctgttgacaccaatagaccttacacagagttcatggaacctctactggagcaaaagcctgctgatttcccaaaatcagtagcttacttacctaaattccttgatctctctctgaaaaagagccttgtctacattgacattggagcagccgagcacatggatgctaatttaactccaaactggttctttccgttatacccactcgacagcaaagcattcaatgtctactttgtcgaccacaacacttcagtaatgctatcctatgtcaagaaacccggcgtcacctttgtttaccatccggatttggctgagaacaactcgacagggaaaaagataactccgcttgaacagctagaaccatttccagaagatgagagattcgatttccttgcttggtttgaggaaactgcgaaatacgcagactttgtagtccttaagatgaacacaaaccaagtggaaatgaagttcctaactgttttactggaaacaggagtcatatgctacgtggatgagcttttcctccgctgttccaaccacaagtcagactgcatcaacatgcttcaaactctgagagccagaggtgtgtttgttcatcaatggtgggaagactaaaccaatgtaaaactcaatctcgcttcgccttagtcttatctacgtcgattcgtgtctgtctttgtctcagttgtaatgccatcaccttctgtgtttgccatagttggtcctcggccaccacagctcctggccaagcacctataactaaataagaagctgcctatctgtttatcattgctatttaagaactcagtttccacttataatatattgaaccataacgttttacgtcttaattaagcatggcatatattacacaagtcgattgcttaactaaatttgttcattctccatctccatttcatccgttcttgttaatctccaaaagcatctcaacaggttgtctgcaaactgggcacagatttgtctgaaaccttaacgcctttgcgcacccgctacacatacactgccaaacagaaatacacaaaccatttcaaaagaagttcaattttttttttatatgagctaattttaagtatgatgaacactataccatgtgtctgcaaggaagaacagttgtatcgcgtggttcagacaagcatacaacacattcctttccctcatcggaaccatcaaccgtgttctcaatcccataaatctcaagcagctcatacctcctcttattcacccatagtatctgcttcaccacttctattttaatctctcctttctccttggtatacaccacttgagtaatctgcacattggtggaaccagactttccttcttccgctggagttgcctccgccttaaccgccaacgggaagacatctgtatccacctccttgaatagctcggaatctttaaacgccgtcaagtctatacccgttccagatgattgtatgaacttctgaccaagtccttctccgaaatcaaaagtgattggaggcaaagtatcttcctttgtagctctaagattacattctgcatcttctgtagcaaagaaaacaactgtgatcctgttctcgccaaccaaaacaacaaaagctaagtcatttatattactccattgattgattcaaacaagattcaaacttttaactaaatttgatcatttcatagtttgaaagtaaaaccttccgggcatggatgcatcaaatgtgaaggagacaagaagtcgattcggattctccgggtcgggtatgagcgttaaagtcttcttcttcagattaacatcgttacgaatcgtgacggctttctggtggacgtacgtaggaggcggcagtatagggtatctaccgccgtgaaacaaaggatgaggtagttggtaactgttgggaggatagtgatgcaaatggttgaaattgtacggtagcatcggcggctcagttactggcggaggaaggcagttacctggatactggtcaacgtagttagggttagggttcagatatggtggcacggcggcgaatacaaatctgttcggtgggagttcaagaggagccgtttccatcgccggaggaatattgctcctctgccttctcccgcagcagaagatcaaactgatcagattccccatgatcggaaaaagaaaaaaggtgaggtttttcggtgattcagttgataaggagtagaatcgaagtaggttttatgatcattgagaaaggggagtaatgagattggagatagcgacgtcgacgaagaaacaccaaaacgtttatttgtatatattataaattagtattaaacttgattaattaccatgggaaattgattattacttttaatcacataaaacaaagaaatcattatcagtagcactaggcaggcaataggcccaaggcctcacaacaatatcacggttacaaaataagaagaaacgaaatgacaaaaccggagacacgagattggttttggaggttgatcggaaaacaaagaaacacatccattaataccggcgattacaagaagcactgctcgtcattaagaaacatcttgcactgatcgtcattaagaaacatcttctcttatgtctgattatataggagatcataataacgtcgataaaaaagagtttaaagtggaaatcaaccaagaaatagaaagcactatcaagatatatttcaaaatgaatatttcattaaaatggattaaaaaataattaaacactcgagttttgatcttgtcttgttaaaattttactcatcgtgttcctcataaattgtccccagcgaaggcgaagctgaaaccctcatcggataaacaagaatcgccggtacagtttcgaatggtccgatcatcctagccatgatttgtaaatatactctttcttcgatttagacttcggcagctttcgactgtgttgagaagatctatgtggaaattattgttattgctgatatttatagagatagagaggaatagtagtagtgtaattaactaatcatcaagtgatctttatatatttgtatacttttttataggacgcagcttaatacttatcgcacgtgatatttatgtttcatatttaggtgatgctcgaaagttgaaacataagtatgcgtacactgctttagtttgcagataaatcatacatgtctttattaaaaattaatgtaaattagattcttttggttgagaaaatgatcgcaccaaacagaaatagcggtgagactggtttcaggtttaagtttggtttgatatttgaagatactgattttttgtcgtggaccggttatcgtcccggttcggttagaaagtatattaagatttgtctttaattaccaactcgtgagcatataacaacagatcaccgagcgtacaagatgtgaaagttgaatgaaaatttcacaaagaactgagatttgattgtacaaaagatacaatacaaaatctcatcttatacagttatagaaaaaacaacaacaacaacaagagtctatcttaaacccaagaccgagtaacaaaatgatcattacaatttacacgtcctcgttttcttgttcttgattgtcttcttcggtctctccgccttctaaaatcgtctcaagaatcggagaaaccgatggcttcgccggagaaatgatttgtggaggaacagcctccatccaccacgccacatccaccaccaccgtcagattctgatcgcaccgattatcaaagaaacacatattcgcttcactagatattattttagatttgcggaagtaattcaaattgttactttttgagttgaattgatacgtgttcatttgttcgtatttatagagagattgacgcgtggagatatgtggaacaatgatgggtttgacgtaagagtcggacaagtggacgatccacaatgtttaagttagtttgttgacttggtcttatttgctaataataatgaaaccaacacgaatattctagaacctcttgttgtcgtcattatcaacaagtctcgaatgtgcaacacgtgtgagctcttgtctcacacgtctatatctccgctaagatttttttttgttgttgtcaatgttaggatatttctttatgcgtcgtatattgcaaaatactagacacacacttagggtttgaagtttctcagcaattgtgtgggtacgctttggacaaatacactactctacaaattagtttagaccgcgtttgactcggtaacgttagaagcagattagacactaattaggcccaagttaaactatcatgggctcattcgtaaacttagttctaatgggctctcaacatcagatcttaatatttatagagagcatgaggtcaaatgcgtagttccgtatatgagaattatgaaactgaacccataagcattttaatcacgctgaggaaagtagccacttctcgtttaactaatacggtaatacctcattctgcctgttttattgatttgtttggatattttggtgcaattcgattaaaaatgtacctagaaaacaaaattaaaattgagaaaataaaaaacgtaccaattgatagaaaaaaagattattgtacgctgaaaaagtagaaagaactagataatttttagtgatgacaaaaacgaaaatcttctttgtgaacttaaatcgctggaaaacatgccatatgcagagttaatcaaaacattattagcaatcaattgatatatgtatatataaatataagatgccttagctttttcttatatatataattaggttaattagaaaataagtcaatggcctgaaaaggattggataagataaggatatttgaaaggttgctttcattcttcttgcaatttcccccttattttagttttcttagcttatagaattcatccctcattttccgtcatttgatattataacataagatgcatgaggacgacaaaaatagaaataataagtgaataggtaggtataccatgtacttgtcactagacgattcgatattttacatagagattaatctatttctagggaattattggcaccttatgatcgaacatgtcacctaaaaaaagtgagcttatcacatcgcataagttttgcaaaaatattcttaaactaattttttaatgtatgtcagaataatgtttcatcaatcgagaatatggattagagatataattcactagcaaaattttacaaacggattcttttttcttttttttttgataaccgaaattgatatatgcttgtatagggtggtcgaagctaaggtctaccatagttaattgctaatttaattattattagttgtaaaacacacaagatgacatcattatttgatctaacacaataaaaatagaattaggcaaatgaaaatcggtttagtaaacgacaaatcaacaatgtcatgtgttttgttttctgattttggttcaatttaattatttcaaaataattttcttgatatccaaagatccatttttaattcttttatgagagaggttagagcttttaccctcaaaggcctcgaagctattttttatttttatttttttttgtaatgtgtcatttttaggagtccatttttcgaacataacataagcatagatacaatacggagctgatcatttgacataatatgaaattttccaacagttatttgttcggtgataaaacaataattgaaatcccaacaagtagaagatatgcaactaacaagaaagattacgatcatacggctgaacaatgagaatttgatgtttcttaatcacgtaggattctatgcataattagaatatataggaatattattaaagacaagagaagatttaagaagctcgattattatcttactacatgcattattattatttgttttttttcttggtacttgtgttttgttatgtatctcaaagctccaattatgtagaggtcatcgaccaataattaatcaattgaccacactactctatattttaaatagtaattggttcaacaggcaaagacgctcttttatttgacgattattttctagtataataaaatctcacaaacgtcataatttagttgtaaggaaagcaatagtataaaagaagtataggtagtgtgagtgcgacaaaggaaataaaacacatacaagacttgaaactatttatgaattatgacttctttgttttagtaagctaaagtgatacataaatataacatattatatgtggatatgtacaacaacaaatctacaatgaatgtctacgtgcatggtggatacacatcttctatacatgcacgcggcatatatgataattcatgcaaaattaaaataaagtatcgttataggagttattaggccatctccattggtaagatactttaaaagtttctaaaaaaaaaaaatataataatattttattatgatttagtttctgtccaattataaacacacatatacacatagtctctcaatcattactcgaaagtttttctgcagagaaactattctcaatctctcttctatctctctcctactctattattattttatattttttagttaataagaaactatgtgacagactactaatggagatgctcttattatctagttgtgaattttgtagaattgacatatgtattatacacaactagttatgaatctagattttttaaaagattttataaggattaaatccacctattttcattgctatatattaacctacaattatatctataatgcataatgcattggttatttatgtttattgtttacaataatggcaatgaacgtctatacaaaattacaaagaatatatctaaacaaaaagtgaatgtccttttatatatgaccctagctataaaatttattcgagtcccccacatgttttgttatgttcagattattgtccaacagatttaccaattataatatgtttcctgtttctacaataatatcatctacttgtaatttgttggctattgcattttcattttgtccatcatgcatttggtaaaatattagtagtatttcgcaagatgtaccaagcgtcgttaatatctggtctcttttgtccattttcgtctttcagcatcaagagaatgaaaaaattggagagctgagtgacgtgtcgcgatactgacgcctgaaatatccgtaattttcaaattgagatgaggtccagtgggccaacttatgttgacaagtgatatctcacctattattggcccacgtaatccttttattatcaggtgtattttaaattatatgtaattattttgtattattataatttaaagaaagtcatatcaaacagctgaacactaaataaataaattataattcttttttaaacactatgtttttgttttatcttgatatatggttgacaaaaatacaagattgataaagaaaatgagtcattgtggaaacaaaaaatgattccacaatttgctatttattttgatagaaactatttaagtaagtgaacaaggcatgtccctatttagtccacgtgaagtaatcggacgtgtcaattttgtttactgaatagaggtgtaataatccgacgtgtcattcatctttggactatccaataatgtgtgcacagagttgggccatgttcctctgtggacaatcccactagtaatcctcatacacaatagagtcatattattgaaattaactgcaatgagtttttagattggataaaactaaaagaaatgaaactggctaattgcaattggataaactgaacatttatttttaatttgtatttctatgagtttctaaaacatcggttcaggtgtcaatcaactgcttaaatcaaattctttattcgagatattgacagatccattcacatcaaatgtatgttcgatatatcatagttccgtttcggttgtatcaccggtttattctttctcttttccttcaaaagaaaacccggttaattatggtctaattaatacaatcctcatactattcagtcttagttgattgtcaaattaactttgttttagtgttaacaaattataataagcttcgaaggtcaataacaataacagacagattattaattgctaatttacacacacaaaaaaagactctattgaccatctaaagtgaggtaagcatcctttagaagtcgctgtgcttcttctcttcttctgcgcacaaccaaaaacatcaaacggacccataagaactaccaacaaagtttctgaaaaatctttgaacagatgatggattgatataagcacaccattaagtacagtatacaaacaaaatatgcacaccttttaatgtcttccacagcttgtttcctctgttgaatttgaagttccataatgtgaataagcgttgctctcgcctggacataagagaagatgatcaaaacagtgaaaacaaaaactgatgaaatcatgttgtagttaagcgaagatgagatcttctttacttggtgaggcctcaaggaattgagaaggtgatgcaaattcttgaagatagaagaaatttcaccaatcctcttcgcatattgagaaggtctgtcaacaagaacatcagcaagctccaatatatgtaactgtagttctctattcagtgacctgagttcattcttgtaatctacacacaaagatatttgaaactttcttcaacgaaacaaagaggcaaatgaactcatgtaataagtttgattccaattaagggaagaaccaaaaaccgtactctagaaagcaaataacaattgggttttgagtttgattcacaaagctaaaacaatgacataccaagattagaatctttgggataaagttgaggcactccttgttcttctaagcttggaagaacatcttcagtctacgaaccaaaaaaaatgaaaactactaaaacacataaagatgaagattttaaagagggggaaatgtggaggagactcacagtatagttgcctccaaaacagacgtaggtgccttcaatcggaggaggaggttcaggagcagaattagggttttctgagtaatccttgtagagtctgtaatatggtggaggaggcggatacgtagctgtagccattattccctacagatccaaataaaaaactaagcaaaatcagtaacagattcctaaaattaaggtttctaatcgatgcaacaaacgattcaatccaaaatctaagactttactccaacgattctggataaaatttgcaaccatggtacaaagagaaattagggttaacaaaaacacgaacctattgggaatgcagaatcggaaattataaccagacgagaataagatcgaagaagcttttgattttgctttggagaagacggcgtagagcaagaggtcaataatgacgaaacgagttttgattttctcgtaaattttcggttacgtgttcggacggttcgtataagtctggtttcttttggtttagtttcggtttaattaaaacaatggcttttcagtttaattcgatttctgctgtttggatgtgattaatcaccccactaatgatgttattcttacgtttttacatttaaaaaatagtaaatatttttactttataataaataaatatattttttgtgtattctagatttttttgtcaatttaaatagaaattaacaaatattttaataacaaaaaaaaattaaaacagctaaaaaaatcatatctaacaacattaaatcttaagataacttaaattaaatcaaagacgaagataaaaattccattaacatcatcattttgatcataaactcataaagtttttactatttaagaaaaagaaaaacaaaggacgagtgaaacaaaaaaagagagctcacgataagaacgtgagacttgccacaccttataaacttttttttttatcttcttttgtacttttgtcgtttactgtgtaagtcataaactcacataagtttaacccaatgagagagcttatctctttactacatttctctataaaaatgatcatctcaacacatttctccttcaatctcaaatttcacaaaaaccctctcagattttttctacaagctgatcaaaacccagaatccagttttcataaaaacatcatctttcttttattcttctttacacgctctgtttttcatcaatggcgtcaaggaagcttttttttgtcaaacctaaatatatctatccagaaccaaaaccagagatgtccgatgagaatgtctttgaattcgacgaatctgatattcataacttaggcgatcatcaattgccgaattcattcgacgcgaaaagatcgatatcaatctctcggttacggagaaaaccgacgaaaaccggagattcaggtaaccgggagattacaaagaccggttcgcttccggttaatatccccgattggtctaagatcttgaagagtgagtatagaggtcatgcgatacctgacgatgacagtgacgacgatgacgaggatgatgacgatagcaacgacggtgggagacggatgattccgccgcacgagtatttggcaagacggagaggatcgtcgttcacggtgcacgaaggaatcggtgggacggcgaaaggaagagatctaaggcgattgaggaacgcgatttgggagaagattgggtttcaggattagtaatataataagtatgtaattaattataactctctataggtaaacttttaattacttagagatcttaagtaaggacttggtgtttttttattggaggggtttagaggatcgttatagtttcggtccgaaggagaatttttccgatttccttttggcgttatttttgttttttggagtttttgatcatcgtctatttttctttttcttttttggatatgatcaataatattttatatttttgtgtgtttcaaatatgttgaattttggttgttgtgtggttacttcaatttttacagaaatctacagagaaataggcagtggcggaactagaacttgcagctctaggggtcaaaatgtataaaggaatgatcataggggtcaatttatgtatttcattggtgttaatttaaaaactgtagcaaaaaaataactaaatttcataattccatgggggtcatatgaagaagataaacgaatgctaagatctattgaactcggtagaactaaggaaatttgaatataacaaagctggattgagtttaatttcaaatatgttaattttggatcaataataatccaaaaaccaaccaactaacgaaaaccggactagtcactacaacagttcaaactaaattcttcacaaaacatctcttcaaagtttgaaaaccttaatagtcacgtcttttgaaagtcgtaaattgaaccatatatttatatagtttggctctaaacgataggttacaaaagtcttcagcttagaaatgatgtgttttctacacttttctcttcttttttttcttttcatctcacatgaatcaaaaagagaaagcttaattacattaaaggttgatgtgatatttactttctaaatatttgctagaagaaattataatgataacattaaattaagttatagtcatttctatttcggttgtctcccactttctgctatgcttttacaacaacagttcaagatttggaatcgttttctttctccaccaatcgtagtaatacttctttttgtgtttgttgaaattttgcaagattctctcttcctctggttaatacacataacttacttggtaagcttggctgcattttcttttcaagcttttaatcaaagactcactagaaattgcaaaggcaaacataaaattatgtgatcaaactcctactgtgagtttttggttacaaacaaaagttaaaaacaaaagcttgatatttaaaagataaactcaacacatatgcatttgactggcgcacagaagacaattcaagacttgggaaaacagtgagccatcaaaatcgtcagataattcagggaatatattgaatgtggagatgtggtaatcacactattgcacacaaagagtggcaaacaagcggcgcccttggtttggtatagtaagagacaattgttttggactgtttgtgttgccatattcacaaaaatactattgagctatgtatgttaaacattatggtcaatgagtagtagtgaacattcaagtttttttttttttccacttcaagtttttcatcttattattatttttcgttgtgatgcagtagtacggcccatcttcaccagtagtatatcaaagccgaaacagatgacaaattgtttaacatgcacttggattattattgagagttgaaatacaaaggcccgttacaagcccaaacgaaggtacataaaagaaaagcagaaaatgaaaacgaaatcgatagggataagtttttccaactgacggaaacacaaactacaccaggtgaaatagatcacctcccaagtgcatgagacacgaaccaaccacttatcatcagatcacaaaaagcttagaagcttccaccacgaagacgaagaaccaagtgaagagtcgactccttctggatgttgtaatctgcaagtgtgcgaccatcctcaagctgttttccagcgaagatgagtctctgttggtctggtgggatcccttccttgtcctgaatcttagccttgacattatcgatggtgtctgagctttcaacctccagagtaatggtctttccggtaagggtcttcacaaagatctgcataccaccacggagacgaagcacaagatgaagtgtcgactccttttggatgttgtaatctgcaagggtgcgtccatcttcgagctgcttaccggcaaagataagcctctgctgatccggaggaattccctctttatcttggatcttagctttgacattgtcaatggtgtctgaactctcaacctcaagggtgattgttttaccagtgagggtcttgacaaagatttgcataccacctctgagacgaagcaccaaatgaagggtcgactccttttgaatgttgtagtcagcaagagttcttccgtcttcaagctgcttaccggcaaagataagtctctgctgatccggagggattccttccttgtcctggatctttgctttgacgttgtcaatagtgtcagagctctcaacctccaaagtaatggtcttgccagtcagagtcttgacaaagatttgcataccacctcttaaacggagaaccaaatgaagggttgattctttctgaatgttgtaatcggccaaggtacggccatcttctagctgtttaccggcgaatattaatctttgctgatccggaggaatgccttccttgtcctgaatctttgccttaacattgtcgatggtgtcagagctctcaacctcgagagtgatagtcttgccagtgagtgttttcacgaagatttgcatctgaaataaaacaatagaacaagtagaaaccaatcagcgaacatataccaaatcaaaagccgtaagagaaatcaaaacaacaccaaagagaaacggatctaaacataagaaacctaaaacagagagaatcgaacaaagaaaacacaaaaattgaatagatcgtccttgaaaatcctaatttcacaatcaagcaagaaattacacagatgtaaacactacgaatcgatatcttagtaatcaggacaaaatttagaagctggattgacgaaacgaacaatattgtcaaaagcaatttatacaaaagattcaataatccacataacaaaaattggagatcagatacgaatcaaaaacaaaaagaatcagaaaatataccttgaaagagagagtcgcgagagatttgcagagatcgctttaggctttgggagagattgaagagtcagaaaaagacgaaaggatgaattattatcttccacacgaaggtcttctttatatcgcaaaccaaaagcccaaaaccgtcttttctattaatgagaataaaatatctttagccaaaacaaaaaaaggaagatatcagttgaggattattatcacgaaactaaaggaaggaatcatatgatacgtgtcatattttccaccgtgcgtttttaaaagaccgactcaagtagaaacatcctatggtggtggttggattaggtcatccattacatctgcttcactgacatttttctatttttctttttgtatatacttttcctcaaataatttctttcttttctatagaagaatttaatcaataaggaaaaagttcaaaaaagattctttccattaagactatgtcttggttaacccaacccattaagaataagcaatcataatatatatagagaatactaatactatatatgagatttttcttttaatttcatgttgattatgatagtttatcttcttgatttaatttatcaatacttggcataaaagattctaatctactctaataaagaaaagaaaaaaaagtatctaccattgactaattaaaataaggaaacttatctaccaaatttgagtattttttagaacaatctttttggtttaattccaaaactctaaacctaattgttgggaaaaaggacctaatttttaagaaaagttaataattagaagatctgtatgtttttttttttgatccaagtttttatttcttttctctttttttcatgataaaatctatgtttttttagtctacaattaaagtaattgttattattttctttatctttttttgttgttgttgttaattccctttttttttttttaacagcaacttcttaaaaaaaaaaacagttgggccttgaatttatttcaggcctgcgttattaagcccagataataactcaaaacaaaaaaaatgttgaaccggaataaacccgcgagattaaatgccggttttcaggtaacatagaagaagaatatatgaggattgaagaagtattcaagaggcggaacaattcacaagtccaagagcttaaatttctcctcactcttctgctacagactcggaactctttctctttgctaaaataagatgttcaggatttttgttgcccgacaattcatgtatctcacactctctctcttctctgttcttactactctgttacattaccaccaactcaagactttcttccacaatggcgtttatgagacttggctccaaatccgaagctttccatcgtgaaggccaaacctggtattctttcttctgcattgaattagactaatcgacttataagtctttgtttccggtttcgagatcgaattctcttcaatgtcgttaatttctcttgattttatatgtaatcaagctctcatctttttgttgaaatcgaaatgggctcttcctagaatcgttagttattgatgcaagtttcaaagatcatattttttttggaatttagctctgattgatttgtgacatcaataatcaattttgtacggacaagtatattctgttttgggtggtggtttatgtctctctcttgtcttacaggctttgcactacaggactcgtgagtgatgttaccattgaagttggagacatgaagtttcatctccacaaggttaaattttctctatcttctctgtttatttagtcctagttttgatgtaattgcataaatgtgaaagcttgatgatctaactgtgtaatgtgtgttcttgatttgtgtgtagtttccgttactatctagaagtgggcttcttgagaggttaatcgaagagtcttcaactgatgatggatcaggctgtgtgttgagcttagatgagataccgggaggcggcaaaacgtttgagcttgttaccaaattctgctacggtgtgaaaattgagcttactgctttcaatgttgttagccttagatgtgcagctgagtaccttgagatgactgataactatggagaagggaatcttgttggtatgactgagactttcctcaacgaggtgtttgggaactggactgactcgatcaaagctcttcagacatgtgaggaagtgattgattacgctgaagatcttcacattatctccaggtgtgttgattcgttagctgtcaaagcgtgcgctgatccaagccttttcaattggcccgtgggaggaggaaagaacgcaacgagcgggcagaacactgaagatgaatcgcatttgtggaatggaatctctgcctctggaaagatgctgcaacatactggtgaagattggtggtttgatgacgcttcttttcttagcttgcctctctttaaaagactcattaccgctattgaagcacgtggcatgaagctcgagaatatagcgatggcggttatgtactatacaaggaaacatgttcctctgatgaatagacaagtaaacatggatgagcaagtgattgagacaccaaatccttctgaagaagaccaaaaaacttgtcttgaagagattgtcgggttgcttccaagcaagaaaggtgtaaacccgaccaagtttcttctcaggctgcttcaaactgcaatggtgcttcacgcaagccaatcctcgagggagaatctggagagacgaattggaaatcagttagaccaagctgctctagttgatcttcttataccaaacatgggatactctgaaacgctttacgatgttgaatgcgtcttgagaatgatcgaacagtttgtttcgtcaacggaacaagcaggcattgtcccttctccttgcatcatcgaagaaggacatttggtgaaggatggagctgatttgctaactccaacaacgttagtggcaactcttgttgacggttatcttgctgaggtggcacccgatgtgaacctgaagctggcgaagttcgaagccattgctgctgcaatccctgactatgcaaggccactagatgatggagtttatcacgcaattgacgtgtacctgaaggtaataaagatactgtttctaattttaaccagtccatgtattaagattttgatgctggattgcaaattttgcaggcgcatccgtggattactgattcagagagagagcacatatgcagactcatgaattgccagaagctctcattggaagctagcacgcacgcggctcagaacgagaggctgcctcttagggtgattgttcaggttctcttcttcgaacagcttaggctcaggacatctgtatcaggctggttctttgtctctgagaatctagataaccccgataaccaacatggcgctaatggcggtttacttaaacccagaggtgagaacgtaagagaacgggtttctgagctggaaaaggagtgtatgaacatgaaacaagagctgcataagctggtgaggacgaagagaagctggaagaatttcaccaggaagcttaacttcaagaagaaatcagaatgctgcaagccaaaggatcaagcaacaccagcaatttgagcaaaatcctctgttttaaggcagagctactagtattatcttcccgcttagattagctttgtttttctggttcttgatgctactttgttttcaaaagttttcatctttctcttagtatctcgctaagagttttgatgcttttaagataaaaacaagagctcttttcagagaaaattaatttcatttcttatgcaatttcggggtgtattatgttatgcagccccataggaaacaatctcagacacaaatcaacagaagggaaatacaatcaacaaagaatatcatcagcgaaacttaacaaataaagacgaagaatcagagtagtgttcccatctcagattcttaacaggacggatagtctttaggcggtggtagaacggaaagctcaggtgtttccccgttctcgacgacgaaagccatcttcaaaccccacattgtatggacttccaagtgacagtgcataaaccaaacacctgcaacaacacatgcattgatcagttgatctacttatcatatatggtcatcatcataatcatatatgtgcattgagagattgatttatacctggattatcagccctgaatctgatggcagcccaaccaccggtaggtactccaacggtgtttctctcaggcgggtcaacgagattgaacttagcaggatctttcttgggatcaaagtttccaacaccggttccaacgacaaagaagttgtagccatgaagatggaaagggtgtgactcaacggttaggagattggtgtcttgcaagacgagctcaattgtagtattgaacttaactcggctaagtcttgtccccgttgatgttccaaggttagccgtgagcggcacaccggtgtagttaaacgctttgggtggtcggtctgggaaatcagtcctgaaaacacctgagatgttggagtaatgtgctttcaagagtgcagttttgggcataatgaatgtgatattgtttatagaagctgcgagatttgtcccgttaacacaagtcgggcacgcgttaatgcctagcccgatcgtgtagaacaatcgcctgtcgacttttaaaggaacaagagccggaaaattcggtgtgttgaggctcttgagctttccgttatagtccaaagcaaatgatgtgtcgttaggcaaaggaagctttggtaggattggtaagaccgtgtttggtacgcctttgtattgaagaatagcggttactgttttgttgtctacggatacaggagcgtccataaacggactagctgccatgaagtagcggtttggtgaccggtcggttttgactaaaacattagtggtttgacctggtccgagtaaaatggctttggttgtgaatggtttagtgtagaccgcatcgatttccaccacggtcatgttgtgtcccgcaatcccgaagaatagctcgtcgtttaaagctgcgttgataatccttagaagatatgttttacccgcttcggcctctatgacgaacgtgtctgaaaatatgcatgtacgaaaaagatttaatgatatctgagatccggtccgatccgataacttacggtttaaaaaggtttagaacttttacgtttctcggaacatggaaatagcggtccaggttttccgttaatggtatgagcatccgacatcggaggcggtgcacccaattggttggcttggttaaccgcagtctcaacgtctttgttccaccattctcctacagtcaaataaaaaaccaaggcaatgagaaaaagaaaaatttaaggatgggactaaaccgaccggttttgttttattttcactaaccgaggattatgttagattcttggtatggctgtgggaacggatacggttttcccggtgcaggcaagataacaatagctccgtagacggtggctcgtagccagaggatgtgtgcgtgccaccagagggtcccgcgttgtccggtcacattgaaatcataaaggtaactctgtcctgtttggatcggacactgagttatgtatgctggaccatctgcccaaccgttccggtactgtttaagcccatgcctgttaaacaaaccgttatattttggttcagaaagaatgattaaactggttgcgccggtttgagacttaggaaagagatgttttaccaatggatggacatgttgtattgtacatggttggttacgttgatgatgactcgatcaccttctcttgcgtaaaccgtcggtccagggaacattccattaaccgtgacaatcggtttagcattgcatatccggcttatgttcttcacttgaacctgttccaaatttcaaacgttaatacaacaaacctacatatcttgggtttacaataaaccggtttagttaaaccagtataatttgtattccgaattatcgaacacctacatcgaattggtacttcttcaccgccgcatccaccggagaatagccaagaaacgcaagaagataacagaatagaaagagaaaacccatcttcatctccggttcaattttccggtttgatgcaatgatgagattttatttgtacttaatcttctactgcttttggttatacaaaatgttgtgaagaaatagtcgctggttacaaatgcttatatagagccatcatgaaaagaaaaggttggtgaatcactctggatatgaaaataataatgtgaaaacacacataaaataacattattaagaaaagcttagagaaatatagaatcgaagaagaaggcttgtaagcaactttctgaaagacgttggcgaatcagcgtaacgtttgttaatattatggagtaccttcgaagttgatatctcagctttctatttatgtttttgacttttcgttaacaatgaaaaataataatttcggtgtatagttatgttatcatcacaaaagccctataaatcaaagatgaaactattcttataatatttctttttataccaaagacccccaagttcgaatgaatcaatctattttcatattttttttctttcatataaccgatcgaattatgtatttcgagaactcaattagtatcagttaatatttctattttattttttatttctgaaaacttgctttgcagtaacatgttgcttagccattcgtttagtctgtaaatttattttctttttgagattatttggttccaattatatagtgatgttttggcgtaacggaaaatgactgctctttttgaccattttgtttttgttttcggccaacgagatcatatgtataattttctaaattaaattctcaacaaatgtattttaatttacaggtacgaaaagtttggtcaaattatttaaaatttacgctgttgattagtcaaaatcataaacgttggatcataggatcaaacactttgagtccaaaagcccataacgaaaagcccatattgtatcatttacaatgttttgtcgcgtataatcatattataatttttataatattttactttgtaagatcatcgcatttgttgtgaatgagtggtttagaatctactagaaagagaaatgtcaaaaaaaaaaaaaaaaaaaaataccacaagtttttggaacttttgattgtttgttattgggtgatactattctatgtttcatcttggtttcaatagctaatttagatatgaattaggggagacaacacattgctttggccaaagcgaaacgcgtcgtattaacgtgtcttaggacataagtaatatagtcaggtccaccaatgacatagtgacaaattttctcacgctttaattctgccacgttataaattaccatccgctattatgctgaaatatgatatactattgtgctaatgctacaaattaaccataatttcgctttgtcgtataatctgaaacataatatatctccacgttgtatcattaaaatttgagtttttattgcaaggagaaaatcaacactaaagcattttttgtcgacacccaacatatatacaccaatacatttgctaccctaatcatatcattgattggcacccaaaccaaagaaaaaaaacaaaaaattcatagctttaaacaatcacgagaaataaaatccaatcaaatcatacgtatcttattctttagcgtcgaacatatatgaaatcattttatgctggcctatccagaacaggaactcctattatcatcatgaacagaaacaatgtagattcaagaaagacaagattttcacagtataatatcaactttcctttccgtggccatgcatataataataacttcttaaattattgcggatatagacaaatatgcaactttttatatctctaggggatagattgtgaggactagtctctaaactttgacctaaaaggattttcagttattaaagaaactaacttttaagtaccaaaatttaaatatttgaaattcgaaaatattagctagcggaaatgcggaaatttagtataaatagttttataacaatatgcaattggtgtttggatgaccgattcatcaaatagacaattcagcgattcatagaccccaacaaagtttggaagattgcaaatatgaagtatatgagaaaaaaatatatcaaaataaaaaaatagaaagaaaaaaatagagaatgagtaaaaataattcaccgattactagacccccacaaaatttggaagattgtaaataatatatatgaaatatgaggaaaaagagcgtgtgagcaccacttgcatgcgattgtgctacttaaccgatgagttagaatactgttgatagaaagagctagccagagagtggaacactcgtgtgaccacgtttctcacgtgcctagcagacttgagaaagacaatccacactataaaacataacaaagggttagagaagaagagagttaattaaaacacacaaaaaaagagagagagagagagagttaactaataatagacttgtcttgtgtaaaaaaaattattcatttgtttttccataagaactagaaacaaacaaacgtagagaaaaaaaagttgcgactttgacaagttagccgaaacaatggagaatgaagagggaaaaagagagatgacgaagaaacaaagttcaaggtttaagagcatttgcgtcttttgtgggagtagcaatgggaacaaagctagttatcaagatgcagccattgatttggccaaggaactggtatgcatatatacaacttgcaagttctttataaaaattcttaggtcttctttaacaatgataaaacgttctgtttttgcaataacatcatgcatgaggattcttaagaaaccttgtatttattaatacagtctctaattaataaagagtttatatgtcaatttttatttgttttctttgacacaaaccgaagacaggataattaccaaattcggttttcaaaatttgatgaacaggtgatgaggaagattgatcttgtttatggtggaggaagcataggtttaatgggtttggtgtctcaagctgttcatgatggtggtcgtcatgttattgggtacttactctatgtttattctatagtacttactgcattaaaattctcatcattttttgttgagagttatgaaaataaaggtagataggtatggtttttaattcttattatgatgcagagtcatccccaagctcctcatgttgcaagaggtattaattgagttttcattagaaatcaatgttcagtggatctgaataaagaataataacaataatggtaatgatgatgctcttttttgtcactctgtcaatgtctcgcaaacaaactcaaagttaactggagaaacagtaggagaagtgaaggaagttgcagacatgcatcagagaaaagctgtgatggctaagcattctgatgctttcattactttgcctggtaatttttactctctatctctctctccatcttctatcttcattacaaataataaagataaacttatgaaaaattaaattattgatattcacttgtgaaaactttgccactacatttagagttccccaatgtatatgatgctgaaatattataaagctagatgcatatatgtatggtgatgttttagtgtttgttttttcccctacataatgtaatgttagtgcttttttataaaaacctttttattagtcattatagagagctttaaagagtgcgtttaataagtaataacatgtggttaatatgatatgtgggagattccaggagtcaaagaatttaaaagaatcacgacaaatagttttgaaataattaaagtgaataatcagaaaaagtccttgatccatcaacatccaaaagcagtgaaaatagatgtcgacaaaggacatctgtttcttatccaatttaagaaaaaatttatgttcgcaatttatatctgtaagatttatatttctgagcagacattaaaagatcgtaatatgagttgcaaaatgttgtttttcttttttgggtagtgctggtatattataaagttgaatattctgagagaaacataatggtaactattgtgatgagtgcactaacctttgacctttgacttaaaaagtaccaaagagaagagaaggactacttttcataaatcagatgttgacttttcttaagaggtcaaaaatgaaagtgaaaaaaaaaaaaaatcttcttgagttttactatacgtgccacttgactaagtcaacgagtcctcactgtcgaagtgtcaatcctcaggtggctatggtacactagaggagctacttgaagtgataacttgggcacaacttggtatccatgataaaccggtatgtaaaccggtttggtctggtataagataataaccgacattttgatagagttagctattgttttctttttcttgcaggtcggtttattaaacgttgatggatattacgatgcattgctgttattcatcgacaaagccgtcgaagagggatttattcttccaaccgctcgacatattatcgtatctgcaccaaccgcaagagagttgtttataaaattggaggtatatcgatagatgatacggatttaaccctaaaccgaaccatacagtatatccaagtcatgatcccgttatgatttattattttctagttgaatatggtatcactagatcgaatatctaaacatgcattatctttgtttcaagttatgtctaaagctggttagactagaccgagtttttgtttaataatcatgaaatttttgattggtgtgtattgcaggaatatgtgcctcaacacaagtaataatatgcatcaaaactgagctccaagacgattcataccaaaaaattgtgaatcgggatgagtaaatatttgattatttcttagtcaatctaaaagtcggatttgattagggagtacaaaatgtaaatttgttttgtgattttataatatatcaactagtgcatttcatttacattttaagttaagttcatatacgtttacgttagatactgtaaatttttggtccgatggttttggatataaggggctgttttgacatttccgattatagaatagatcatttgccttcaatttttctaaaaatgttacgtagacccaagctaaatttattatttgttgggccaacctaaacactaatatcgattgcaacacttggttgttgaaagacctagctaccacttatattactaatcaatttttcttggtttgaatgtgtagatcaaatcgattcaatttactaccaaaaacatttgtctgagctacaactttcgatctaaagtcctgagccaagcaatctttaattatagaaaatcattacataatctcgaattgtttaagttacttaaaattcatatgtctcctcctaaaacatccccgattcgatcttattcttctggtctccacgtaataactcacatacattaaaaaaagaacaaaaataaagaaaacccacttgattaaacgaaaacatttgttgaatcgaaccaattaattgaacaataaacgagttctgatttgtaactgacgtctcatgtttcgaggttaattactaaaattttcaaatctccaattcttatgaacccacccaccatgtgttttaagcccaagagagattcagtgaaccaagaaggaaaataatttaaattgtcccttacactaatgaaaggttatgttaacaaaaatccattttattaatagattgatagtactaataaataaatatttggacacaaagcccaaaagatcacaatctagttaaaaaaagatcgacaagaaagattctttaagctgatgaatgatctgtaccatgtagctttgttccctttttggttaactgcccaaacaacatcaacgagactttataaaaaaaaaacttccttatgaccaaactaaataactgaaattgatttattagtcaaaacatattaaagaacttatttgtatgatatcattatacattccatatgtaactgaaatatgactatcttgactctttgaagaattctgactttttttattcagtcaaacttttaaattgtgttggttactcatcggtacggataaaaaaattcgtatgtgttatttcaaaagtacttgaagaatattgtttctatatatatttatagtgttataaaaaaacaagtgtggtctctatgttatggttcattgaacatatacatcaacataggactgagaggagcccatgttcctttcattgatgcaaaattttagtttcttgtgttttaatttgcttcctatccaatgtacatgtatatatactttcacaagagaatatggataatgttgagtatgttaaatatatagtgacaagttacataaaaaaagcctaaagaaatcaaattggaaaaaatagtaaggtacaatgtatggttatcgaaagcccaagctgtacttccattgatgtaggagatgattaggaacacgtggattatatttgaccaaaaatagtagaaattctatttatatttgttttcttcttttggttttgggtttgattttgtgatttggatagttcggttaaggatggtttgatcaatcaatataaccatactaaaatatgattcagttaactaactatagtaactgtttcttcgttagtaaaatgatacatttattggaatctattgacaaatcttaatgacttattataactggtgataacaaaatctagctattattttgtatccaactacatattttgtataaaatggaaattcgtatatgatatttgtttagtttaaaagtagagtgtatttgttttttcaatgatgatttaatgaaatcaagctcttagttgagatcaaaagacaaataaaacaaaatgtttttttttgttttgtttcttttctatttgagggaaggccatgaattcttatttttgacaaatagttgttctatgcaattaatattgatgtctaatacatatacagcagaataaataaaaacttgctatataaagacgtattatttatagcattctgtggagtataatgtcgaatcctgttctcatttccgattttacatatttatggtactaacgccttcatttatttttccattttcgttagtcaacaacttcagcttttgataacgcctaattgtatcatcaactttagttagttttctcaaataacgtcattttcaaataaagtttttgatttctcttttattatatttatgcaaaaggaaaattataatttcagtattttgcagaacgctgaaatgtataatagaacctattcatgtatttttgtaaaattttaaagattgttttaatactaaaataagtaaatcattaaaaaaattcctagacattggtctctaatataagataaatagatctaaattatgtttggattttaattctaataaaaaggtagccaaaagttatatatacaatatttaaacaattttatttgtttaagatttgaattttatagtatgcgagaatcgcgtaaacttttctcgaatgtaacaaaaaatttcaaatcttctcgacacatgtaatcttttgcgagttagaagatttgattccttattttttgttcgtattcttaaagttagtcacgtttatattatttttcgctttgtaaccgtccctttaaatttttaataaaaattaaaaaaattgctagaaaacaacatttttgtattactcaaatcaaaagtacaaaaataaatttagctagcgtttcacaaaatcaagtaaaataatctccatttgaaactccataatcaagctgtttgatgtattattattacatgtaatgaggagaaagaggggtcgagaaatttaaagtaataataattctcttcttcgtccatggaataaactacgattagtttaaaaagattaataaagatggattaaagaaactatatgttaaacctggaaaatttatttaaaaagacgtttttttagctataagaaaaaaaagaataatacctttatttttacatgttatttacaagtaataattttttttttctctctctctctttgaaggtggcacgagcacccataaccttcagacctatagatacaaatatgtatgtatacgttttttatatataaatattttatataattgatttttcgatcttcttttatctctctctttcgatggaactgagctctttctctctttcctcttcttttctctctctatctctatctctcgtagcttgataagagtttctctcttttgaagatccgtttctctctctctcactgagactattgttgttaggtcaacttgcgatcatggcgatttcgaaggtgacttctttcaaaaaccctaatcctctgtttttttttttattttgctggggggctttgtacggactttcatgggtttttgtagcttttccctcggcttttgcgcaaatgagactttctgggttttttttccagctttttataatttcatcaggtggatcgaattcgtagtttcagcttagatctctctccctcttcattatctggactttccagacttggagttcttcgggattgttttcggtttctgggttttgttttaattgcgagatttaagcttttttcttttttactactgtacttggtttgtggttgaccttttttttccttgaagatctgaatgcgtagatcatacgggatctttgcatttttgttgcttttcgtcagcgttacgattcttttagcttcagtttagttgaaatttgtattttttttgagcttatcttctttttgttgctgcttcatactaagatcaattattgatttgtaatactactgtatctgaagattttcaccataaaaaaaaaattcaggtctgaagctgatttcgaatggtttggagatatccgtagtggttaagcatatggaagtctatgttctgctcttggttgctctgttagggcttcctccatttggaccaacttagctgaatgttgtatgatctctctccttgaagcagcaaataagaagaaggtctggtccttaacttaacatctggttactagaggaaacttcagctattattaggtaaagaaagactgtacagagttgtataacaagtaagcgttagagtggctttgtttgcctcggtgatagaagaaccgactgattcgttgttgtgtgttagctttggagggaatcagatttcgcgagggaaggtgttttagatcaaatctgtgaattttactcaactgaggcttttagtgaaccacgactgtagagttgaccttgaatcctactctgagtaattatattatcagatagatttaggatggaagctgaaattgtgaatgtgagacctcagctagggtttatccagagaatggttcctgctctacttcctgtccttttggtttctgtcggatatattgatcccgggaaatgggttgcaaatatcgaaggaggtgctcgtttcgggtatgacttggtggcaattactctgcttttcaattttgccgccatcttatgccaatatgttgcagctcgcataagcgttgtgactggtaaacacttggctcaggtaaacatttttctgatctctaaagaacaaactttttaaaataacaaactgggctctgtggttgtcttgtcactttctcaaagtggaattctactaaccaccttctctatttttctaacattttaatgttctttactgggacagatctgcaatgaagaatatgacaagtggacgtgcatgttcttgggcattcaggcggagttctcagcaattctgctcgaccttaccatggtagttacttacaatctttgctgttcttaatttttttattatgtgataaaattttgattcctctgacttgagcttctctattataaacaggttgtgggagttgcgcatgcacttaaccttttgtttggggtggagttatccactggagtgtttttggccgccatggatgcgtttttatttcctgttttcgcctctttccttgtatgactggtcttcctgtcttgttttttttctccacgttcttgaaatagcattattggaaattagctgacatgcatacaatttctgacaggaaaatggtatggcaaatacagtatccatttactctgcaggcctggtattacttctctatgtatctggcgtcttgctgagtcagtctgagatcccactctctatgaatggagtgttaactcggttaaatggagagagcgcattcgcactgatgggtcttcttggcgcaagcatcgtccctcacaatttttatatccattcttattttgctggggtaccttttttctctttatatgtatctctcttttctgttaagaagcaataattatactaagcagtgaacgctctattacaggaaagtacatcttcgtctgatgtcgacaagagcagcttgtgtcaagaccatttgttcgccatctttggtgtcttcagcggactgtcacttgtaaattatgtattgatgaatgcagcagctaatgtgtttcacagtactggccttgtggtactgacttttcacgatgccttgtcactaatggagcaggtttgttctgacggttttatgttcgtattagtctataattcatttttagggaaaatgttcagaaatctctcgtgattattaattatcttgttcttgattgttgatcacaggtatttatgagtccgctcattccagtggtctttttgatgctcttgttcttctctagtcaaattaccgcactagcttgggctttcggtggagaggtcgtcctgcatgacttcctgaagatagaaatacccgcttggcttcatcgtgctacaatcagaattcttgcagttgctcctgcgctttattgtgtatggacatctggtgcagacggaatataccagttacttatattcacccaggtcttggtggcaatgatgcttccttgctcggtaataccgcttttccgcattgcttcgtcgagacaaatcatgggtgtccataaaatccctcaggttggcgagttcctcgcacttacaacgtttttgggatttctggggttgaatgttgtttttgttgttgagatggtatttgggagcagtgactgggctggtggtttgagatggaataccgtgatgggcacctcgattcagtacaccactctgcttgtatcgtcatgtgcatccttatgcctgatactctggctggcagccacgccgctgaaatctgcgagtaacagagcggaagctcaaatatggaacatggatgctcaaaatgctttatcttatccatctgttcaagaagaggaaattgaaagaacagaaacaaggaggaacgaagacgaatcaatagtgcggttggaaagcagggtaaaggatcagttggatactacgtctgttactagctcggtctatgatttgccagagaacattctaatgacggatcaagaaatccgttcgagccctccagaggaaagagagttggatgtaaagtactctacctctcaagttagtagtcttaaggaagactctgatgtaaaggaacagtctgtattgcagtcaacagtggttaatgaggtcagtgataaggatctgattgttgaaacaaagatggcgaaaattgaaccaatgagtcctgtggagaagattgttagcatggagaataacagcaagtttattgaaaaggatgttgaaggggtttcatgggaaacagaagaagctaccaaagctgctcctacaagcaactttactgtcggatctgatggtcctccttcattccgcagcttaagtggggaagggggaagtgggactggaagcctttcacggttgcaaggtttgggacgtgctgcccggagacacttatctgcgatccttgatgaattttggggacatttatatgattttcatgggcaattggttgctgaagccagggcaaagaaactagatcagctgtttggcactgatcaaaagtcagcctcttctatgaaagcagattcgtttggaaaagacattagcagtggatattgcatgtcaccaactgcgaagggaatggattcacagatgacttcaagtttatatgattcactgaagcagcagaggacaccgggaagtatcgattcgttgtatggattacaaagaggttcgtcaccgtcaccgttggtcaaccgtatgcagatgttgggtgcatatggtaacaccactaataataataatgcttacgaattgagtgagagaagatactctagcctgcgtgctccatcatcttcagagggttgggaacaccaacaaccagctacagttcacggataccagatgaagtcatatgtagacaatttggcaaaagaaaggcttgaagccttacaatcccgtggagagatcccgacatcgagatctatggcgcttggtacattgagctatacacagcaacttgctttagccttgaaacagaagtcccagaatggtctaacccctggaccagctcctgggtttgagaattttgctgggtctagaagcatatcgcgacaatctgaaagatcttattacggtgttccatcttctggcaatactgatactgttggcgcagcagtagccaatgagaaaaaatatagtagcatgccagatatctcaggattgtctatgtccgcaaggaacatgcatttaccaaacaacaagagtggatactgggatccgtcaagtggaggaggagggtatggtgcgtcttatggtcggttaagcaatgaatcatcgttatattctaatttggggtcacgggtgggagtaccctcgacttatgatgacatttctcaatcaagaggaggctacagagatgcctacagtttgccacagagtgcaacaacagggaccggatcgctttggtccagacagccctttgagcagtttggtgtagcggagaggaatggtgctgttggtgaggagctcaggaatagatcgaatccgatcaatatagacaacaacgcttcttctaatgttgatgcagaggctaagcttcttcagtcgttcaggcactgtattctaaagcttattaaacttgaaggatccgagtggttgtttggacaaagcgatggagttgatgaagaactgattgaccgggtagctgcacgagagaagtttatctatgaagctgaagctcgagaaataaaccaggtgggtcacatgggggagccactaatttcatcggttcctaactgtggagatggttgcgtttggagagctgatttgattgtgagctttggagtttggtgcattcaccgtgtccttgacttgtctctcatggagagtcggcctgagctttggggaaagtacacttacgttctcaaccgcctacaggtaacaaaaaccgcagtagttcattgaaaatcacagttttgcagtttgaaaatattgacatgtatggatttaaacagggagtgattgatccggcgttctcaaagctgcggacaccaatgacaccgtgcttttgccttcagattccagcgagccaccagagagcgagtccgacttcagctaacggaatgttacctccggctgcaaaaccggctaaaggcaaatgcacaaccgcagtcacacttcttgatctaatcaaagacgttgaaatggcaatctcttgtagaaaaggccgaaccggtacagctgcaggtgatgtggctttcccaaaggggaaagagaatttggcttcggttttgaagcggtataaacgtcggttatcgaataaaccagtaggtatgaatcaggatggacccggttcaagaaaaaacgtgactgcgtacggatcattgggttgaagaagaagaacattgtgagaaatctcatgatcaaagtgacgtcgagagggaagccgaagaatcaaaactctcgcttttgattgctcctctgcttcgttaattgtgtattaagaaaagaagaaaaaaaatggatttttgttgcttcagaatttttcgctctttttttcttaatttggttgtaatgttatgtttatatacatatatcatcatcataggaccatagctacaaaccgaatccggtttgtgtaattctatgcggaatcataaagaaatcgtcggtttgaaatgttaaatctcctaaaccggatctctgcacgtagctgacacatcgacgctagattactgacacgtgtccttatcaatatttcttctcgaaacgtcttactgtttcataaagtccttcaaatttctggggaactaagaaaatccagcagagtaactaatccaatgggttatgtaatctacatatcgttcccggcgattcttctccttctgatcgtcgctatcgccttttatctcatcggacgaaaaatcggccggagagaagggattcaatcaacgtcgcagttacactacggaccgccgttggctaattttccggcacctgcaccaccgcataaagctatggagaagccaccggagccggtttagtgtatgtatgatgacgtaataatacttacgtattacgtaaacgttctatatatgtagtttgtgtgttaaataagatgtaattgggccgatgctgaaaccaattttaaaacaactctttattgggcctggggtttaaggaaacacttcgtgccgtttaaattccgtactcacctaatgcaacctagaaactacgcagcgttttgacggaagaagaaatattcgcttcttcttttacaacttttgtcccacaacgcagaaaagtcctctctttctctctctcgaataataatttttcatttgctgcgtccttttggtgcttgaagcgatgaccatggcagcaaatctagcgcgacggctgatcggaaaccgatcgactcagatccttggagccgtgaactctagctcaggtgcggctagttctgtcgctagggctttctgctcctccaccactccgatcaccgcaactctcttccctggcgatgggatcggtcccgagatcgccgaatctgtcaaaaaggtccctcatcctaatctcttttctgcgcagaatttcgagttctggaagtcatagttacgagataattgtttgattgaattttgtacgataatttgtgggaattcggcaattttgttgatagtttttgcgttttgtactgatccaggtgtttacaacagctggtgtaccaattgagtgggaagaacactatgttgggactgagatagatccgagaacacagagtttcttgacatgggaaagtctcgaatctgtgcgtagaaacaaagttggtttgaaaggtccaatggctactccaattgggaaaggtcaccgttctttgaacctgactcttaggaaagagcttaatctatatgccaatgttagaccttgttacagtcttcctggttacaaaactcgttacgatgatgttgatctcattaccatcagagaaaacacggaaggagaatacagtggccttgaacatcaggtttagtttgttttaagtctattgatcgaatatttcaggttagttcttctaataaatgattctaatgatggttttgttttctcctgacgcatataataggttgttagaggtgtggtggaaagtcttaaaatcattacccgtcaggcgagtttgagagttgcagagtatgcttttctctatgccaagactcatggaagagagagagtttctgctatccacaaagccaacattatgcagaaaactgacggtctctttctcaaggtctgcccgttttataactccaagcatttcttatacggagggatcaaagcaatgattgttatttctgctagtttttttttttttacattttgttctgagaccatttttattttgcttccgtttttcagtgttgtcgtgaggttgctgagaagtatcctgagatcacttacgaggaggtcgttattgacaactgctgtatgatggtaagctatgacaccgaatctactattttttcgttaattaagttagtggtcgggactcgggatcaccttgtagatttagaagtttggtttcttagcaacttgtatttgagttctgcttttccactgtttttacatgtggaatatgcgactgataatcttgagatacctgcagcttgtgaaaaacccagcactttttgatgtcttggtgatgccaaacctgtacggtgacattattagcgatctgtgtgccggattggttggaggactaggattgactccaaggtaaaaacacttgttccttcatcttgtgtaatagtgatctttagtatgattatgagctacatcatcttaaggccttattatctttgacgcagttgtaatattggagaagatggtgtagcccttgctgaagcagttcacggttctgcacctgatatcgctggaaaggttggtccttcaaacaatatatcattccaatttcatcatttacgggctaaagagtatcatttatgcatccaatgttgaaagattaatatgtgtgatttttaaatttgttgttgtctttctgttttgggtgatgtagaacttggcgaacccaaccgcgttgcttctgagtggagtgatgatgttgcgtcacctgaagttcaacgaacaagcagaacaaatccacagtgcaatcatcaacaccatagcagagggcaaatacagaaccgcggatcttggaggtagttcgaccaccacggaattcacaaaggcaatctgtgatcatctctgaacatcgtaaaatccaattctttatcgaatcttcttttgggagccttttttatagcctcgaattcttcttgttttcttgttttacgattagaataaaagaaaaagcaaaaaaacggctcttcatgagttttgaagttattgtttctgccttaaaatttctctgccgtaaggcaagaagattcataacactggaaaaagtgatgttctttctgaatcgatcagaagaattttgttttgttgcttgaattgtttacatactcttataacttcaatcagtttatcaatttcatacatacatccaaacctttttttttcttttcactcgtagaataaaatgagtaaattactatgattatgaatgaaatgacaaaatcatcaaatgaagaaaactcatacatttgtaaaccatttcaatacaaattagtcggtccacaaagaaaagagtactaatttagtttaaaaattatacttaaaaaaaatctaaaaagagaataataatgtgtcgttggtgcaccaacttcccctcgagctaagattataaaggcaagacgcttcactcagcagcagtaactaaacttgcctccaaaaaccaatcccagatctgaatctcaacctaaacctcagattcatcatcatggcttcttcttctaactacgatggaatccttctcggtatgggtaacccactcctcgatatctctgccgtcgtcgacgacgaatttctcaccaagtaaataaactctcagatccctctttttctatttgtttccaattccttttgctgtatccattgtcgctatctctctctgggattttggtttgaatctagatttgatagtttgattcttcttcagtggcataaactctgtgatttgtgtgcgttttttttgtttatgttgttctctaatcgtgttgacagatacgacatcaagttgaacaatgcgattctcgcggaagacaaacatttgcccatgtaagtattgatttatgctctgcttttggtatttgatgggttaaaattaggtgtggtaatcaagagtgttgatcatgttatttaaactttcaagtagagattgattcaatgcttcagaagtctggattgtttcagctaaatatctcatcctctctttataatatagactatatagttgatggtttgagaaacagaaattcactttgaaactttttttgtttctttttttaaaaggtatgatgagatgagtagcaagttcaatgttgaatacattgccggaggtaattaatcttttgtcctgtttgacgatcctgtaactcttttatcgtttatacgttgacaagattatgatatattggttattctattctttctcaggtgctactcagaactcaatcaaagtggctcaggtagattcttttgcatttttcttgcactttttatgggttataagtaaccactgctaaaaatcaaggttttttttttttactttctggtggctgcagtggatgcttcaaattcctggggcaaccagttacatgggatccattggaaaggacaaatatggagaggccatgaagaaggatgctacagcagctggtgttaatgtaagctgtgtttcctggttcttctttggttttcttgttttctgtttgagtcaatgcgcagctgctgttccgtttgtcttttgaggatagtatgaagttattgttgaaactgaattcggattttgtaatcaaagtgcattaaaatgacactatgcttttgtatcaggttcactattatgaagatgagtcggcacctactggaacttgtggtgtctgtgttgttggtggagaaaggtctcttattgcgaatctttcagctgcaaactgctacaaggttgatcaccttaagaagcctgaaaactgggcattgggtaaaattcttttcccatcgttgcatccttttaacacttctgtattatctcttcgtgatctgactgatcaaatgtgtattgggtagttgagaaggccaagttctactacattgctggattcttcctcacagtatcgcctgaatccattcagttggtatctgagcacgctgctgcaaacaacaaggtaattaagacatggtcctccatttcatgagactctgtttcagcagaatcttttatttgtttacaactgcttcttttattgacatcctctacatattcacctatccttcaggtgttcacaatgaacctttctgctccattcatctgtgaattcttcaaagatgtgcaggagaagttcttgccgtaagctctccctaattttattttatccattacagatgttctgattgcgtaaatgtactgaataacactctacattgatcttacagatacatggacttcgttttcggcaatgagacagaggcaagaaccttctctagggttcatggctgggaggtaagaagtttctctagcacgactaaatttcagcaggctgttctgttttgtatagctgagataagaattaaccatttatatgtttatatatgtatagactgaagatgtcgaacaaatagccatcaagatttcacagcttcccaaggccacaggaacatacaagaggaccactgtgattacacagggcgctgatccagtggttgttgctgaagatggaaaggtgaagaaatatccagtcatccctctcccaaaggagaagctggttgacaccaacggtgcaggtactaattttgataatcgaaagaccgagttgtaaccaaacctacattcaactttatgcttattattattatactagatagaaactgacatgatcatagaataagctgatcctttagcatttcaaaattcaaacgaactttctccttgaaactgatacaaaacatgttcttctctgtgtcatagacagaaccaataccgactatttttgttgatctctcttacaggtgatgcatttgtgggaggatttatgtcacagttggtgaaagagaaatcgattgaggaatgcgtgaaggctggatgctatgcgtcgaacgtggtgatccaaagatctggctgcacttaccctgagaagcccgactttaactaaacaattgggttaccctcagttttgtgatatcttccaaataaaacaacctttgaattattattgcttgagtgtactttttaccacttttattctcattattattccctaattaatattaccaccataggtttagacaagacaagtcatgtttaatcaatgaaggcttcgatgagaagattatatgatatctaccatcagctaatacctaaaaatggctcatttcacaaactccttaaatggatcctctaacattattaaaaaaacctaaacgttagtagtagaaccatcttcttgaatcaaagactcataacgaataacgaggagaagcgcaacggaggacctcgagaaagagagtttcgtcacaagcaatacaaagcttggaatctccggaagtgaaatcgtcgtaagcttcatcttttgattgatcaagcaaagctctgaagatgggatcgtgaagcaacgtgatctttataacgaacctcttataagtttcctcatctttaccaacgtacaccacaaggtgtccctttggtacgtcatgtggtatatgatattgatccttaggatttccggtggcgacgcggtgtttggcaactctgcttgacatttgcttccatgcctttgcgatcagcttgctcttcttcatcatgtttatgagagagatgagaaagagaaagagagagacgtttttggggtttagtactagtgccgtacatgggtatttatacacaaagtcactaacataggtctactatatatatattcaatgtatgtattatatggatgaataggtatgggtaatgattatttttggaccatgtcgtctttacaaataatacatgatctacattagttatcatgaaaaacaatacattccattcaatacatatatattaccaagaaatatgtataaatatttggaacgtcattatcaatttagttttgaaaataagatgtctttgttcatcatcttattttatttgttttttggggtcaactacggccaagctgtacttacgacatacgaaatcgtacgaacatgcatcttccctcaaacaatggccaatgggctttcgctttaatcattgcttcgttttgattatttggtttctttaaattttcatgaatacaaaacaaatctttatcggcatggcatgcacattggcactcaactatttggcatagagataatgtatgagtgtcgtcacagtagtagaatcacttaaagtgatttgcataactttaacaattagtagaatcactttaacgatgttatttaacgaaagcagaaattctttagagaagagctaaaatttgaaagatttgtttttcttataaaaaggagacgcattttattcaagttgtgaaattgtgggtcccagggttcgatcaaatgctggagaaagataagatttaaaagatataagaaaagggataagattcttggacaaagtgcaattccacttacgtaccatacatcgggatatgtaactcacatattacacaaattatctaatcctaactgatttgttatgctggatatatccattgtgatctgtcactggtgatttaccaaaatcacaatactttttaaataatatcatcaataattagactgagtagttcagctgtatatcatctaatacaaacgatgttaatgctggatctcatcatcattttgatgtatcacaggtgattaccaaaatcttaacgtacatatcatgccatcatacgtaagcatgttcgaaattggccattataaattctttataattcattagggattcatgatgtcttggtggtcgaccatatgtttacttttcaagaaatcaataaacgaatatagctagtggatatctaacacttgcgcataaacatgaaatgttttacagacaaatacgttatacatatttaagattgtatacacctatataatacatgtacgtgtatatatatgtaatgattgtatatacatgtacgtatatatgtatatcattacaaatcaggccggttggagattctgagacgaccgattcatcccccccatagagacagcccggtgcttcatcccattgcttcagtgtctctctttaaggaaacgagagattattagccttcggatcagaaaattagatttattcctagccgtttgatgtacatgacctccagctattgcacgtgaaatttaatggtaagttttaaccagaaacctacaaaattgtgtgggtgatatttaattgtaagttataacaaaaaaaaaaaaaaaattgtcctcgtcagcatggtctagttgtagtgatcagataagagatgttgtaataaggtatccaaggtttgatacaccctaaaaactactccacaaacgtgtgggtgtcaggaattttcacatagctcatactaatcccaagatcagtcggatttcatggcccgttgacccgagaactaactagggaaaaaagacctcgcgacctggctcagagctcagtaaaaaggaacatgttcgattaaaaagcttcatcgcctcggagctcagggagaaccatcattcttataggcatcccttgttcttctctaattcagcagaaacatgttcgatttgtgatgaatcaggaaaagaaacgttaacatgtgatgaatgcgaatttttcttgtgtctttccatataaggtgagatacaagaatgatgagcattttactcaactttacatatgaagaagacacaaatggagactactcgtgcgaagcgatcattgtgaggaatcaaccatattctatggatgcaaagaatgtgaagtggcactccatattaagaaatatgttaagattcaatctaaaaaaaataacatagccgtagggcaaacagattatttcatatcaataaaaagagattttacggtttttagtttgccaatctttgctttcaattattattcattgaccaaattgtcttcgtttttttctttttgttggtgtcgcactatacatatattctatcaatataaatattttaatctaaacgtcgtctcaacaaacctttgacttcaaatttgttcttcctcttattagtcttcgtcatattttcttccttcttccatcttttagttctgataagttaacattttcataagacctcaaaaatagctcctacatttgttatcttccttttcaagtcaacaatatttttttttgttctgttatcaaagactccttcttttggtgattaaactctgttcaacttctgaaaaaaagttttgatttttcttttgtctgtagtacacaaagatctcaaaggtgagtttgtaatttcctcgaaagttactttacctttcttctatcacgaagttcatacttctttagattcttgtttagggaagacccaaaggtttaatctttagtataaatcttgcaagttaggccaagaaacattctttccctaacttttcaaaattagggttcgttacagaatttggggttttcttgaatctctaatttgattcgacaattcatcaggttccttgatgttacagaatttgatcctttgtttttgattagttggattcaaagatcaaattttagaatgaagtgaacaaatgaatagtgcatttgattctcagtcttctagtgtagtcaagtggtttagacttagaatcattgtgatgattgttttgatgtaaatgctccaatgaactaaacttgctcactgtacttcgtttgtgtgtatatcagtggaggaacctcggtgttttaacatctttacgaagatgaaatgcttcttattccctcttggggacaagaaagatgaacagagaagccctaaaccggtttcaccaacgtctaacttcagtgacgtaaacaaaagcggttcagatttcagtccccgggatgtttctggaacgagcacagtatcatccactggtaggaactcgaacactagcatgtcagctagagaaaacaaccttagagagttcactattggtgatcttaaatctgccacaaggaacttcagcaggtcaggtatgatcggggaaggcggttttggttgtgtcttctggggaacaatcaagaacttagaagacccatcgaagaaaatcgaagtcgcggttaaacagctcggcaaaagagggttgcaggtaaaggtttcttcatcttttgttcacagaatttgttagtgttggttcatcaatgttttgggttttgcagggtcataaagaatgggtgactgaagtgaactttctcggtgtagtcgagcattcaaacttggtgaagttgctgggacattgtgcagaagacgatgaacgtggaatccaaaggcttttggtttatgaatatatgccaaaccaaagtgtcgagttccatttatctccgcggtcaccgacagtacttacttgggacctcagattgagaatagcacaagacgcagctcgaggtttaacataccttcatgaagaaatggactttcaggtaaaaatgaacatgaaatcctctgtttcttcacttcatcagttaactaaaatgtgttttctttttgtagataatattccgtgatttcaagtcatccaacattctactagacgagaattggacagcgaagctttcggatttcggtttggctcgcttaggtccttcaccaggatccagccatgtttctactgatgtaagttttgtacattttcacttgactggttataagaaatcgttacaagatcaagaaagttgtaatttttggggcttacaggtagtaggaacaatgggatacgcagctccagagtatatccaaacgggtcgcctcacgtcgaaaagcgatgtgtggggatacggagttttcatctatgagctcattacaggaagaaggccactagaccggaacaagcctaaaggagagcagaagcttttagaatgggtgagaccttacttatccgacacaaggaggttccggctaatagtagacccgaggctcgagggaaagtacatgatcaagtcagtgcagaaactcgcggttgtagccaacctttgccttactagaaacgcaaaggcgcgtccaaagatgagcgaggtgttagagatggtgacaaagattgtggaagcttcatcgcctgggaatggtggcaagaagccgcagctggttccactaaagagtcaagaaacttctagagtcgaggaagggaagaataagaaggttcttgatggtgctgaaggaggttggttagaaaagttgtggaacccaaagaatgtgagagcttgttgattcggggtctacgtcagaaacaaattagtgaatttcaatgcctttgtttaaatactgtaatttaacaaacttatgagttttcttacattccattttttggtgtgattattaaacgatttatttgatattcgagtgatttcgaagatttttgcagaacctaatggctatttgggcctttggtcacaatcttaataatcttatgataagcccattataaaggtcataacggtctaaatcggtttaaactaggtaatctcttgcccaccttttggaatttcccaataataagtggaataattttgataagattgcattcaactcatgtgtactaacaatggcaaacaatttgacttttgaagcattgattttggctgaaaacaggggaagccattaaatttagagatcaaaaagaagaatttcataaaaaagtaacgtgaaaagcgaatagtaggcaaataaaattgtaaatagcttaattggtgtaagaaaaaaaaagaatcctgattgcttttagtgtaaacgaacagaggaaaacaaaactcaattgagagttaatgatatcatatcagtgtcaactaatatagtaagttaagaaaaaaattcatataaaatctagttatagcattatcaaaacataaaatatttagtaagcattttatgtcaaaaataatatatactcctgagtccttgcgtaatcgaactctgaaaaaacccttgatgcattcgaaagcatgtgtcattttgttacatctcttggattatacgaaccactaaatactcttatgcagtcacattaatcagtaatcacgtattactttattttatcaagtagtattaacatagaattcttatatagttatatggcatgattgttttgaacatagaattcttagtaaaccacgcgctaatatatttggttctcaactatgattgctaaaagaatgcatgttgtttggtagatttgctcaatgaactaccacaatagtaacatttattcatattctaactatataaactaatggattgacccttttgaaatggactattttagttataatattcgattaattgacatgtaacatataatatgcagagaggataattgaaaactaattaaaaaaaaaagagtgttgctacttgttaatgacttcagcataatcttcacaactactaacgttgataaaaaacaccccataattacgtatgcgtttgattaatttttgctacctaacaaaattattttttcctaattaaattacacaaaaactggcttttgggtttctcaaatcattcatgacccatgccataaaattaaaatatactgtattatcataggctgattcaacataaattgactacttttctcatcttttttatttgcgaacaatttaacttattttatttggactaacccatttatattattctattgtgtaactattactcattagatctcatacttaatgaatttgtcaatctaggtttatactctatactaatattttaactaaaataaattgaagcattcgcaaagcatccatatgattcattcaccgccagaacatagaacctagttcatttattataacctaaagaaactttaattgtttttatgtgttcccaagaatattaaaatacagtacacaagtttgtcgacgagtctttgcgtgagttttaactaatcaaacaaagggggctgcctgaaagaattgaattcgatagttttggaattcaataaattgagtatgagccacgtggaattcttacactgacacaacaaaaactaaaataaaaaatatttattggcgccggatatgattgggaaacttcaaactatgcaaccatgtgttattggacccatttgcctctttaagaaaattttcaacatttaagcctaacactagttagattttttaattttaactaattacatttgcatgttaatccttccttaaatgctcatttactataaatttatttttggggatttggtacagagcagaaaatattaacaatgaaaagaaatcatgattcatttttgattatatcaattaaaaataagttgaaataacaattttaaatgtaaaaataaaaattaaaatctcccaacctttttttcatctcaaatatttaaatctatcttttacagtattgtcctagtaaatctgaaaagtcagaaagtcagaatattcaatctaatcacataattataaagtttttcatgccattcgattttgtttcttctattgcacaaattagtaaaacagaataaaaaatatctattaaacttaaaattttggaaataaatacacatcaatctatatattccacttcaattctatttaacatgaaaccaaaaccccaaaaaaacttgatc

SEQ ID NO: 692 - DNA, 75475 bp, Arabidopsis thaliana
tcgctaataaaactgtttaaacaattaatttggtatttcatattttggtgataagcaactgaaattggaagataaaaagtagtatcgtagtgaaagtagaaaacgcaaagctaaaagaggaacatacacagtgtaaaatactaaaccatcttgcctatcaaatccaaatactatcaaatttgatcttttacaccaatctgaatccgtaacattggatccaagtttcgtatacctaaacatgaaattttcattcggctctacgtagtctaaaaaactcgacataaaataaataaaaagcctttataacgtccacaatatttagaatagaaagtgagagaatggactataataaaataattggagtcgagggggatgtattcgtgtatgcgaaaatggatgggctcttctgtctttatattccttaatttgtctattcaaacacattcgtatttctggtcttcggcctgcgacttctataccatgcatgcatcttatctctctctttttttttttttttcgttttcttttctacttctccatttttttttaatttggttatttttattgcctttatgttttttgtgtattatatataaatgaactaataatacttcattatgtttcgtgttattataagtgaatttttcacaaccattacaaaaaattatcttttgcttaaaagttaactttggattatagtacttcataaaaatgtaaagattttgatcaagtacttatcaacgcagcttgggtagtcaatgtgctgtcattaatttatctatcaagctatccacgcagcttggacaataaataaatatttaaattctattgcatatttatatcatttgatccgctaaggttcatcgaatactgccaggttcattgcactcaacgcatttttgtcattaacttacgttttttagccatggctgctgagaatataaagttgctactatgtaaagaaacttttgggtttgatcatatttgtgcacaaaaaaaaataaaaaaaaaatcatacttttaaaactagtattaatccaaaaagtgctaaaacataacaaaaaaaaattctccttaactactatacaaacatatatttttttatgcgcataaattaaaacttaacaattgattatgatcacatatgttgaaaaaaatcgaaattatgtgtgatatgtaaaaccggagtataatattggtaaactataaatttaagagcattggaaaatgttcatgattcatgccgagaactcttctaaatctaaacacgagaggccccgaatagatctaactaaaatgaattgtgtttaatataataatagtgttccttaattctcactcgtgcaactatccatttaataattttaattattcgtagtcggggaccgtacttagttttatcatataaactcttcacagattttgttaactggtttttctttggattagaaaaaaattaaaactttgcgatacattatgctcaatttatccgtgggacttattttgaggaatggagatagatattgtcatgaagacatgaatatatagaccccacatgttgacgaaaactccgtcagtcaaataaagtgttaaaagtccgttacgatccgtcctgacaccgttaaaaaaagccgtcaaaataaagtatgggcttgaaacgttagttttgttgggctaattttaaaatcatggcccaactaaaggagatattcgagtggaccgcgtaacagaggatccctaaaatcccttcctccgattaataaattccagcggacattttagccttctcacatcaacacgccctaaaaccgctctcgagagacgaatcgctctcagcttcttctagaaccttctccttctccttcgacgcatcgtcgccttcaagatcacactacctcgcacaacaatggagttctggggtaaaaaacatctcctatcttactccttcttcttcttcgttctctgcgcttcatttcctgcatttagtttttttttagcttctggtttcatcgctttttttcgttttgccatgtttttctactgttttttctatggaatcttctgtttagctaaacgagaaacgggaatagtgagtatatgtgacaatctagggtatggactgttcgtcttcgtagaaaattggggaaaactgaaaagttttctctctcgctaggttttaactccgatagaggtttcatttggggattttgttgcagaattactgatttgtatgctttctatgcgtttgcaggtgttgaagttaagaatggcaaaccacttcacctagatcctgggctagacaggctcgtgcacatctctcaggtacttttgaatttgcaagcttaatttgatttataagaatgtattttacagtgacgtttggtttatttttgttgaaggttgctttgggagagagtaagaacaatgtaaccgaaccaatccagctttacgtgactgttggatcggataagcttctcattggaacgctatctcatgagaagtttcctcagctgtctacggagattgtcttggaaaggaactttgcgctgtctcatacttggaagaatgggagcgttttcttctctggttacaaagttgatgcatctgatccatatcctttactatttgaacatttttgttgttatcgctttaagctttgttgatgaaaatgttttggggacttgttgctttactctgtttttgacttccttgactctatctcaccgagcctgaggatttgattgatgatcaacttgaggctgctggtttcaaaggtaaatggggacttttatatccagtcctgcaatgatttgtctccagttgtcttattttagtttatttaagaacatcaatctcttataaatttatttggccttggttgagccagctgctccgaaatctgctgcgaaacaggtgaactttcagttgccaaatgaagatgtcaaagccaagcaagatgatgacgctgacggtagtgaagaagattcttcagatgatgatgatagtgaaaactctggagacgaggaggtacttttatctatatatactagctcaatttgttatagaattttacttaggctcagtgacatgttgattaaacctatagacagtggtactagagttatcttaagtatgtttgtaacttctatatttgcattttcacatgaacccttgattacctattgtgttttagcccattctcacatttctttaatccttatcatggctgctttgtttcaggaagagaaggttactgctgaatctgacagtgaggaagatgactcatcagacgacgaagaagatgactcctcagaagaggaaaccccaaagaaggtaacatgacagtctcttttatgtgcttgttgatgggaaacctatatttgttctatcttatcttcctttgggagcaatttctctgcttctgtggtcaagctcgaatctgattctaagttttcttggtttataaaagcctgaagaacccaagaagaggtctgcagaacccaactcctccaagaaccctgcgtccaacaagaaggctaagtttgtaactcctcagaaaacaggtgattaaatcctttttaccaatctccccattgaatacttattttaacgatagaaaggaagattgatttgtttaattaaaaaacattcggacaaagcagattcgaagaaaccgcatgtccatgttgcaactcctcatccctcaaaacaggcgggtaagaattctggtggaggcagcactggagagacatcgaagcagcagcagacaccgaagtctgcaggagcgtttgggtgcaagtcgtgcaccagaacctttacttcggaaatgggattgcagtctcacacaaaggccaaacacagtgcagctgcttgagaagaagaagcagcatgatgactactctctataatatctactctagaactttgatgtcttttggtacttaaatctggaacttgcgagtgagccagttttagttggtcttttttttcaggcatttcttcctgtttaactttatcgttttggtagctgaaactgtgctaaacctttgtttgtgtttagtggtatggatattaagtctttttgtagacttttctagtgaaaatctacatttgaaattctctgtccaaaacatacattgattgaagattagttagcatgtcactttgtaacataatctaatggacccgaaattaaggatttttagggcttgtggttaatatgcagctactacaccagtttgcgtatataaatataataggaagagaaaaataataacaagcaggtttgcccgagtggttaagggggaagacttaagttcttctgcacataagtgcgcgtgggttcgaaccccacagcctgcatttcccctctattttgttaaaattaataaacttgttgtgttccttccacttttgctgtcttccaaaggtttccaacttccgcttcgtatttctctgattgtgaattaaccaaatcacaccaagaatcataatactaattggttttcatgtagagtttccttttttgcggttttcatgttgaagaaaaaaaggaaacgcaagtattagttttcttttaatcgagcttactttttaagctgctttgctctttatatacagattgctctgttttgtaagaagctaagttttgggttttgccttaatgcagcgactacggcgtttcgtctgtggtaatgtcggaataacaatggaagtattcgatgaacctgatgaggaagaagaacgccaaattagccaatacatcgatgtggtagactcacctagggtttcacagaacgagagtgagtatcaaagaaggtcatcagaaagtgtttgttcatcatcgtcttcaggattgcaggaggataaagaatcattatgttcgatctgtatggaagtttggaccaacggtggcgttgttcgtctaccagctgcaccttgtcttgttcttgggatctcaacaactatcacaatgtttatgctggactacagaatggaatggttttagtatttgacatgcgtcaaaacagaggacctttggtttcgttggctgacgtaacaagcaattcggttcatattgtagatggatttcatgtttgtctcaagagaagaggtgatggttcttattctcagaaacagtcatccacacaagctatagtagatgccatcagtttgccaagaacggcgattagactttggcgaggaaatgacacaactttttgcatcgtatgatgagtccacccgtgaactcatcttgcaagatccttggtcttttgctgtctcacaacggttcgcattgtcaagtcaacttccgcttcaagatgtgaaatacgctaacctcaatggctcgggtctgctcggtctcttaaccaatgatagattccagtttcttagaagcgaatctccatgatcgttgttgtagagattaaaaaacagtttgttgaagagcaaacatatatgtaaagtgaccaacttctctatctttgattgctactattagttataaaatctatatagctacaatatccataaattgtttaaagctttgaatctatttgttcagttaagttcttttgtctagcgataagtcaaaaatcatttgccttcaaggaatctgaaaaaaaccttcaaagtatatttcttctttactataagtatcctttatcttccacactacacacaccatttctgtaacaatggtatcatcaattctctctattcacaccaacaagaatttaaatagctagcgaatccaaaaagaaagaaaacaaatcatcttcttatcctcgagcaattcgtcgctcgaaaactcctttttcccttcaatggttaggcacaattgtcccaatttgcccgaatcccgcaatgaagaacgcgattgcttgtgcgaaaaggtatagataataatgattcttcccaaaaaacgcgtcataacatcccacaaataacagatacattcctacaccgagttccaacacatgaattctgccataacacacaaaaaaggtaatattagaattggtttggtacagtttaccagtaaccgaaatcaaattgaaaaagggaagaagttttttacctatctccaaatctaaaacgaataaccttctttgaagtcttggtggctgatttagccttaacatctcccagcttctctgtaacaatccactcattaactcttcctccttcgagtaaaccgataaaggtagcttttgttctgtgaagagacatcacattctcgaacagaatccaaaagaccataagatgcaatgacctataaaatacatgtaaccaacaattagaaccctaataagacttgagccccaagaaactctccgaaaatgtttttttaccttggtgtcccaacggcgttgaggagagtaatgactgaaggaatgtaaaccgctccccatttcggaacagtaacttccggtacaagaactgtagcgggtaagatcacacagtagaagatgaaggtaacaatgtgtgccactagctttctaaccacgaagaagctatatatcacatgaactttcttccacaaagtcacgttctgccaaaagaaagtaaaccggttcagttttgttatgttattgtatcttaaagactttctaattcgtgtagagggattgaaggaaaccttattagtcatgatttcgaatgccattttcctgaaaagattagctggaccacatgaccacctgtgctgttgatacctataagccttgaatgtacttggcaactcgtttttaacctatagtttttttaaacaaataattatttcacatgtcaacctttaagtgactctataaccatagtctataaaaaatatattatactaccttcaaagaaccgaggtacaagaatttccaacccttgagactagctctcacggccaaatccatatcttccacggtcgttctatctttccaaccaccagcttcgtttaatgccgatattctccatattcccgcagttcctataatttattgtatcgaaacacattcacaacttatgaataaaacggttcaaaacatgttctaacaaaattttaatttaaaatgtgtgttaaaaaaaagtaccattgaatccgaagaaagcgtaagtagaagaaccaacttcttgttccaccgtaaaatgataatccaaagacatttcttgcatccttgtcatcaaacattcatccgaatttactgcaaaaaagttgaaaaaatagtggaattcaattattttgtttaggaaaaaaaaatataaaaaaataaaacaataaatgtggtggtattaatgaaagacattaataaacaagttggtgaaattggaaatcaattatgaaatgatagacacctagctcaactacaaacccaattagatttcaacagctcgttagattttgtcacatgatgatctctttattttgtaagtttctctcctctaaaagcataattatcgaagtttttcaattattagtcgtttcaggatctaattaaataataaaaacaatttttttacataaaaacattaaaaaaaaaaaaaaaaaaaaaagtgagtggtgagagtgagagtgacagagactagttgtagtagaagagagtagctgggtcccacgttgttgcacatggagggagatggatggtgttggctacgtacacgtggcggatctagtgaaaatgacaaatctacccatactatttgaactactaaatgagaaatcattgcccctgtgtggcctacacttcccaaaatgttctctgcactcaattatgggacacgacaacgatgccagtgatgctattccactaaactctactctaatttagtaattttgatcaaattagattcctaaatttcatcttgtttaattttggtatttacgatgaaatatttggaaatacaagtaagagacggtatgatttaaatttggtctagaaaagttaagagttgaatggttatagtagccactatttatggtggataattacttagtaaaatacaaaatacgtgacagctttttgggtgccagaagttataaatacattggtggacaatttttattgacaaataatttcttttctttttttttgacaaaaaataattttttttactttgactaaaatatgaggagaacattactatgttgaaatgagtggaaaatcaatttattggaagaaaaagccaaaacaccaaaaccaaattttcaccaactcttgcagacataccaaatacaaattgaccaaaaaacattaataacttttacatttgttgatgttttcagagatttttccaaatgttttgttttcattaaatattgaattagtttttttttggtgagtcaaatattgaattagtttagaagggggtattgtcccagattatatgcctcctagatccttaaaaattaatttcgtatccttaactaacaaattatttaaatttatcgttaaagaaaaagtagttccacattttaaagctagaacaaaatggatacgtcaatatcaatattcgctaggtaggttacattgggacctcacaataaaacacccaccgacacttctagttaatgtaactaaaactttatttttctaaccatattttttaaccaaaattattaaaactccatgattctaaaattactataatgggaggagctcttaacatatcatgtgttaatattatatagtgttatataatacacgttcataggttatcgtttatcacttacatttatatctagttatagtattaatttgacccatctctactctctcttttttttagtcctccattaaaaaaatcataatttcccaagaaacaataaggaaaaacattatacagtagcatataagtatatctatctatttaacttataatgtgcgatcagatgatttcgtaattattactactaaatcgattttatgaataattgcactgatttgtacattctaaagtacttagcctaaaaaggaagtagtaattgagagagaaagaatctcataacccgtgactaactttctaactaagcagtgattagtgattagcacttatcaatcatgagaccacaataaacaaaagggccaaaacgatcaaatcaaaagtatgaaccttaaaaaggaagaaccgttaaaataacgaggttaaattttcttaaaaaaaacttaccgaatttccagcgagcttgaacaagagcaagcttagggttatggagtagatacggtacggttctccatagaaaatccgcttcaggttgaaaatcagcgtcgaagattgcaacgtaatcgcagcttttgacataactcttcttcattccttctttcaaagctcctgctttgtatccatttctgttgtctctgatctcatacttgatgtttactcctttactcgcccacctgctacactccatctccactagatcctgccacaacaaacgtaacggtttaggtttgatgtaattgagaacccatttcggaaaagaatcaaaaagaaaattactttgatcgttggatcagtggaatcatcaagaacttgaataacgattcgatcagaaggccatgagagtccacaagcagctccaatagatagttgataaacctgcattaacaacaacaatcaataacaacaaagatcgataaccaaacaattgaagaaagaagagaacagaattatgatttgggacctctcgttcgttgaacattgggatttgaataagaaccatcgggtaagcagagtttccaagctcgatgtcatctttgattggttcatatttgaaacgtttatctggttttcgaccaaacagcttcacaagagagataacaattcccatgtaaaccctttcaacaaagagcatcaccgacattgtcaaacagatgtaaacaccgagcctaagggctggaacaatcaatggagctcgtatctgatccaaaaccattgacatttgcattgttatgtcgtctctgtatcccatgaacgagtctggaatcaccgacgtcgtatctcctagctccatctcttcttactccgacgagaacaaaaagaaaacagaggaggaatttaaagaaaaaaacaggggagggaagcaagaaccctagatcaaggattctcttgtgagacaagcaatagggaacaatgtgagattctttaaagatgtctcttttggtgtaagaaatcaaagccaaggaaggacgaaacagaaacagagagacagagtttttcgttttttgcccttacggtgaaaatctctgtcttctctgcctgagaaactcagattgtcgggaaaaaggagaattcaatattttttttatgtgttttagtttttttttgtatttaaagggttttggtaagagaagaaagataatgaaaggtggagaaggagaagatgatttttggaaagaaagaagagagaagagagatctaaaaacagaaacagagggagagaagacacagtgttgtgtgtgtgtgtgtgtgtgagaaatcagagagagatcaatgtctttatatataaaggctctgtccttgtgtatattgttttagactctatttaatattccattattcttttattttatttctctagaatatagagaaatgaatttttttgcaccatcaatcaaccataaatttgctctttctatatataactaccaaacattattgaacgacacaaacattaatgacgtccaggcgaagatacaaaacaaattgttattttaagtttctgataaaataattttcttaaaaaataaaaatgtcattgttaaaaaaaatgcttcaatcttctcgaggtgacatagatgtataatataatacaaatgtgtaattgcctaattataattcgtaacaactatgaattatgtataaggttaaaactcgatagtttatagccgtctaggcgtccaaaactataggaccatctcagtcaaaacaatttgctagccagcgtttattattttattttatttttaagctcaagaaatcgaagattaatcagttgatataatatgtaatctaatatagaactaccaattaaaggctcaaaaaaagaatcgaaggctcaataacattttttttttttgtcaatcaatcaatcgaggctcaataacattacttataatattttagagctgaatgaaaaaactatgcattatagatgagcattatgtatatcagtatttatacaaatcatatggacttgcataaccggttaattccaaaagtagagtgattctaatggttcatttctcgaggaaaatatatcgtctcatattgtttgtcctcatctattgacaagatagcgaacatctctgatgaggataatcgaatgatcgaatccttagtacaagacatggatatcatgcagtggtccatatatagagtaacattgagttacaattttgtgaaatccagtaaattgatatatgtttttagcattgagttatatgccactatacctaatacattatttacaattcagtggaaatatgttatgtcatatatttcgaccaatcaaaatcgaacagaagctctccaaaggagaaaatgaatattcaagacattttaaaacaacgcacatttgccatgatgcttcaaatcccaccgacggtccagtttgttatattctaattaagtaccataaataaaaagttttctgtttgtttaaagtcaaatttttttaagtatacaaaaagtcaattatttcataaacttcgaagcacgtttcgacttcgttcatcaatcatttttacttcgtaatcttttaagttaatatattcaaatcgcaatttaaaggaaataatgttgactaaaaaagtaaatggatctcgatcatttttaaaacgatgataaaatgaaacacatagctggaaaataaggactgctcaacggctgaagttgactcttatacggtcattagttttgggttaaaggaaaaggatccatgtgatccaaacatttcgttgcttctcttggtgatgcatattcgtttggtctaattggattcaaacttgaaagtaactatttataaaattaatttgaattttaacttaattttatgtattgaaagttagttaaataattaactatttttgcggatacttaagccatcactcacattacaacaccttaaacaaacatttcagtttgtaaacttcatacgaatgattcattttctgtcggtccagtaccaaaattttaaaatagtttggaatctttgaaacttagattattttttcgcacttaattgtgataggatatttcctgttttaatcagttattaagtcagtaaattgacaaattaaagtctgtatttagttggcatgtcatgtgagaacacataccgagacaattatccaacataatagacaggatttaatttgttgatcttctagacaaacgtgagttaactattacatatacgagtatttcattaaactcatagcatatattaaaaaagataccaaattaccactcttcactatcattgtttgtttcaaactttcagtttcagattaccattctttaacagaaaataaaattttatatttttcattggctttgatttctttgaatgtgaaacaagtatgtatgatgacacatgagttacgtttgtacctatatattatcatggtaacttaaaccgtaataaaaaaaatgtgtgcagaggtataataatgaaaaaaagagagaataaactaataaataataaataattggagaaaataaaatagcactacatatgttgcatgcagccagcaaagtaacatgcagtaccatgcaagtaaacataatgtataaggaccaaataccacatgggttcttacagttggactttgcttatttcactcacatttgtcactattcttttcttgctttcgtcatttacaataattctgaatcggcaattttatgttcctttctttattaaaccgatcaatagatgaaatggaacaccctaaccaaaaatgaaaagaataaataatgacaggagtacccacggacaaaggcaactagtcgcaacatagactttttagttttaactctttatttactaatcggagcagtttagctttgaacgtacccaagtcataagtatgttataggcccctaccacaggaacaaagttttatttacaaatagaataattcattaccaaaaccaaaaagtttatgcaaatattagtctttcagaaaagagaaaaaatgggcatctttgttactttagctataaaaaatatgaaaacaaaattcaaagaatcaatcaagttttgtagaaaacataattcaggaactaactggtgggatccaatgtccatatacatatcatatataattgatatcctatctactttggcactgaaactcccctagacatttttttttaaggtgttatttcaatctttatttgtcggcatatatatacgcaaacacgtacatttgtgcgtatatattaaattacgtatctatcgaatttttaaaaatgcttttttagtctccctccccttttaaaagctgggaaggggttgttgaaacctctttaattaaatgtttaacaattatatactaagtatgatgttcgatcatctgatcatacaatattgtatatcttatagttctgaaacatttaggaaattttagtgtccatttttattcggcgtgatatacgtatatgttgtataaactataaattgaaattaacggttcattagaaccaaacttaataatttgtctaagcataattgttctacaaatgggtaaacattttataaagtcattaactcattatacagttagggatttaaaaataagaaatactcaacttcggatttggtaaaagtaatatatttaatcggctacgtagtgtgcaaagatacttgccgtccatattgaaatcatgaagaaaaaactattcaacatcaaaggatcaaatcaccataataacatgaaaaataagttcagttatatttttaatttgtgtaccaagttatactaagactacattatatatgagaatttcgagaagctatcattggatatggtctaccttctatgcgaaccaccgagttgatgtatacaatgtggctcgagtggcgaagtagacaccacaccttagtcttcaagaccaagtcttcatcactcttattctcacctacttcaatgtttcattactaattttgctttatatttatatatgtgtaatgggaaagttcctaggtcaagttttttttttttttttttctaattttaaaatatttcacttttagttggagtatcatatattaattacttttgccgcttttgacaaaactatagccatctttgacattatactataaattatttgttcttacgtcaattaatcaaatattttccaacaaacactggtcttcattatatttaaaaatatacataacctgaccagaattgcgttttaacaacggattttttttatggctctaagataaaataaaaagtcgttgcatagctagtcgttattatttcgtatttagaattgatatgtttagccacgtgaaggagaggaactaaaaacaaatataatattaacataaatatgttcattatattagagaatttctcttcaatatcaaaaatgtaactggactacaatttggaacttacaagttagtcgacgagataaatctgaaacgatagataaagctcaccggcaagcaaacatggcacgtgggaagctaaacttgttatcaaagttattcttcaacattttgcactgaagaattttcttaataaaatcagtgaaaaaaaggcaaaagggtaattctcatttcacatttgtttccacaaactacttttgaattattatagagttgtctcttttttcttaaaatagaaattaacagttcataatgtaacaaaatcctgcatttttaagaatcttaagatcattcccacacgtaatgaataataaatagtagttactttaatcgtcgttctactagttgggccatactttggtattattgggctcaaaaataattaatgggcttaaggcctcattagaaaacggcaacgccattgaaggagtctacggtgaaggaaagaagctaacgtcggcgccgtcgttagttgccggagacgcgatgaagctcggagtgtttgtatacagattatacagagctttaacctacggtgtctccccgttgattcacctacacatacggtggcgcagactccggggattagagcatttcagccgttggcccgagcggttcggtcatccctccgccgtaagaccaccgggatcgcttatctggtttcacgccgtctctttaggttacaatctctatgaccttcaaattttaactcaacgaaacaaaactgttcaactcttcattgctcattgaagctaatctccaaatcgagaaattatgatttttggtttgtttgttttgagtgactctcaggtgaaggaatggctgctattccggtgatcagacactgcaatgaagtaaagtcagatttgactatcctaatgacgacgacgacagtatctgcattgtatgtggctcattgttgtttcttacataaaaatctaaaattgaaaaagttcaaagtttttgtcttttgtaatttgatttctttgaatcttttggttgcagtgaagtaataaagaatcagctccctgttggtgtattacatcaggtatgttttgatttgtatgatgatattttctgtgaagtcttatagatatgctaaagtttcaaaatttggtcagtttgcaccactggatacacctttagctattgacagattccttggccattggaaaccgaatgcgattatcataatggagaacgaactctggcctaatcttatcatggctgcttcaggacttctagtaattctttgatccttcttgatgtctatatggatgtatcacttgtgcgaagatattgaactcttttgattgtgtttctgttaatctctttagattccgttgggattgttgaacgctcggatgtctactaaatcctttaaacggtggtcgagtccgctcttactaccgctggtatcgttgttgctatctaaattctcattgatagccccactggtatgtatgctaacttcagcaagtcatttttttttaatcttatctgattgtattaaaactatttacctcaaatgcgacagagcaccctgcagggtatacgttttcagttgctgcatgcgccaccctttgtcataaattattctggtgacttaaaatacggtattgtagtccactttaaaccttcaagatattcttatattggatataatgtgcaacccattatgttactgaattgctcatactctttctgttaatgcgatagaaatatccatgtgtgttgtctgctttttgttccagtggtaaacaagttccatgtatctagtggaacatctgaaagtataagagatctaaaagtagaactcgcagaaatgaaagtctggattgcatcttcattacatagaggcgaagaagaaggtacttttgtcctaaactagtatatagcataacctttttttagcctcgtagactatcgtgtggatctgaagtcacttccatgacttgattgcaagtgacttgtaaggaagtaggagtttggagctgattgactttttatttggtatgcttcttctgttgttctatgcattgcttaaaactaattatcaaagtgttgtgtgcagtcattttaggagttcacaacatgcttctcgaatcacatccggactctgttgtcataattgtgcctcgacatccacatcatggccaacagattgctcatgtatggtataccacaccttctgcttatttcatattaatggcttattgaaggttgatctttttggtgaatcgaatttcattgtcctcagctttttttgtagaaactgcggaaagatggccaaagtgttgctctaaggtctcaaaacgaaaagcttacaccaaggaagacgaatatatatgtggtggatacactaggttagggtttcactacttttagtttatcttcctagtgctagtcccttttctttaagaaccctatctgtgtctgcttggtttcttcaggtgaactaagggaattgtacagtgtcgctccaatagccgtcattggaggctctttcatcccgggcttaactggtcacaacttgtctgaagcagctgctgctggctgcgccgttattacaggttctcaatgataaagattagatgcttgtatattatcactctttctctcctttatctcaacattcatggaatctttgattaggttgtcatgttgggcatttctctcacatggtgaaggcgatgcagcaggcgaaccccttatcggtgacacaggtctcgacaaaactagagctcaaagaagctgtcgacttgctcctgagtaaccctgagatcttggaaacacatcagagagcttctaaagacgtttatgaatctctatcaagctgcattatcactaacatctggaaacttctcaatcttcatatctttagagggaaatcaagaaatcacattgaatgcaaatgatgaaatggctcgacaagtcaaaatttaattaacaaaaacaaaacctcttctagggtatataaatatctctatctgcaaaagtcaaataaaaaccatggagaatcacaatataagaccatatatagtggatagactcgatacaaactatagaggggactattgagctattctctctcaaactgcatcctgcttaatttcatcaagtgtggaggctttccttttctttactttcatcgttcttaatttcatcaacagtgtggaggcactcataatctaacaaccatcaatgaactagaaactaaccttgacactcacaatatgtccctgcttcatcacttaagttaaatccttcttcaaaaacctcatcagttgttgtcattctcatacatataacatgaaggacatttggtttcttaatgctcaacctggaacatggccgaaaaaagaaaaagagagaatagaaatcgatttttgcgaatactcatatttgaagaaaaaactgttgtagaaaaccagtacttacattctttggtggaaactcttgactttaaagtgactcccaagttagggttgtcggaagaagaagacgagaggaggagttttaggtattgtttaagttgttccttccagacccgggcctggaccgaagtccatgtgttttgagcaaacaagtttttagcagtccaaaacccatgcttctgagttggttattgcataagattaggcctgcgttttttgtccaaaccgaacagattgattggttcaaaatcggtttaattggaagaatcatgttcggtttacagtctgcttcggttcgaaacattcctacatggctcaagtttgtgaaaaatgtgtttactaccgttcctatatgttttagtcttttagaggccataaaaaaaattaaaaaaacatgatcaatttttatgtatgttgtatccttctttcctgagagaagactcttttaaagctatccttcctgtttttgaaaaaaaaaaaaaaaaacatggttggtttttgttcaaaaaaacatttaattcttcttttcattcaaaaaaaaaaaatgtatccattgcaattgaaatcaaacttttatattattaaattaataatatcatagtttttaatataaatgtagtggttagattttttgaaaaaaaaattgataaaacgaaaagaaaaattaatgctttatatttgctacacataaaaattcaaaatgttagaagagttgagcaagtatattcatcaaattgttaaaagcgaacaaaaatattttacagaactatatatgttatttagctagcttacccaacaaagcacccgtggcctaatggataaggcgtttgacttctaatcaaacgattgtgggttcgagtcccaccgggtgtgttattttccttttttttcctctattctgtcaaggatccatttttcagattttacttttttcttttaacacatacaagttcgaacttcgagccatatattatctatactgaaaatctaaagatgtcgaagatacacaaaaagtagaagtcagttcttgtaaaggaggaacttttgtctattacacagatcaactcccacattagttcaccaagtctggcttcatctccaaaataagtcacactaactattgattacatagcagtaggggttagtgtgctgccttgttcgtttttgttcataatcttgaccatgctcctccatttgtccttgagatcagctggagtacgtgtttcgtggaacaccttctctcccatttccagaattttcctccatggcatgttcttgtttgcttctgctgcaaatttctccactcccacctgaaccaaccaaccaacacatatatcaacaacaattcttattcaattcatgaaaatacagctagtgtaggtttggtatatacctttagcatctcttcttcttcgtacgtccaaagtagcctccttctttgatccatcttaaagaaagaaatgtccctgcaaatccgtgaggtaactttctaaatttaatgtggaaatgaactcttgatgttccagtgagtgaagaaaaaggaacaacctcactgtctttgacttagccacaactttggttgttgcctgctggttcctcattctccctgacggggaggttacttgaaccgatgaagttacctgctcagttacatcttctccatttcgttcgttacttgatccctttgatgagatgtcactatcgataattttcaatcctctccttcttcgcttctcattctgctggacctggtcctgttcttttgctgaaaacgattcttgcatagacaaaaacgaagaaacctctctctttttccctgcacctgtattcaggattcttgtaccttgatctttagctgtttcatcatcttcagcgtcttgaaatttttctgtagctaccttctctgatgctccaacttcgtcaatcactttaccagtacccactttcccttgatccgcatctggttttgatgaacagccatccttctctccttgtaactcatgatcacttacaatgtctgtactctgctcttggtttccaatttcatcaccagataaggttatatcctcatccctgcttttcatctctttatctagatacttgcagaccgccttttccgcctcaacggtcttttctctcaatgttttggatttcagtgcaacaatcttgagccagcaataaggacaaaatggattcgaaacatcctcactactactactactactactactagtactacccaaatcagcatacaaacactcgccgtgaaacgaaagaagacagtcaaccccgcaacaacgagatacccgctcgtctgaaacttcacatacaatacaagcatccaagtccagcagcggctctacagatcctcctctatcagtagtctcactagtcccaagacaacgacgcttcttgtgtggcacatctctttcatcacattgtgtgttttcattagcttcatcatcctgtgaaaggatgaccagaaatcattcacaaatacatcaaccgtaacagtttctatttcgcgagttccaaatttaaaattcaacctccacaatcacacagaatccaaaacaagctttgattataacatacgaatcaaaatcaaaaccaaaatcagtcatgtagctgcaccaggaaattacaagctctagttttccgattctaaaggagactgttccgagaagcaaatagagacgaagggaagaaataggtttaccagaagcgaatcgagggatttgcgcgaagacctaaccggaatcgatttggttctcatcttcatcttcgacagtttcttctcaatcatcagtctcggtttaaaattggcactctcgaattcaacaatggggacgttatatgaacagtgaagagtgtctcttctcaattgtgaagcgtactgaggaagatggatgaataaacaaaataaaaaagtattatgtgataaatttagcaaatatagaagaagtcaattcaccttttaattaattatacggataacccaaaattttatgtatattgaatcaaaaatatattttaacttttttttatttatttagaatttttatatatttactgacattaaaatttcaactttaaacaatagtgtaatcaatatataaaatcataattcattaacagaaaagttttacattcgtaaatgattctttttaattgacttaaattcttgaaaataaatcacatatttttttgacgcataaaacatacacatgtatatactagagactatatgtcggatgattcatcataataattatttacttttttttaacacatataaatatttactataatgagattaaaataataaatatatttaattttttaaatcatgaaactactaagctagttattatagaaaggaaaaaaaacagagagtttagttgatacgccataaaacagggtttctttcttctacatatgtgttaggtcttcatgagtcatgaccattttagttccacaagccttcaacaattaagttaaaagaagattgtagctaactaaattttaaaatattgttgacttttgtaagtaataaacttgcaatgtataagtgggttagtcttatggaacttgtttaccttttttgttactatatatgtctggtcaatttgcatagcaacaattaaaatttgtaaaatgaatgttataaatatggtcttaaattagtgtctgactttaacggcgggatttaattgttacgtatttacgattttgaaactaatagtgaaaaaggagacactgtaccaactttaaccttcactgttatattcatctttagccttcttcacaatatttttaccttttcagttctagagttatttaatggtggtgtaataaatcttactatcccatttatctatgtgagggtggtaattagtttaacccaacaaaacccatcaaaaaaataaaaaagtaaatgtataattcacattatatatttcatattcacattaagcaattctcagttatatcgtatatatagcataaatacttggaattcaattgttatataatataagttcttacttctaattccttataaagtccctacattttactataatgtgacaagtaaatttagctcctccaagaaggggggacctttttcttgattaccgatcttagtaactgatggatctaaatgaaatcgtctttttaattttatttttatttttgtcgtctatatgaaatcgtgtatgttatataaaaactaatgaaatcatttggggaaagtctcaattctcaaagaacaataacaaaggaatttagttgtgaattatacctgtacatgttggattctcctcaatatctgagtttttagttctggctctcctcttttttttttttttttttttttttttttttctaatgcatgcatggagatgagagtgagactctgctaaaagtttttattcggatattatttaatttgtttgacagtattaacaaaaggcttttaacttttaagattctgtgaaatcattcatcatgaacccaactaattaccttctggttcttaacattatctactactcgaagagttaatatataaccctataacttcatcactagctctattctaataaagatgtatacgaaattatgaataaatattacattatatattttcgtatgtgaatgtataattaaatacacaaaaagttaaaaggattagtggcgataggacaaaacggataagaaagaaatggaatttcaagctgaatgatgattctaaatgattttatgggtcttaattttagtttatttcgaatacaaatcggtcttatttctcatttaatccagacaaggaaaaccatatatatattggcgtaacacgtaaacatttaaaagttaaaaacacgttatttttggtccatatcgaagactttttacgtagggtcttagctaaaatagtgaaatttgcatattatttttttaagaaaatagagtatgaaatgttgttatcaaacggatcctttacaatgaatgcaatcatcgaaaaaaaaccataaaaatattcttaaaaaaattatacactatgaaaactgtgatgtctcatctctttcaagggtttaggcttaaaagcttcccttttctcttatacactgtcgttagttttaaatctcattacttatcatcaatctgttcaaaccctatctacttttaacatagaaaaagattcctttccttccctctctacccttctctctccatctcttacactatttacacatcaacaatttgttaagtagcaattgaatatgagagagagagatatagggagagagattgtgtgtagaactgcaagttaataaagaatgtgggggtaaagagtacacagtagatgaagacaatgagacttagttttcaaacttcttctttgctttggcttttattggtcatatcagactctttatttatagatgatctacttagctctctgtgttgattcttagctttcaaaggtagcttttggcctcaccctatatactctatacaggttactgcacatatacattggtatggacttgccactagtgccaaaccttttgcacattaattttcacatatatataagtagatttagatggtgtatatataagacaaaacaataactgaaaatcttaggaccaagaatgaaggcataaccaaagaaggggggaaccacattgtcagtttttatggagtttttgggggaccattagtttcgtttcactctttctctttcacttatttaagcttaactttgacaaatacgtacccccacctatattactacacgaaattacaatatatttatatataaaatctcatcaatttcttttcaactacatttatgtttccatgtttataaaattcagtcaattaagacggtggtttaaatgttaaaggccacaagtagatttatgtgaatgttaaaaagtcccaagtttagaaattccgtcaaatataattaatccatgcagattttgatttaccatttattggtttacactagattttcaaaaggaatatttggtgcattcacacaaggctcaagattgtttgttttttcttcaaaaaatatgatattatcaaaacctctaattttgtagcaaaatcaattttatttaaatctaaaacatgtattgtcttggttggttcacatcatcttgcaaactctgtaacactataaattgttacaatttgtatgtttatcgaaaaagcgcaacgataatattgacataaacaagtagattaggtgtcatgatagtatatatattataaaaaaactaatacgaaagaaaaaacagtttcccgaaaataaattaaaaattccaagtttgacccttggacacaacaaaatatatcaacctatattaatgttagagagatgatggatgatgattgatgatgtgcaaatgagacaaaattatatcacactttccttttcaatctttaaattccaaaacaaaaggtactgttgggttgctcccttattaggtgaaaaaaacctcacacaacacagacaatttcactctgtctctttcactacacctctatatctccctctagatacatatccctatttatatatgtattgtttcgaacactgcgtgctctcacactttgttacacctccaaaagacaaagtacatagaagaagaaacttcttgtcacgcctctcttaccccttcccttgtggtccaataaaaccctaattttcttttctttcttttatccattgtattagatcctatatctttcttccttatagaccatctctcatgtcttcttatatatattaagatattcacaagaactacaaaagaaagaaaggagatggagtggtcaacaacgagcaacgtagaaaacgtgagagtagctttcatgccaccgccatggccggagtctagttcctttaactcgctccacagcttcaactttgatccttacgcaggtatattcacacaccatcgtaccaagtctgcatatgttacatgctttcgttttttttacttttagatgtgtttaattccatatttgacgaattcatgaactttaaaaccttatttatcccacttgcaaatgttctcaagaagtttttttttttctgtgaatgatgtaaagaatttcaaatatgacgtccctaaacttcattccaaatgtcaactaaaacgttacttttctgatgagaagctaagattttcttatcttcagtctacaatatctataaataaagtttcttacttttttcttgggatcctacaaaaacaatttcttgggatccaaatgcaaaaaggtaaaacgtcacttttgaaaagttgagattcgtttatggtatagttcactctaagaaaaatggttgcggacataattttattcttcttatacttttggaagttttttttttttttttttttttttcgtataatgattatattgttgcgcttctatgtttaaatatttccttttatcctttcggggcgtttgctaaaatgtttaacagcaggaaattcatatacgcctggcgatacacaaaccggaccggttatctctgtaccggaatcagaaaagatcatgaatgcgtaccgatttccgaacaacaacaatgagatgataaaaaagaagagactaacgagtggacaattagcttcacttgagcgaagttttcaagaagagatcaaattagattcagacaggaaggtgaagctgtcgagagagctcggtctgcagccacgtcagatagcagtttggttccaaaaccgccgtgcacggtggaaggcgaagcagcttgagcagttgtacgactcgcttagacaagagtacgacgtcgtttctagggagaaacaaatgttacacgatgaggtttgtgtattatattgcacaaaattaaaatcatgggatctaattacatattatcgttttcttaatttatcccttaaagtcttgattctatcagattgccccccttaaaaaattggattggtggtgcaggtgaagaagctgagagctttactaagagaccagggtttgatcaagaagcaaatctctgccgggaccatcaaagtttccggtgaggaagacacggtggagatttcatcggtggtggtagctcatccaagaacggagaatatgaacgcaaatcaaatcaccggagggaatcaagtttacggtcaatacaacaatccgatgctggttgcttcctctggctggccgtcatacccctgatagatgttgctgatctcagagagagggaaagagaatgagagaacgagagaaagagagagagagagattgtgtcaaatagagctttagactaggactttagtagtgttatagactaagacaagctttctctcattgtacgatcttaaaacataaatggcacgttcttggatgcgagattgagtctgaaaattgttgagttggttttgttgaacaactatactatgaacactcagaattggcgaatgtccgaaacaaaactagctataaaccaaaataatgacgagagtaaacgagattgtacaaatcttgacactgatgctcagcattttccgcttcccttcaccgaacttgagacctcttgacgcaaaaaaaagctgcttaggctttgtgtgtgtgtgtgtgtgtgtgtgtgttgtagcttggtaaaaagctaatctttatatgtacatgactgtctccaggtaagctttgattgaagaaggctttagttgttaaatatttaagaactttacatttcgaatcagagatcataaaaattgtaaccttgacagtattccaataactgtctcatattgataaaacatcagacgcaaaagccataaagtgatcagaagtagtacgaagctgccactccattgtttatatttggaaccgtcgttgctagtttgtttgggcctagtcaggagttattttgggcctaactaagagtcagtgaatctgagcttaaagtttggtaagatgtgtaacttgtaatgggccaatcaaattttgaaccaattttagtattttacaaaccaacttcgaatagctgtctttaaactgaaatatacttgatcctaaacattgaacacatgtataagtaataactaaaataattcaattgaaattaattaattaacagagtattagtatatgaacaccaaaaagtcgcctaattatatcgtcacagtatttcagtgcacaagctatttttcttcttcgaatgttccttgacgcctgattatttgtaaacttttaagttaacatattaaaatatgcaaatataactattatttgtttattacaaattaatgaagaaaaacgcccaattataattttacacacacacacaaacaatcccgggacttttcaattatttttcgttacacacgccaaacaaacaaaaaaaatctgacaaaacttagacttcacgaatcttcacattcaatctcctcacccaaatcgaatgaagaatcatatgaaacacatcaaacctcttagccggagaattcacctcaaaatgtctccttaccttcaacactcttctgtacatccttaagtactgtctcggcgatatagatgtcaatatcgttttcaaattcggtatgtcttccactgaaacgatcaccgagaacgatctccagttcagtacatcgctgaacggaggaacatatcctgagtttatcaaaaccgggacgcaacccgagtagagtgcctccacgatcctcgggctcgcaacctcataaccgctaggacaaatgcagaacttgctgttccgcatcatgtcagaataagacgttcctctagggagatacttgtggactctaatgtcattatctttgttctcccaatgctggagcaagactggccttaccggtccgtgtacaccccctgcaaagaaggcgaggatgggacggctggaaggtgacggtccaccgaccaatccagttaaggatcccgtccttagattgatctccggtatcgacacatcttttcttggtttgaatctctctgacgtgttggcattgcacaaagctctaatcgaattatgtcctagatgtggatgagagaagcttgcctcaggaccctataccaaaaaatttcaagattataacgataactagctaaccagaagatataagccaaatatattgttatagcgtacccaatcgtgacaagaaagtatgaaatgatcggctccgatgctgcggttccaatatgggtatttatcacccacaagattgatgtaatccttgactgtatttcggatggggctgaaatcgcgggaatttcgttcatacacgtatcttaccatcttgacgacactaaatggtagataaaaaacatgagccttgtcgggattattggtccgaaaacgtgtatcggtttctatctcatagatgaaacttccttccatagagtagatgcttttgcatggaccgtcatggaacaacggtggctcgccttctttgtatacatatatcttgaattgtttctccatctccaagtaactcctaaacatttcaatacataaacaaaacattgtaaccacatcatggtagtgttagcaaatcgtcaaaagaaaatctgtttcactctctactctagaccacatgaaaacatttttgtgcacatgctcgaatgtcttgtctaagttaatatggttttcaagatcaatcaacaagttacgctatcattggttaccttattttgctaaaccatgtaagatgggccaataataatatttttgattttagaaatttagccctccaaaaaaataaggtatgtgattccttgctctgcttacgctacgcatataagatgggacaccacaaatctattgcatttactaatttaatggaaacaaactactactagtatttagcaagaaattaaatataaaaacctactaaaaacgtaactcaaatttaattgaaacttcctggccaggtttccccatcaatttagtaaaaagtaaatccagttccaagccataattatgattcacactgccaacctgtatgacttcaatttaattcaaataaattgatagtttccaacctgtttgactttaatttaattcaaatacatttttgacgaaccaataaattcacagttccaaaccgtgtaacttaaatttaattcagatacattcttagcgaatccaaattgcagtaacttcagaataataaatatagaaagtaaacataattattcatttcacttaccgatgaaagaccttagcgttccaatacataggaccaagaggaacatagtccgggtcgtccacgggatcatccatcgaagcggctttaatggaggctcgagctttttgtagcttgaattctatcttctctaaattgctaagaactcttcttttctttggttccaatgatgccgtagaagagacgttattactcgttgcagtaacgttgatcatattcagttgaattgtgcgattataatcaccctgttcaatcattgttattctctagactattgtacataaatgaaattaaagaatggttccatatcagtaaataaatcactttaaaagaaatcaaaactatatgaacattagttagttgattaattagttcaaatttatatcacccgaccctacatatataaaaaaactgtaatctttgctttcttattttgcggttttgatgcgactgcttctctcgtccttaataaaaacgaattaaaattcacatttgactagttgacaaaatattttttacagttgactgtagtttgaccacggaatttaaaacataaatgttatgatatctgttggtaaaacattaacataagtatttgttagtaacaaataagaacagaaaagaaataaataaaatagccggaaaagaaaaaagacatgcaaagatgaagaatgaagaaaggaataatttaggtattcctaagtaatttctctaacctgaatagattccactttagtcgataaagatgatgctggcaacgagggaagtatctccggtagcagaggagatggcgccggtgccggagccgtagacagaaacggaggaggaagatgagaagtagtagtggacagagaggttaataaagaagttgaatctttaggaccaatatttacaaagacgaaaccagaaatgacaacaagaggaaccatgaatagaaagagtttagttgaatacgacgtcgttgaggaacatgcagacatgtttttacacttcccatcaacatcttcatctcccatgatctctctctctattaattctctttctctgagaagaaaattataaagaaagaagaggaagaagacgaagaatcaaaactaataaagaagagagcttttttgtttttatttcaaccttttttagttttgctttcggttttaggagcagaagaagagaaatttaaaagaaggtgaatgaaagaataacatttggtaataagtggttgctccctcgtcacctcgtgccaagcgtcatctttctttccactctctcttctcttttcacatgcaaactttttatttctatcaatttccaccccaaacgttttatttctatctatttctaccccgtcccaaccaatccaaaccaaaactcttctagtattaattaagttgttatatcaactttgctatgcgtttgcaatgcttttttatttgaaactttgaatggactatgtagctatcagaaccaaaactctcgtattaacaacttacgaatttataaaagaaaacattacaaaaactaagggtcttggtcgattcaccacagatctctacaagaacacttgccattcacaaaatgatgaaaccctgaggaatctctcaaaactatctctctttttaccacaactgaaatatacttgaagaactcgtggcaatcaccacagagcattacgttcttcataacccgaaccggcttgccccgagtattgctcgagagaattccataagtcactgcgagtttcgcgctgtggtgaaacaagaaactcttcttcataaactcatcaacctcctgaagaacatactctgtgtttggttcgtatccaactttcagacattccattatcagtatctccaatcccctgtatatgtctttctcttgcgggtgggatgtgtcacgcgcgtgaaaggaatgtattttgttctcatggattatccagcttttagcaggatgtttccggtaacctctttcccgcatttcctctcttatcatttcagagcgatgccagaatccggaagctgagtagatgttggatttgaggatgtactcagacggggtttctggctttgtagatagtataagctttgctactcgtttcgcaacgcttgtgtttgaatgtattctgcagctatcaagcagagctctcaaaacagagacctcgggctgaaccggcattgagtttattgtgtcttccgcttcttcaagaagaccccaatgaccaagaacacggacgaatgcagtgtaatgttcagtcgttggttcaatgtcatagatagtcttcatggagagaaacagatcacggcagctactaagcttatttgactctgtataccgaaatgcagaaataacaagagtgagggtgattatgtcaggcttgatctctttctcattcatcctcgaccatagagccagtgcctcatcaccatttctttgaaggatgtagcaagaaatcaagctgttccaagaaataacatcatgttctcgcatagtgttgaaaatctttatggcatcatctgagtcacaacatttcgcgtacatgctaatcaaagaatttcccaagcttatatcagaaaagtacccagctttaagagcatagcaatggatctgataacccatttcccgaaaacctaatgtcccgcagaccgcaagaatcaaagtcaacgaaacttcatctaaaaacaacttctgttcacagagagtgcgatggaatagcgatacagccttatcaggtaagccattccgagcgtaaccaccgattatagacgtcgttgctttcgagctatcgagattagaaggccattggtcaaacatctcctcagcatctgccatcctttcacaccttgtgcacatatcaagcaatgcagtctggatacaagggttgaaagcagttccaaacttaatacaaaacccgtgaatctgttcgcttactttcttctctgaaactaaaccacaagcatcaacagcgcttgttaaactaaaatccgtcaactcaacacctctctgcagcatatcagtgaataattttagtgccttcaagccatggccatttctacagaacccagccatgagcgcattatacgtaatagtgtttttttcagttacattcgcgaatatctcaacagcggaatccaccattccaaatgacatgtaagctgtgatcatctccgtgaaagtaacagcatcttgcgccatcatcatctcgtataaactctctacctttttcatatcccaaaatttagaataaaacccaatcagagcgttgttcacactcaactcctgcatcaaccctatcctaattgcacgaccatggagttctctacctctcaataagacactagaatcagtacaagagctcaaaagcgttgaaagcgtaaaactatcaactccaaatccttcgactctattcatctcataaaacaaatcgaaagctttatgagacttgccctctttcactaaactcgaaaccacagtgttccaagacgccacatctctctgaggaatttcatcgaacaacttaagcacatcatcacacgaagacccagaatccttatcatacaaactcatcagcgaattactaacaaacacagaattcaaaaaccctgatttaactatcaatccatgaatctgaatcccaagcgagaatcgggaaactctcacgcaagcagtcaaaatcgctacaaaagtatactcattcggctgaacaagacctgcttttctcatcctgaagaaaaccttaagagcctcaatttcaaggtttaaccttgagaaacccgagataagagctgtgtaagaaaccaccgttggcgaagacagagacacgaagacgagaatagcttcacgagggaaaccaagtttgagataagtagagataagggcatttccaagacgggttttttcttctctgagcttaagaaacgaagcgtgcacagcttttgttacctcgacgtcgtggtattgagcagacaatcgaagcagatagaaaaacccatcaataacagattcaatgtcttccgtttcttctttatcgaacgatgaagaagaagaagatgaggaagaagaacattcatggattgttgctggtgaaagagacagagacgcagagagagcaaagaggcgttctggttttcgatagagggagagagaagaaagaagtttgggacgatgattcggaggaattgaaggtgggatatgaggaaaattgaggaggcagtgatgattaacggtggacatgaatgaatttttgagcttttgggcgcctaaatcgccatggataaacctttctcacttgttctatttacttcagaagagaaggaccatttttgtaatcaagcaatttatttaaggtccctatattagtgggaaatatatacatttcgctctttactattgatatgatcaaatatccccgtaactgaaattatttatttacaaatttatttattaaagaaagcaataatttccaaaccaaacctttagttaataatctccaaccattcattgaactatataacgatctaggatatattttcatcatatattcatatttttgactgtttgagtcaatgttttggaataaagttaggtttaagagatgaggggtattccttggacaagaagattatttgcgataacacgattggctgcctcggatggatgaaaaccatcccaaaacacgtaattcgtagcattcgagcatgtacccaccgacaatgcattacataggaacgaagtttccattgtacccgttccacaacaagcccttcttgattcgaaaaaccctacagtttaaaaaaccattaacaaaagatattaatgggaacaaaaaaaaagaatgtaggtgttagtcgaaatgtcaaaataccgtaccatactcgacagggtttatgaccatgttcaatagaggattatagatgtcaaagacgaccaacttcagaccgggaagattgttggttaagttaatagacgtgttgttgagtttcgtattgaaggaaactgcatcctggtttagtctttccacgcacatattgttcccgaccccaccaaacagggttatcgctgctggtaaacaacctaatggcggtaacgtcgtcactccaatcctcctagcccctaaaccatacaaattctgccaaaaaagaaaaccggtttagagagtaaaccggtaaaattaaaacttggtgcgttgtagtgttggttaagttacttggacaaaggtggaataggatctcaagagatgatctgagtattgatcaggcgtgaaaatccggttaaggatcggattgatgtaataactttgaagaaaatcgcttgatcctgtgcttagaagatgaattgcacctgagaatatctcatttgctctttcttttcccacaatgttcgtcaccttgttttggtactctttgtagtttttcagctgctggctcaatgttattgcattctacaataatgatcgataagaccatatcaatgttatttattactaacttaatatatagctacattaaacaggcttgaggagattaattagttacgtaaaatatggcagttgcgtcgtcaaaaccggaagctccagatgcgaaattggctccggttaacaaatttgtctcatttgcttcttggctaaggtaagccaccgggtaagatgtaaaccctaaattctcagctgctcaacaacaaacaaattttaaggaaaaaggaaatgcatgatagattgtactataatgtgaattagctaggctggttcgaaccggtaaagtctgtggcaagttttccgttagagaaacggccagttgcactgtgggcgacgaagtcacgtccgtagggaggaaaattggctttgacgagggtaatacggtggttgttgttaccggcatcaacaactgaatctcccattatgattagagccggtacaagtgtctcaccggtcccaacgccggcgtagaaacaggcgataaccgataagcacatcgacattgtaataaacatcttcattttctgtttgaatgcagtaaaagattttgagaggactgagtacgaagaagtcgtgaatgattagggttttataggaagagagattaaaggaagttgcttgaaaaagaagataaacttttagtttgtttgaagccatgcttcggtagtaacgtcgtcgtattcgaatttaaagatgacatacgttacctctcacactattcatgcaataacaagaaacaaaagatttttctttttactatttcgggactcatttgttaattagattatcattaattcgttgggtttagtcaaacgcgacacgaagagatcacatgctaaatcatgtgaaagaaactaactttcccttatctttgtttgtttatatcaagaatagttttcattatatcttttttctgtgttttgtttgatcatataacatcttaactatctgaatcaatgttttggaataaacttaggtttaagagatgaggggtattccttggacaagaagattatttgcgataacacgattggctgcttcggatggatgaaaaccatcccaaaacacgtaattcgtagcattcgaacatgtacccaccgatcttgcattacatagaaacgacgtttccactgttccggttccacaacatgctcttcttgattcaaaaaaccctacgttcaaaaatataaaaaattgaaatatttaaaacgagaaattaaagtgtcggtgttagtcgttaaataaagttgcggtttgatagaaatcgtaccattctcgacagggttcatggccatgtttaagagaggattatagatgtcaaagacgaccaatttcagaccgggaagattgttggttaagttcatagacgtgttgttgagtttggtattgaaggaaaccgcatcctggtttagtctttccacgcaggtattattgttcccggtttcaccaaacaaggttatcgccgccggtaaacaacccaatggcggtaacgtcgtcactccaatctttctagctcctaaatcatacaaattctgccaaaacaaaaaaaggattggaccatcggtttagagtaaaccggaaaagttaaagataggtacggtgtggtgttggttaagttacttggacaaaggtggaatagggtttcatgagacgatctgagtattgatcaggcgtgaatatccggttaaggatcgggttgatgtaatagctttgaagaaaatcgcttgatcccgtgcttagaagatgaatcgcgcctgagaatattttatttgctctttcgcttccaacaatgtttgtcaccttgttttggtactctttgtagtttttcagctgttggttcaatgttattgcattctacaataatatgatgaaaccataaaatgttattaagtattccggtttgactaacttaatagccggattaaacatggttgaggaggagttaattagttacgtaaaatatggcagttccgtcgtcataaccggaagcaccagaggcgaaattggctccggttaacagatttgtcccattagcttcttggctaagatacggcaccgggtaagaagtgaaccctaaactctcagctgctcaacaacaaacaaaagcctaaggaaattaaatgaaatgatatatatagatggtacgtactataacgtaaatagtgaattaggctggttcgaaccggtaaagtctgtggcaagttttccgttagagaaacggccagtggcattgtgggctaagaagtcacgtccatagggaggaaaattggctttgatgagggtattgaggcggttgttgttgccggcatcgacaactgaatctcccattatgattagagccggtacaagtggctcaccggtcccaacgccggcgtagaaacaggcgataaccgaaaaggtcatcaacattataataaacatcttcattttctgtttgaaataatgtagtaaaagatagagataggagtgagtgaagagatagggttttaaaggaagatagattaaggaaattacattcatttgtttgaagcttgcatgcttcggtagtaacgtcgtattggaatttaaagatggtagaccttaacacgcaattcatccacaagaggacatacgacacctctcacatttttcatgcaatcacaacaaacaaattaaaggatttttttttttttggttttataactatttcgggactcatttgttaaataggttttttttttttttttttttgttaaacagtttatcattcgttgggtttagtcaaacgatatacaaagagatcacatgctaaaacatgtgaatgaaactaagtttcacttaacttttacttcctaaattcaacaaacctttattgttttctttcttgagactcgtcctacgtcatctcctttttgtctagacctaattaatgaaaccaaaattctaatttgcttacgtcgagtatatagactgaattcggttatccttttttttcggttatccattaatatgctttcaagttttttggtttatagatctattgtttcgttataaacataataagttgctaagctccattttttcgttatttttacaactcacaactataaagtaaatatgaatttatataaacagagtaaagtgcactttatatattattgatcaatatgacaaccaataattaagattgatcgtctctaagcatcagcatatagataggataaaagtattaaaaattaatttgtcatagtatattaaacgagttgatgagagctacattattcaaaatatgagcagtaaaactggttttgaccatgtgaatattattacagtaatctttgaatacacacactgacttctcaaagccattaacaccaaaccttagctgttgggttactgttgcatgaccactttttccggttcaggccccaattgggtaaagtgggctttgatttggaaagaacagagatcgggtttacagtcaatccgaaccgatacgatggattaagaaaaaaatccggtatggactgatttaactgaaccattcggtttcgtcccgtttccttagttcacttctctcgtctatccccagtcgtcgccgattctctcttaccggtgtcaactcgctccaccgtcggtaagttccacgagaaccaaataaggtttccaatctcaatccaattccaaatcaatttcgattctcgtagaactagtccagtgaatcagttttgctattcatactctgttctcttatgaactaagattactatcttcaattcatagattagggacacactttgcataggttttggtgaattagcctgaaatgttgtttagttttcgaattgaagtaattgaatagatgcctagaaggccatcagggagaagaagattgtcaaagtataaacctttagcattttcatcgtttatacgttctcttgcctttgcttcaacggctagacgtaaattgcctcttccggatatgtcttttggttagtagtaacctcaaagattgagactttctctagacagaacatcgtagcgacttgatgagtatgtctcattcttaactttgtagatgaaaagttccataatttgtctaagaaagggaaagagaaatcatcgttggaatcctctgatgaagaagactctcaggtaaccgatttcgtgaagttactctgctattgatttcttttatctttttgttacgttttaattcgttgtttgatctttgaagggagatgtccaagcaggttttgtggatttgatactgaatcaaacagcgttaggaactgtggtaaaagtagcagatgatgaggatgaggcattatttgctcttatcactgctcttaacttggcaagatacaaggcaagtcatgtagactcacctctattaagtgaactttacatttatatatgcttaatgatcgacttgatcatgtgctgtgtatatgatttcatttgcttgttaagcttgttgaagtattaaatgatgttcaaaggtgtttattcgtatttgctattatgcttatggtgagcaatctattaacaaccgaatgatctttttttgtgtgttcaggagaataagtgctttagagagctaaaagagtttcttcttaaagtttgttcggagaagaatgtagcgagtgatctagaactactcttagagaaaaaggccaaagatgttggtttattggtctctcaaagagtgatgaatcttcctctacaactccttcctccactatatgatggattgttcgacgaagtctcatgggccactgaagacgaggtttgatctttcaaagttaagtttaggcaaattcttttcttatgagcaaattaaagatcttcgaaatttatcaatttgtaagtttctgtttacagcctacagaagagcttcgagggtcattccgcttcaagtcatatattctaatcgctaagatctacaaggtaagtgttctggtaaggttattttttccggttctcgaattctctttcttgtttcaacaatgtcgtggtgaagaagagaacgaggaacaatataacttaagcctgaagatgaaatttttctcgaggtacttattctcacattacctactcgacttcccgtctgttagcaaaaaaagttataccctaaacatgtgttacaaaatgtattgcagcttagctcttggtcattcatattacctatgtactcgcagcttgttacatctcaagaggtaagttatctctttaatgccaacatactttccctggaatcacaaaaatttgattcaagtgtttcaggtttgtaatctttggttataatggcgattggcgaatctagtagttgaagaattgtcagtgctggtcgtggagacacaaaagattcctgaattcagaaagaagttgaagtctctcattgacgaacaataatgaacatctcttcttcttaaagattcagctcaccggtcagttgttatagatctctgccagttttgatgaggttattacagtgctattttttgtcattctcaggctttcttcccctgcatattagtggaactgaaacattggtctactaccttttctttttttttgctcaagggtttatatgaaacagtgtgaaatgctatcaatgattcttaattgtaagtgttgaagtttagttagaaacagatgtagattggtctatttgattcataacactaaagttaaatgcacgagttagtgtaaactttgtatttatcttataaaagtatgtgtatagatatactcaaatgagacattttcagaagatgaaacagtagtgttgacaaaatatactcaagtatgtgttagtggatcacagcgcgttggaatacagtggtgatcattgggaataaacaatatagttggctatgtataaatgatctcaaagctatgcatgttaaccagaaatttcgagctagattgtgtaaatcagaaccaagattgtgaacagcaaatgtgttatctactctcttcgtcaacccttggactctcccaaaagacaatttgcttgtgatgtttttactttggtaacaaatagactcttccaaaagaaagtctttgagcttgaatacaaagttatttgcaacagaaaaaaaagaaaacaaacaaaaaggaaagtaaaaccagaaaaaaatgaaaaaggagaaagagacacatgttttttgcagctttcgcagtacaaaagcatcgcagaagaagctcctaccacttgaagatatttttataagaaaacatatatatgatttatttttgtttacatagaatctttatgttttaaaaaaaaatattggatagaaaatagttatacaaatcataattcttatttcttagttgtaactgatgaacgatttgattaattttattcacaaaacataggtaatctagttacttgtaaattaattttgaattgaaaactcataaaactcaacatagtaacacaatatgaacacacgttttatccaatccaaaccaaaaactgatatgatcaaatatgtatataaaattgttctaactggaccaatccgaaattgatattaaaatgagatcttgtgaagatgaaactgttggaagaattatccctaacaacaacatattattcgtttcagttttactttggttagtatttttagatcctaaaaagaaactcaaaattttccacaaaaaagaggattgattgaaatccatatagccttttttttgtaacagcaatacaatattatgggttagctataaagatggaaattgtttttattagaattttttttttttggttaaattattgaatttactttgtctacatgtatgtgtaaatgtacctcctcctcactttatgttggttacttgttgtgagtatatattatacgaggatcaaaccttaacacatgaggggacctagcacgactcttcgacacgttaaccaatcaaatttagacagcctttctatgttacaaagccctaaacttttaaaatattagaatttatgtgtttatacgaaggaccagtagactcggtccaagggttagtatgtttcttgctttctcttttttttttttgttactacatgcaacacgacaggtcgtctcttttaatcgtaaggttattgcatgttggtttgtcctcgagagtcgttctaaaccgaagtatggcggctaataatttccactgctggttaatcaccaggtttgcggcttcgtaccggtgaaatagaagatgttaatgtacttataaatctatgtaccggtagatataattcgttagttaatgcgtgatttgaatgatgtgatttatatgtgtaccgtgaaaaaaaaaatgtgtaccgtgaaatgaaaaagaaataactatgctcgtacatgtagaaagtaattacttgtgacaagacttgagtttgcataaattataaatcagatacatcaaatttataacaatattttattttgcatgacagttttgttttttgattttagattttttgttttatttttggtttttgatgaaaagagaaatgaaacgaatataaatgatcttcaaatgagttttagttaaattttatgtataagcaaataatacatgtacttggcagttggcagagagatcatatgtttgaacgatttttcttaaatacgtatttatgaatttcaaaacgattttcagtttcattttatgacacatacgaagagcatttcgatgcgattcacacccaaacagtaaactaatttttggcaatgacaaatatatttagattaggcaaatttttgagtgaaagaagggagggaacagaaccgagtacgtgttgattggtaataacaagggccactcattttatgaataaaatacgctataaaaagtgtgttttactgttggaaagatatttagccatgaaaacaaccataagtagttaaacacaacgcatggacattatgttttactgaaaccctaatactctacataatgttttagacttttagttcaaaacgattcatacccaaatactgacaccaatcaccatctcaattttggcaataagaaatatatttagatgtagcaaaattttgagtaaaatcagggatggaatggaacagagcacgtgttgatttgtaataacaccaaacgcgaggggccagtcattttataaataaaaatggtgtttcacttttggaaaaatatttagctatgaaaataaccataagtggctaaacacaacacaggcacattatgtgttactgaaaccctaaaactctatataatgttctagttcacagtgtctttttcaggcaaatcctaaagtctttgcatgcccttgatttggtagcgaatcaatttgcctacgtaggtgtactgtatatacttctttgttttttcttcagttttttctttatttattttagctctgaagtcttggaagcaataattacataagattttgttatggcacatgtgtagataacccttatcttatccctttttttttttaattcacaatgaaaccaaaaccagtttgtttttgatcaattttgctttgactattcttaagcaaaaataaaataaaatgattgaaacccacattgaacttaaactcgatttcaatacctttagtcattgagctggaacgaaaaatgtttatgatatttggtaatttgttaataaacgagaatccaaactatgtaatagtaatctaacaaaatcgaaacaagttactaagttagtcgtattttgctagatttgtttatatgatagcgaatatacatgtagagaaccagaagttggtcggcgttgaggataattgtaacagtacttagccgctaaccactgaattaatgacacgtgatctctcttgagtttaccgttgaaattaatatttcccacttgcatctctcatttctcaaagatgggtctatcattcaggctgtactatattctttatacacccaaaatggccaatccatttaaaaaaaacttttctccatttgaacactgaatcaatgtagaatgctaatttcttcttgttgtcaaaaactagactgttaattacttaattatacttttgcaacttgcaaggtagcaaaaagtaaaatcttaagtaaaaatatgaaaatattgtaagcattttaatgattaagacttgttatttaatggttattcggttgaatatagatattttttcttaaaactcttgacaaaaaactatatctcatacctcatatatacatataataaatattttattgaagactgacttttctatctaatatgtttcgaattatatagtttgtaggcagagacattttttgtttaccgcggacatgtctacgctagtgagggatttatacccaataaatctatatttttgacgttgaattttggaatgtaataaatatatatatagagaaagggtccctatagagaaatatacatatgcctattagatttttttttgaaaataaaaggtggttgtttgtcacaataccagccgtgaaaatagatatgaatatgatcgccgagtaagaagaggagaggatcatattttagatggtcatcaaggtcttgtcactttgaccagaactaaaaaaagttttcatcgtttaactatccttttccgtatctccacgtttatcatataataaggttcactacatgtgatgtgacctatcaagccatgtatgaggatttaatgatttatatactacagcaacttagattttattaattaatcaagagtttactatttttgtagtattacaatgctaaacatgatatgcaattaatctagtttttattctgataatcgacagatcgttatcaatacttctgtaaactcaattgatatttcggattcaactcatctttggcagtttttattcagagtacggaaattcagaacacaaataaacatgagattacatgcaaattttcttctttcatttttgcagtttatgacaatcatgaaactagcgtttgcgtgcagcggtttctctttgtgcgttaaagaagacggccgcgacagggagaccaagatcatactcgaccgcaaatttacgagtgttgaagtgatctctcgaagggatattaggaaagataacacgtctttgcttctgcctgaacagaacaaacacaaacctatgtatccctatgcttggccttggcaattcatagctcaccacctctttgcctatattacaatgcaaatatttttatttctatataacatgatatatgtataagtatttaaattacaagattcatgaagaggccttaccaaacgtagcatctgttgtgccgggaatgtttgtaacgatcctattgaaacattcaacaatactaatattattactttacagaaaaagttctgagaactcatggcgatggagatctttgaccaactcaaatgtatataacttacacccaaaaaaaactttattagggttataacgaaatgatttaaatgcaatgtatatggaatatgggcccaaaatgaaaagaaagaataaataaattaaacgtaccagtgcaggtgttcttttagaaaggggtcactaggacctggaacatctgggtctatcatcacctgttttgcatttcggttgagttttaccattaaaaaaaaaagactggaaaaaggaatgataaaaactaaagctacaatttataagattattgagttagaaatggaaaacttgtaagaggaaaaggaagtgagacgttttatatggttttttttggcacaatataaataaaaccaacattattataaaataatttaaatatatgtatttaccaaagtgaagaaggatctgagatcaccaccatggatctcaaccctaggcttggaggaaacagaagaaggaaagagctcatggccattggagacttgcttcttgttataactaacattcatcttagttgttggagtgaagaaatcaagaacatctcctaccactctccccattatcaatggctctatcactctagttcccatattctccattttcttttgttaacttagaggaaaagagagatttgtagtgatttgggagacaaagagacgaccgagacatctatttataggggttttccgtcttagagagagagagaaagataaaagaatcaatagacattaattcccaattatgtgtactaacctctttctcttttttttttctttttctttttctttttgtttgctttctcaaacatgtacaccaactatattaaagtaaatttggggggttttaataagtaacttattttaggtgatttaaaactataattatatttaattgaattaagaaatatcacttttttggtattcactatataattacgtttgacttcttcagcaacattgactgcttcagcaacattggcatatcatgcatggtttcaagtttcaacccctatctatgaccaagactttatataaataccatatcgatcgctagatttcgttaatatatagaatatcttttgtgtcacgaagaacaaaacccactaacgtctaaatttcgacaaaattcctagctatatatacctcggcgaataaaaagctatttttaagtctcactggtcgatgaattcaaaaagaatttcagtagaacatataattggccaagattaagatatttgtcataaaaacactctcatcgtactttgattctattacaactccggatacaattattgctcagagtaggcctgggcaaaaaaaccgctaaccgattaaccgaaccgaatcgaaccgaaaaacatggttcggttcaggtttggatagcttaaaataaccggttgaatattatatgtcttagatttcggtttcggtttcggttaggttaataaccgataaccaaatgaaaaccaaagcatatatgtatgatagataatatatcacagtatgtattgacacttaactatgtttttctctttattagtttgcaagttgaatttcgtgagttgtgaatcaggtgttttaatattatggagagtatggaccatctttgtgagttgtgaatatttctcttttttacgtacgttctatatcggttattggtcaaattttttggttgtttcggtttttagtcggttatttcggttttagtttatttatggttaccaagtttaatatccaaaccgaaccgaaccgaaagatatccgaaccgaaccgaaccaaaattcctcaaatatccaaatggttcttatattactataaccgaaataaccgaaaccatgcgcaaccgaaccgaaactgaatgcccaggcctagctcagaggctatttgaaagaaacatatcgcagatttgggactccttgctcgtggaacgacaacgcattgtcgcattgattcttaaaaaaacttctttttatcgaatcaataaaaccaacgtgaagaaccgattcttcaaattgggattctatatatgattattagttacaaaaccttaaaacttccgaagattttacgaatgcatatttcaaccataatactctattaatctgaaataccaaaagtgttatacaaatcagaaaatccgtagactaatataaacacacccaaaggttttgtcctattgaatataatgattattaacttattatggattctccactaaataataatttatttattttcttatattagaaagtcttgattgatgctttattaagatttggtaattaatcagaataaaggcacaaagcaaaatatatcaaacttatataaagttgtctacaacaaattctccaaacaagacaaccctttaacaatttagaaaaaaaaaaaaagataaatcgaattttcaaaaagaaaagagaaacatcaatgtgctcaatacaagtagacaacgtatcaacgacaaaaaaaaaaaaaaagtagacaacgtatcaactagctatttagcttaggtgaagcttaatccaaaagatgtagcaagcaacaacttacgacatgagtcacgaccccaaacccccccaaaagaatcttctctatccccggcctctggttattaactttggcgaccccaaaacacctctttgacgaaggaagctcttttggcaagtaagagccatagaactcaaatacgagaagcctggtcactatggtgacaaagtagggatgttatcaataaactaaagtctacactcgctacagtcttaagactcttaccaccacggatgaaatcaaggttggactcagaacggaccagggtagaagaaagtgattctgatgaggtattagctgctctggttggagtactactttaatttgaagcagagatttcaaacattagggtagaaacatatttgctttcaaattttatcttagccttgtagcttcctatatcagttttggttgatacatttcagagacattttggactcgattaaagcttcgattttcaattggaaaaaccaaaccaatataaccattcttctacgaatccaagatctgtggcgatggcaagaccacaccactgcttacccaagttataaacataacccaaaacacatgattcaggtagaacaagatggagaatagagcaaattcttgatgaacaatataaaaaagggatgaagagattttgaataccaaacaacttataaatccagcagcaattgtcttaaagcaacaacaaaattaagactccaaatgcataatccactaatccaatcaaagaaagcaaaagagaaataaccaaatgttttcttgtttccgcattttggagtatgaagaagaagatcaacgaagtctcctagcttctctctcagactcgagcaaggtgaggatatcaccttccctcactggtcctttaacattcctcatgatgtaacgatcagagtcggtaaacttcactcgaacctgagtaacctgaccccttgaaccagtcctacccatgaccttaaccaccacagcgtgcttgatctgagaatccattctgattcaatcaaccaaaaccatgaaaattcacattaaaacatcaatcaaatgcatacacaatcagtacacagtttcatgtaaagcaatcaactttacagagattatcacaatcagaattccttgttatgaaagtttcaatcttcagagtttctcatcgtaacaggagcaacactagggtttcaattatctaagaaaacaggggctaacttcaaataacagattcgatacaagacagatttagcagaagaaaatgtacaagagatagcaatcgattcgagatacaacagacaagatttgtaaacgatgaagatacctgtagatgaaggttgacggagatgcggcgataagcgtgagaggcaaaaaccctaattttacagagacgaaagaataagggatttctttgcattttataggcctgcttaatttcggtactcggttttcaataaccgaatcagttcagttattttaattttgttttcgcccagccggttcaataatttggattgaccgaatccatgcttttatgtttaatttacaaatccaagcttaatttatcaattttgtatttgtttcattgcttcttcttcttcatttttttttcgttaaagatggcgttttcatttactttggtttatttttctttggtttcaattacactttacgataaaattaatcactgaattttaatttaagaaaaacaagttgaatttttggaataacaaaaaaaacaaattaaaaaatttgtatgataaatgtaaaaagacaaattgaatttttagaatcattaacaatcaaatgacgagatttagaatctgattagttctcacgtcgtattctaaatttatcatccaatgttttattatttaaaatttcgaagaaaaataaatttcaaataaaaaaacttgtatgataaatctacataacaatgtaaaaacaagttgaatatttggaatcctaacaatctatgacgggatccaaaatccggttagttttcacatcctattgtaaatttatcatccatatttctattatttaaaattttaaaaactaaaactaaaaagataataagaaaaataaatttcaaataagaaacttgtatgatagatccacataacaatgcaaaaaaacaagttgaatatttagaatcgctaacgatcaatgacgggatccaaaatccggttagttctcacatcgtattgtaaatttatcatccaaatttctattatttaaacttttaaaaacttaaaaaaaaaaaaaaaaattgtgtgataaatctacataacaatacaaaaacaagttgaatatttggaatcgctaacgatcaatgacgggatccaaaatccggttagttctcacatcgtattgtaaatttatcatccaaatttctattatttaaaattttaaaaaacttaaaaattatataaaaaagttttaaataaagaaatttgtatgataaatctataaaacaatgtaaaaacaagttgaatatttggaatcgctatcgatcaacgacgggatccaaaatccggtttgttctcacatcgtattgtaatttatcatccaaatttctattatttaaaaattaaaaatgctaagaaaaaaattaactttaaacaaaaacttgaataaaatttgcaaaaaaacctttgaagagaaatggttgagaattaacctggcaatgggctagtcattgtttgatgggctggaattgttgttgttgggcctctgagagcacgctcatgtgatcatctgtttccgttaccgccttaccgggaaaacgaatcccccaatctccgacgatcgctccacctcctaaatctgtcgccatctccgtctccggagagaacctccaacatcatgactcctgaagccgctaactccttcgaatcgcctccgtttctctctgtttctacggtgagatcatcacaggcaaacaaattaagaatgtctctctgacgtttatatgagacgacgtgatgcttgtgtgtgtatgatctctctcgtcttattcatagctttttaagagaacagagagccgttgtatatatgatgagtttttcttgggccagaccaacgaatgattctttttaaacgaagggagaagaaagaaccagggcatcatcatctcgaagaagagaattgaaatcagagaaattgcgtctttagactcgaggagataacaggaaacgaggtatatttataaaacttatatgtttaagaattgagactcaagttccctttttttcttcccaaagtttccttttttccttttcacttagggtttgtttaagtccagactccagagcaaacaccaaccttaggttcggtgataatcaatctagccgttatacacggttcgggttaaaccttagaggtttggtgataatctagccgctagactcaagtttcctttttcccctttcacttaggaagtccagaccaacctttggttccgtgatatataatctagccgttatacggattaaaaatttccatttactagctgatacgctcctataaattgtattttgattgtattactactaacgcattgcttctcattttgatcacgttgatctattgttttgcagaacagggctaagaagaacagaaccaaagtatagcagtcttaaagattttttcatggtttgaacaaataaaatcacattgataaagatgcttccacaatacctcaacaacagaatgaacagaagcaaacaccaaaaagtcttcataaacattatctataaagaacatgagatatgtgtcccaaaaaacaaaacaaaagagaaaaccaaagaaagaaagtgacgagatttaacaaattatgttaatatgtagtcagggacgactttttagcgttgttgatcttactattttcacagacaaaagaagaccagagcccatccttcttgtagttatcaaacaaagaatccatgagccctacacgttgccttggtgtgctcagtgatctcatcttttgcccttgcagactctgtcacactcatgtaaggctgcaaaccatcggagctttgaaaccagctctcgtcctccactaatagactctgctccaaacggctgaaaaatctccttaggaaagaaaatggagagtcttgtctctacaaagttgtaagcttcacttttgtaggaacaagcatttcacttggaatgagaaattagtttatggattttgcagacttggattgatcaccccaatgttccagccgacagcttctcatccccatatctttagtgtacaatgactccacaagcatatgaggacttcttctctcctaccaaactgttatatgtaatcaaatgctctgcttttggtgtatctacaatgtctaaacaacacattaaggatgatatagaacatttatttcttactggaaataaaagaacaagttttgcttattacaatataccaaaatacagaaagaacaataacattttgagaaacagacacaaagaaacaaaagcacaaactcatatctcaacccctctctcccctttccttcttcatcttctttctttcagagccttgagacattgatagggtagtgagctacaatgtgattataaacagcaagtgtaagaaaatcatcaagctcaggtgcagtacactgctttgtaaacatcttgcaagcttccttatacattccattcttaaacttgtctttcccaacttctttctcaattctttccatctcttcttcgacaactctcccaaacaactctttactcactcgaactccaagcccgtctccatcaagttccactccatacctaatccattgccaattctggacacggcttatctcagccgtagcagcatcttccattaggttatagagtgggacagatcctgatcctgttaaccatgcggctaagtattgaattcctacacgtgtgttcagccttaaaccctcgagtgtacgcactcctcgcggtatttgaagcagatcttcctctgttattgcggctgcgtcctcgcgcttcactgatttgatttggtttggactttttcccatgtgaccagtgaatgcttccatgcagattgggatgagtcctggatgagccgcccatgttccatcatgccctgctcttacctctctcagcttgtctttcctcactagatccaatgccatctcattcgcttttgggtcatctcttatcggaatctgagccgcctgatcatcataccaccgaacaaatcaaaacattttcaactttatttataatgttttcacagagcattcatgtagtttgaaagagacatatagtgaactagtgttaagaggggactaaccatgccacccatggcgtggacaccgcgcttatgacaagtacggatgagaagatcagagtaacttctcatgaaatgctggcccatgccaactaggacacggtctggtaagagccggtcagggtgagcttggaaggttttgacatagctgaagatataatcccatcttccacagtttaaaccgactgagtgatcacgtagttcatagagtatctcattcatctggaagacagccgggagggtctcgataagcacagttgctctaatgcttcctctctctatcccagccatcttctcagcacgctcaaaaacactgttccatatctttgcttccctgacaagaaaccaagtaacctaattaaccctagaccgaaaaacatcaatttgatgaccgaaccaggaaggtacctagaatgttccattttggggagatagaagaatggaccgaaaccggaaccttgagtctgtctaaatttggcgtagttgtggaagaagtaaaggccaaaatcgacaagacatccagtggcgggttcaccgtcgatgaggatgtgagcctccgggagatgccaacctcttggccggacaaaaagcttagcggtttggtcgttgagcttgtaaactctgttccttgacttgtcgtggaacgtaatggatccatccactgcatctttcaggttcacatgccctctcatcagattctcccagcttggagacaaagcgtcctcgaaatcagcctgttcaaaccccaacacaaaatttacttaatttggttagtttaaaccggatattatatacagcagaacataccaaaccaaaccaaatcgacttgtatcgaacatagataaaaacagaaccggatcgaaatacaccaaaccaaacaaatttgatattaactagcctgccagaccaactaaatttggtcaattcctctgaatagtaaattcagacataaatataacaaaaccaaatttaaactgataccaaattgaacgcggtccaattaaaagtttgttacagtattattcaaaagtttcaccaatgtcggtcaaatccaatccaaaccaactaatgtgttgtataaagagagagtgaaagaaaatggaccataaagactttagctccggagttaagagcgttgatgatcatcttcctctcgaccggaccggtgatctcaactctccggtcagcaacggcaggagggacggaggcacagctccaatcaccgtctctgatgaacttagtggaaggatcaaacccaggaacggcaccggagttataacgccgtcttgcctctctccggcactccatggcatacttcacatggccacgaaactctctctgtaactcagccacaaagctaagagcttctctcgtcaaaatcttggcgaagatttggtcgtaccgtcctcgaacctccacaccatccggagaatcataaacggcgacgtttggtcgataaactgaggtctcgagctccatatttatttttttgtctaaattttgtaacgtgatatagtgatatataaatgtgatcgtgtaatatgaattataaaggtggaaatggataggtataatcggtgaaacgcattgacatgtgtgcctccttgggaaagtgtgccaagttctgtatgattttcgtcactatatcggttaggataggattatcacaaattttctatttataataatatccttttcgtcaccatatcgttttcatcatccaatacctctggctctgcataaaacctaaaacagttttagttgtcatgcaaattagtttactgattgcttctattggatgatgagaccaaaacatccttgttaacggattgattcagataaaatcgaggcactgttttgggttcaatccaaatgttttgaaatttggtcttaaactctttttttttttttttttttgttaaagtggtcttaaactcttaatatcccaatatgagatattgagatacatgaatgggagaagtttaatttttatcaacatgctgtaagatctggaatcaatcggacttgtaggtgtgcttgggccttggaattacccatcctctataactttatattagcccatttataaattagttctactgggttggtggtgtactggtgttcaccaaatctaggaaaattaataactgattgattcagataaaattaattcttgtaaagacaacggtcattattcttaattcttattttttgactgcatgataacgatcatattaacctattaaggggaaaactaaacttcacaaagataaagaaaccaagtatgactctcctaatatttctccatccttgactaaatataaaagtataaaactatcatgaacaactgaacaaggttgccaagttatatactataccggtttaataagtcaaaagctatttcatccatcagttttagatatcttgagagacaagtgcactaacaaaataatcgtagcccaaagtccttaaaatcattgatattatcttaattattcagtcacgaagctaaacacctaatgagaatctaaattaaacaaatctggtgacaaattcttaatgaatgatacccattgatttgaattgaatcttaaaaatgaaaaaggtttacaaacattagaaacaaattccattaaactagtagtagtacacaccaagagcactaaacacggctttagaaactctctctcaccaaatcattacaaaccaaaatcaacccttcaaaagtcagcctccagaattagggcaaaactgattctcttttttaagaacaaattggacatagaaccaaaccattctcattacacttcaaacacttaaccatactcttcttctcttcctccctaaccttgcagcttccgttgcaaacaacacacatcataaatctcattcctccacatccacggcagcaactgcctccaagcctcgccgccggaataccttcaagtaatattcccaatttgccctcctcttctaacctcatcacttcctcaacacttcctaccatcctccctttaacgaataccgcaggtatcttcacatgtttcgttcccataatgcccctgatctcttccttaaaaaccgagtgcatcgacacatctcgctctgagaatcgaacttcgtgtgaatctaatatcgatcttaccacattacaatcctcaaacgtcttccgtatccctctaagagttgttatgtagatcaccacagagtgctctcctcccggtggacatttctctgggaacttctcaagaattctctctgttttctctgtttttctgctctcgtgcaccaccggagaaatcaccatcttgatctgttctttctcttgagacaactctctttcgtaagaagccacaagatctggatcaaacattggactataactcttcctcctctgcgtaaccgtcaccgaagattcttcagatttaagaggaaaactcaaacgcattacacctctcttcggtgtttcaagaatgttcttcggcttcagaatctgattcggactcacacctctcgaattattctctttccctccaaatctcttactacttcctctcttcggagattcaacaaccgatttcaccggagtcttccatgatttaccgaaaataccacgagatttgggactaatcttctgtggattagaaacgtgcattgaatcttcaagatcttccataagctcccaagtattgataatctccggatcatctctcttaatagatcttctcggtatgatttcagattcaaagacttcgcctttagtaacttccagtgacttaggagaggtctctgctcgttcatcgagatcgagatgaccataagtagttgaagtaagagagacaatgtgatcgccgccattgttgactctaatctctcttatgagtttcttcttgcctagtttcgaagaaacacaacccatctttctctctctctctctctgtctcttgttttttttttactgaggaaagtttttatttttgggaagaacagagagattgaagaagaagaagagaggagttattttgtttttgtttttaaaacaatttaattactttcaacggtcatatttttcgaacggacgttgtggaagtgtaagtggatcgaaagatttttgtcggaagtccctgatctttatgttttattacgttttaatcgaatatatccttaaaatgttatgattggacctctgatggtagtacttaaaactcctgatttatttcatttttctccctaaagtatttgtttgtttagttttgaccctgtgactcttttatttctttgtcctagattctttcaattgcagactgcaacggtctattattgtacgttaagcgaacgttaaacgctttccaattttacctgtccttatgaatttatatatttcaattacaaaagttgaccattcttaattctttattgtataaacttatacgtaaaatttgttgaaatattttgataaaattgttggaagcaagcttacttaataataaacatataacaattttgtgttaaaaccttctcaatgtatatgatttttgatgatatcaataaattttgtaaaggtaaagatgcaaaattgcaaataattaagttacgtgtagcagttttattgttattttttactaaagagggacaatatatagaggaaaaaggagggcatgctaatttcaaagtaaacaaaaaaaaatagaaaatctagaccaataccatcacccaagattgcactttaaattaaaagattgataataataacagaatttgcatatctgaatcataatgccaccatacagaaacaaaccgtgcttagcctttttcagtctaccttttgtaaaaggcattcgttttaaaataaaattttatgaggcacaacaataaattgaatttatatatagtacaaagaaatattagtttttgataatcgttatttcttgaccctactaatgttggcacaactatatttccctccatttatgtataaattggattttcttagcttaagatatcgataaaaatgtaatcataacaagcaattaacaaacattattcataacaacaagtgcacaaaacgacacaattcaaccactaacaacaaacaaacaatttatatggccatatttcgaaactttagatttgaatttccgaatttgttttagtttattggttaaataactaattttggaaaaatctatatacaaaaggacacagaaaaagaaacaaaagatgatccaaattaaaatttaaataaaacggaccacaatgtgttgactgttgatagacttttgtaatcatatataatccgactcggaccacttgtagttctcggacaatcagcatgtgcctcttccagtctcttttcatccatcccatgattttgtctatttatttattttaccaaaaaatcagctttaaaatgatagatcatcatcaccttcaaattatgtacaccgaaaatcaaaacttggaggattattgtcacaattcctttacttatatataagtacatgtcttcatttaaaacctctacagataactgcgttcagtttattgttggaacagaaagtaggctgaacatacacacaacaattaacatatatctatacggtataaagtgaggaagacgaacacttaggcagcataagtttgcttgagatactcaacaatttctgcactctcaaacatcgcgactccagtgtttggatcttccaggtaaggcacctataacaacataacacgaccatcagtgtcaacatactttaaaccttctcctctctttctctaggtatgtatttctctaactcacctgaaagtgaccagctttctcaagcaatacctgccgtttggggctaccacgagcacaactgatgaaaaagaacaagtaaaagggtagtatcaataaaagactgactttgaacccttgaagaacagatggtggaactggtctaagagactaagagtcttctttttgtggttgccatacctgcgctgaatgtgtggtaactccagttctacaagaacttcgcgtacaagcttacaaaacggagaaccctgcagggaaattcaagtagagattatttgttaaataagattaggtaatttgatgattgggaaaaagtgatgagatcaacacctcatatgcccagaattcgagtggcttaggtggtagtttcgctggtgtgtacaagttaccctgcgtggtaaaagctcaagcattctgtgataaaaccgttgcttataccaatattgtatcaatacatagtattcataatagagtttcggtgatgctatgctacctacccaatttattatagcatactcttccgtaaagaaacatttgttctttatgaagttttcttttcacattattgtctgtagagaaaatatgtcaaaagaatgtaatggaatttgttcttacctttcccatacgaccaatcattgcaaagcctgctgttatagcctacaacgtcaaagcagcaatgttagttttaagctccttgattctgaagcaaaggaaaataaactgcaacatgtgcaaagaaactgaccgttaaagcaccaagtgacagacttaaaggaactgttccatctcctgaataagtttaaccaaacagagggaaacagtattactcaaatagaaatgatgatgacaaaaaatgatgctattgcgataaccacaaaaggatctctaaaaacaatcagaatcaggcataagcagagaaaccaaccatatttctcggatagatatttgatgattccatctgattcatacatggacactccggtattgggatcaacctatgattaaagaaacattatataattcataaatacagaacattaaaatcatatttcttaccgatgaaagtggtggtaaggtaacagaaggagctttaacagggaatataagaatataagctcaatttggcattctaaggttttaggcagttcatgaacaaaaaagaacttgatattgcaaaaatttagcaattacagatgtattcttaaaccacattcctgtgattaacgcatcatgaatttgaactcgaagcaaggacatttcaggggcaaagacaattacttccaagaatggttttcgtgggaagaacgaaaaagaaatagaaaaccattaggataaaatgccaaaccatgtacggaaactgttgtttcccgcccatctgtttaaccttcgggcggaaatttggactccctcttggacaaggatagtagagaatatcaagatccaacactgcaaccatttccctgacctgcaaaaatctccatattagtagagttcactaagctgttgcgatacatcaagaataactacgaagacataaattttgtttaaggggaaccagaaaaaaacaaagaagcaaaagctaaaatgatcagtgggattcgaaaacttattttcatggtatcaagcaaagattataagtaaaataaaatcttcaggatcttagctaattgtgaaacatctaagacaatcacattgatcaagtaaaaaagaacaaagcattaccttccggcagaagggacagcttcattcgcataccggaaatggagaaaaagaaatcattcattcaatatcaaaagaaaacagaaaccaaatgtgtctaaatgaacaatcaaacacacagtcattatatatacatacccttcaaactcatatatctcaatgggtttctcaggacgaggcccgaccttagcagtttcctttaccgtgatccctacacatcataacatcaaccattatgattaccatctatgcacaaactcctctgaaacaaaacaaaaaagtccacagctttgaagggaacttttcgtaatgcatcaaaatcccttctaataacataaaccactagacacagaaagtgatcatgattaccgcctaaacgcaacgcatactgatcagctggaatctcttccttagacacaaaagatgcagagtacctactcagatacaacaacgaaatcaaatcaattcaatgcagataacaacaattgaaatcatcaagctttcgactgtgtacacactcaactcaagctaaaaaaaagaatcaactcaatttgggggaaagagaaataaacgattacccagaaacgaaaacaccagtgccgaatcggaaaaacaatccaattgctgcacccaagacatcgaagagttttccggatttgacggcgaaccgttttggctccggtggcttgaaaccaggaggagcagtgaacacaacaacagctccagtgtcgtcactggtcttcgtggagactgaaacagactcggaaggttcagaggaagaagctttgaccataactagggttcgaattgaacttcttcgcgaagaagaagaaagcgatcggagaatcggaggttgagggaggatattgttcactagtatccccgccatcgatttttcttcttctaatttgtttttggcaattcatttattttaacgtcgttatatcacacttaatgggccttacttttgggccttaagagtcataatttaggtttccaatattttgctcttgacttgttggagtgaaaaaatatgagcgttgtgaaacggtaacatataatgggccttaattttgggccttaagctttcagagattttttactcagtaaacggatcaaagagtcttaagtgcgtttacgatttttactattgttctaacgtatagtttgatttgacttgttgacagtggaaaaaatatgaacgttgtgaaacggtaacatttttcttcccgtttgaaattataatattttattggaaagagattcagataatgcctctctataaatactcctttcttgaatcagaaatctgaatcctctttacttggttattttcttacaaatgtcgaatacagtctttttttttaaaaaattccgttcttctactttaggagttctcgtagtcaaacttgtctacattgctcattagccgagagaaacaaacataagcatcctctcttacaaggtaaaaatactcttgtcttagttattctagttttttttttaatcatataaacggttcttgttagcttatagatatgttcttcatctttttaacatcttttatggagttgaacttggaatttaaattaatgttctgttttatatacattgctgtcttgacttcatctatgaactatgacatacactgatttttagctacatatgtgtcttaaataaactgaaattttatatctagatatatgttctttttgttgctgttgaaattaagctagatatatttatgttctgtctaggaaaacatagaatgaagattttagtttttatgtaaaacataggaagaatgggttttaatttttgactgaaatgtttgatttgtatgtaaatgcatgtgcaacggaaaaaacgaaatactgattttgattaattaattttgcagaaggttgaagaagggaaaacgaagccttgggactatatccagtattttccattttctgctgtgccagcctttgaagttgacaagactgtgcaatattttgtattttcctctttctttccggataaagatacatgtatgtatgtagatgtgaatgataatgtttagggtgtgaatgtgtagatgtatgatagggtgtgagtatatagatgtatgtttagggtgtgaatgtataaatagatgaatgtttagggtgcgatggtttagatgtatgttagggtgtgatagtatagatgtattattagggtgtgattgtatagatgtataaatagggggagattgtatagttgtatgtataggttgtatagatgggcgtgtgagtgagcatagcgcccaatgcgtgactagtgtagttcctacagcaacctacaacaaatcgctagacacacacaagaaaataacaaccactctaaaataacaaaaacaaacaaaccttggaatgacagtcgcccaaatgacaggtacccgaagcccctatttaatgaatttgaacctgacccgaaatcttagtttattttaaataactaaacacgaaaaacgtgaatccgaaatactcgaaataaaacttacacacacaactaaaagaataaagaaagttttttagtaacaaaaatggtagtcgaaacattaaataaatcttaaaagcacaaaaacagcaaaataagtctaaaaacagtaaacaaattttttagtaacaaaaaaggaaaacaaacgaaacactaaataaatcttaaatcgcagcacaaaaacagcaaaataagtcgaaaaacagtaaacaaattttttagtaacaaaaaaggaaagaaacaaaaatgttagtttcgaaacactaaataaatcgaaaaacagtaaaataagtcgaaaaacagtaaataaattttttatcaaagccccaaaaaaagaaggagaataaaccattaaatgacaaaaacacgaaaatgtcattcgaaacaccttaaaatgccagtcgaaacactaaataaaaaccacactaaaaaatattataatgttagtcgaaacactaaataaaacttaaaacacagcacaaaagaagcaaaataagtcgaaaagtaaacaaagtttttaccaaaaccccccaaaaaagaagcaaataacttagtcgaaaaacaaagcttgattcaagacatttcataaatattggaattaaataaaattcaataacaaaatctcaaattatggcaatatataacaaaattatgtaaaaaatggtcgaatccccaattttgaagatgattaagagaattttcctattagtagtcctgaaacttgaaaaaatttgtaagaaagtgaatgtcaaaatggaacgatcactaagtatataaagagtaaagactaacacaatcgcatgtcttgaataagccaaaaagtaagaaagtaaatacaacaaaaatccaaacgaaaaacatatactccagatattacaatataaatccaaatgaaaacatatcgactccaaatattacaaccgtttaattttttattttcttttaggtttcgaattggttgtcactaaattcgtaaaaagcaattcatgaatatatactataaatgaaaaatataaatttcgtaaataaaatttccacacaaaagaaaaacttggtcggtttgaaaatatattcatatcaacttggtaatctatttctggttttttggatcaagtcagatgggaataaataatcatgattagcattaaaactaatcaatattaagcaaaaaattctaacttttcctttatttttctttcaaattatcaacgctattttcatttcatatagacttatttaatgaaacattaaaaaaaattgtttcatgtagatatataccctctgatatttgacaagaaacatatatataaacttaaatcaagattatctgagcgtttaaaacttggtagaagcaggcaacagcaatagtttttagaaagaagtctttggacggtgcctaccaacagaaaactgccacgtgttgcaagtatatttgctggagcctagcacgtgagccgaccaaaagcatgggaacttaggctgagaaatctaaattccttttgccttcgtcacttcgtgttttgtccaaaagggatatcacaaaagaaaaaggctctgtactttccaaaagagaatgagaatggaatctcaatcttgactgaaattgtcatttatagtaatccttatctgggtttgtgttgcttctttttgggtaaactcatttcgttacaaactacaacagatagcttacattattttcttaagttgaattacatactaagataatgcgtacatgatttaacgttttactgtaatactagctaacctgtgtatacacgagctaaagcttgtatgtgtatatatactccaatttatatatgaagtacatggacatagtttgattagtagttttaaatagtttgaagataaaaaaataaaaataaatagtttgaagatagtttggttatagagatatctttggtagggtagtgtacaataatgtataattgatagtagtaattacatgattcctcttaatcttgagaactaactttatatataacccaaaaaaaacacattaagagaatactataatatttgtaaaaagaattttcaaaagtgaaccaaagcaaatcatttgttgatttggcctttgaatgtgggctgcgtttgctctttgaaaacaatttttttcctaggacatatatgtggtgacaaattagagaaaatgacatccatatacaaacactatttctaagtccgcgatcattacctgtaaaactagtgcattgcattcaccaaatttctgcgctcttaatcttttgttgttgtttctcctaattttcgtatgtcaatcttgttcttggatataaaaaattagtttcaattttaaagaataagaaaaactgttctcgctataacataacttcctaggttagacatactgatgacatgcatatgattttttttttctaccattaaatttggagtttgtcgaatatttttaattcgaaaattcctacaatattctcaattaagccagagtaatcaaccaatgtgcttagtttcatctgaactagtcaacctcttcggtttcatagaaacctaactcccctcgccaattcgatttgcagtcgatttgattgattttataaaatttggttattttaaaagtgtatccccacaaaatctagtggacctttggacatgggacaagcatggtgagttgccactagtaaggttttttatatataatatctcagtgtaaagaataaacatatatatctaaatgtacaatgaccacatacaaattatgtaaatgtaatttaactattgcaaaacgtctttagaaattagattaaagaagagtatgtgaataatctatctaaaaaccaattgtctgaatcattaacgaatacttaggacttggtcaaagttttccaaaacaaattccaccgattgagaaatgtaaacaatttttctgccaccaccactataagagagctaggaaacgcattcaatgccctacgttagtaaggaaaattcaatgtcatgcactgtatcacaaagtcataaacatttaattgaaaccctatacctagctagatagttcttatatacccacccattaccagtttttatttattaatttattatttaatagattgtgatgaccatacctatacctttcatcttttagttttaacttttacctctatgttcgttgtcacactcatcttttaaagtcacattcactttctcgtctcgagttattagtaaattaaatcgaattacgtttcttgagatcatggatattaataaaattgattttgtctcatacaaatttatttgtgaaatcatatgaaaatatagaacgaaaaaataatatagactgcattatacgttcgtctttaaaattaaaaattaagagggcataacgcgttacgcgtgcatacgtagtatttgtatatgtaagattttaatgtataataagctcatgttgcatcttagtatgggcatgcaattgcaagtgtatccataatgtttttaatttgtccgtggagtattgaacatgatctctaatttaaagggatacgttttttatttttgacgaatgaatatcaatttatatagtaaattacacatgacatgaatttttttggatttgatttcgaaccaaataatttcttcaagtatatgtatactaggaataataaatatcttgcatgggatcattatatcaaaggcgacacaacttggaatcgtgatgatactaagctcacacagtcgtaaatcgtaatattaaatacgatcatcatgtacacttgcaccgccaactcatgatcatgtaaaggatacattgagtaatgaacaaaatgcaccaccccgaccacaccaccccacccactataatatattgaaggaaaaggagagaaaaatcaaagcaggtcccacttgataaaatggcactaacgaaatcccaaaaaactcttataaatatacaatttgtataatacaaacacaaatctccaagcaaagaacaatagataaacgaaaaagaaaaaagtaagaaaagaagaggaagaagaggaagaagaggaagaagaggaagaggaacgaatatggggaactgtttagtaatggagaagaaagtgataaagatagtgagagatgatggtaaggtacttgaatatagagaaccaattagtgttcatcacatccttactcaattctctggtcactccatctctcacaacaacactcatctcctgcctgatgctaagcttctctctggccgtctctattatctcctgcctacaacaatgaccaagaagaaggtcaacaagaaagtgacctttgcgaatccggaggtggaaggcgacgaaagattacttagagaagaagaagattctagtgaaagcaacagcaatatcgatggtgatgacaccaagaacgtaactgttgtaagaatgaagatcgttgtgcataagcaagagttggagaagctacttcaaggagggtcggtccatgagatgatgtaccagactcttgagaaacaacttttacttacttcgtctgatgatgatgatcttgaatgtaatagcggctggagacctgcgttagatagcatacccgaatctgaaagtctcagaagaacataacagatagctcatatatactcaaaaaacagtttgagctttgttcaaggaaaaacttgtttttaggttttgtttgtaaataaagctttaagctgttataggaaaagactgtgtgatattgatgataacactaagactttttgagtcaagctttttgttttccaagtaaatttaaatgaaaatttcatccatgtttttccatggattgagaagaactcaataggaaaagtaacaaccatgtattagatttaatataacatgaacaaacatttatatgcacttattatttatcatatgtttcagaaccagccttagtttcttgctcatgtctcttcaaatctcttcatcagtataagattaagttaattttgttcatagtcaacaaagaaactaatgtgttttggtaaagtaacgaccactctatgttgaaccgtttccggtttaagatattctaaccggatgattgagagtcgtaccgattggtttgaatcggttttggattttgctgctctatcgtcgtgggagagagataatcatcaatttttccaggcaaaaagcttcgattttgaaccatataaatcatctcccatggcggaaatcgaagtctttaactaaagaagaagaagaagataaagctttgtaatttatagaatggcgtgtgtatcgacatgcttgattctctcccctaggttaactcaagtgggtttatcatcaaagaagccttttttgattcggctcagatctcctgttgatcgttactcttttcccagaatgttaacggagaggtgtttgagcactcgtcggaagtttaatcgccatggaatcgctgtggtgaaggctgcgagtttagataaggttagcggcgcaatcaaaccaggtggattggtggagagtgacaagttgccgactgatgtacggaaacgagcgatggatgcggtagatgagtgtggccggagagtaactgttggtgatgttgctagtagaggtggcttgaaggttactgaagctcagacagctcttcaagctatagcggctgatactgatgggtttttggaggtattcgctagttcaatttcatgcccattaactcaaattgagatgctttgaggagagtctgatataaagtattgatctttattaagtaggaaagtaacaatacattagaaatttgaatagctgtcatgagaatagtgtattgatttgaggagattttgatagaaagtattgatctttacgcgattcatgtttcgttttagatgtgtgaagttgctaaaatcaatgaaatgtttccttcattcaggtgtcggatgaaggtgatgtgctttatgttttcccaagggactatcgaactaagttggctgccaagtcgttaaggatacaaattgaaccattccttgaaaaggcaaaggtagtattttttttctgttaagatttattgatttccttttaacagtgaattgctttgaatttgaatgttctgagctctattatgtgtctcgcagggtgctgtagattatttggctcgtgtttcctttggcacggcgcttatagcgtctatcgttattgtctacacgtcaattatagccctgctttcaagcaaaaggtatgtgtttgccttgaccgcaattaagttgtcttgttatcaagatatattatcattctgatcaatggacttgatttggattttgcactaaccttttttggattttgttaaaagcgaggatgataatcgtcaaagaagacgcgggcgcagttatgattcaggattcaatttctatatcaaccctgtcgatctgctttggtaattttaatttcatgatgtaaaaggctcctactctcaaccaatagagaggatcagtaattgatttaacagaacctcgtagtcatattctagtgtttttatgtaaggtactgggatcccaattattacaacaggcgacgagctcgagaagatgaaggaaagggaatgaatttcattgaatctgtaagtagagtttgaacttaagagagttttcatgctttgctaaatgtttcttcttttgctgcttatgagtgataatggcttgaaataagtgagggttcatctctaggttttctcgtttgtatttggagatggagacccaaatcaaggaatcgaagaagagagatggcagatggtaatgtgctggacttgaatttacttatgttttctatatccgtttcaggttactattcgataatgttttattttatttttcaataaaagactactttcgacatatctaaaggaaatgtagtaaaatgcttttttaaatcttcttttaaaggttatgagtttaaaagtacatcacgctcatataatgaaatattagtaatttactcgtttttgatacttattctcagattgggcagtatataacatctagaggaggtgttgttgccgctgatgaacttgctccataccttgatgtgccatcttcaaagagtgctatggtatgttttgcttattgtttcttgcaaagggagctaataaactaattttgttatgctgctatctatctttgtatttgtcctttgtactcctttacctcttgcgctagttgtatcactaaataatgtgaaagacataccgttcagcttcacaagttttcttttttgatgtttacagaacgatgaatcctacattctacctgttcttcttcggtttgatggtcaacctgagttggatgaagaggtatacaaatcctctttctggtgtcttgaaatgtgatgcccaaatgtgcatgatctgcagggttttcattggccatttttattaacaattttttcatgttgcttagggaaatattttgtattgttttccgtccctgcaacgtacagcttctggatctagtagacgaaaagaatatgtgggaaaatggtttgactgggttgcagatatggagaaattcttcaaggagaaaaaatggcaatttaggttcttatcgttgtttgctcctggaatttaatatcttacaaatatgagaagttttgttaattgcttttgtggttcagttcctgataatggaattttcgttcttcacagtaaaacaagtacatctgagagagcactggtcattggcctaggtgcggttaatctctttggtgttattgttctaaacacattgctaaagtaagctcctcatagatttatactctacctattattccctagtgtgtatatatataaatgtctaacgcaaccttgtttttgtgttcgtttagcgagatgtctgtcaggccaggtggatttcttacatttgttaagaacatatatccactacttcaggtatgatttagtttctgttcatatggcaaactactatcattaaattgtttcctcattctggttcttcctattcgctttaaacatgaatcttatgggagtttctaagcatgattactgacacaaacaagttcttaatagattttattttcgtaatccagatgactggtctttgtttgaaactttttgactaattatattgatctcattcatgactgtgcaaacgactattcagatatacgcaggttcattctttaccatccctttgattcggtggttttcaatcaagagaaagaataatcagatagagaacagaaacaaagctcggctacaatttgctcgagcacttgaatctccagatatcgcactacggcgtaaggtaggcacatcagtagtaacataaatcttgggagatgtttatttggtttctgcccaaacatgctctttattccaaagaggagatagcctcgcactacattttccactagtgggtaaactcttgccaactaacgtcaagggttaggttctgaatcgtctatgatacctgcatatctgtgggagatctctttatgtgattacccacttttgattgctttatgtgactcttttcttgccctctagcaccagccagactaaagcacatttcttggattcttttcctggaaacttcatatatatgtttttttcttataacttgggagttgtgaaataacgccttgaaatgatgcaatgcagctacttagtgcaagggatatggctcaaaaaacagtcatagggaaggatcggatcgtgtacagtacagatagagatatgatggaacaaaactatgagacagacgaatgggacaggagattcaaagagttagaaaaatcggattgaaatgtgaaatctggtaagtgaatgaggcagtttcacagtttcttgctgcaattacaaataatgggtttatatgaatcatgtacatctcttaatctcaatattgacctcatccagttttgcatttgacttttagggacttgtgaccttttgctgttatatgctaagttacgtagcagctcacacatcatccgcaacacagaattttcccaacaacgtaaaaacattcatggacgctggagttaaagcggatgacacaagccatggcacatactgtttagacattcttcctctctctgagacagaaaataactggtttatagaggtctcttaagctctagtggtaatagaccattttgtgatgctccgtaacacaacaagcttggtcttgtttaaatcatccaggagatccaagtattgcttgttcctgagagttactacaaatgcaacaatagattatgtacattaatttgtatatacgaaagtccaaattcttgctcataagaatgaatgttcaatgtattatcttcctcttcactttctagagaaaattgatgaattactcatcatcattaatttgcaatttaaggacgaaattgatttgaaggggattaatggggccaatttggaaaatgtataaaaatagtgggagcaatacagaaatagatgacgtggatgctaaaagtagcgtggtcttcacaacaccaatctttctttcgcctccctccgtcgtcgtcaccaaggtagaaaatttcgttccagagaaagcttaaaactttccatggagaaaaaatcataaaactcaattaattgtagaaagagactgagagaaaaaaggttccgaaagaattaaaaaaaactatgtcaagatctctggtgaaacgcgttgctccttatttggctggtcggattagagaaaatcatcgattgcttaatttttcttctgcttctgctatcaaagaagcatcttcttcttcttcgtcccaacctgaatcgtcttctaatgatgtagtccatctcagcgacaattgtatccgggtatgatatctgctcttttgaattgatctctttgcaattcgatacactaggtttttacgaaattaatttatattggatttttgctctaatttgacggctttttgatgaaaaagtaacaaaaattcggtttgtttcgaacacccatagttcacacgattctgcagaaatggaaaaaaaaaatgaaaaccttttcacttgttaacttgcttaaatttaacaaaaaagaatgatatgaactatgaagcatttttttaaaatgtgaggatttgcttccaaagatattcattggttattttggatatgtgatcatgggttttgtgaacatgaactaaacaaacctctaccatgtaatttctggcctttgcaacatttcgaatccttttacctaactatttagattgttggaagcaggcattgtttgttattttgctcctccccttgacctttatgagtgttatcatatttttcagagaatgaaagagttacaatctagtgagccggaaaagaaaatgcttcgcttgggcgtagagacaggaggatgttctggtttccagtataagtttgagcttgataatagaaccaaccctgatgacaggtactctgttccactttctattagaatcaagatttgattttggcttagttatagctgttcttgaatattacagggttttcgagaagaatggtgtcaaattggttgtcgataatgtttcatacgacttggtgaaaggtgctacaattgattatgaggaggaattgatccgtgctgctttcgtggtaaagccctcttttttcctttttgcatcttttcaatgcttataatctcaatagtcaccatcttctacactttcttctcatcattttgcttagatagtctatataagcatttgtgtatgctttgcctgagctgattggagtccataagcctatgattcttaactatcatttgcaacgtgtcttccttatgccctgtgtttttgaaaaggagacaagacataatcttgaaactgcatgttggtttaagtaaccattttaagattttcatttgatttttaatgctttggtgttcaggtagctgtaaacccgtccgcagtgggtgggtgcagttgtaaaagctccttcatggtgaaactctgaatcattgactcaactttcttctttacatggactagaaaccaaatttgatcatttgtttattacatgtataatgtcagaagttttgctatgtatcaaaaaggcataactagggaaagatacaaaaactctgtaggcttctagctcaacaaatgatttgtccatcctatttttaaacaataatggaaagatttatacaaagaggaatcttgtatcttctcttaatttacacaacagttggtctgtacatgctcttgatcatacttacataatctcaaatcacgagtccagctgatgtcagtgagtctttgtgagtacttaacagagaagagcgattcaattcctttagttttcccctctctaccaagaacactctctgcgccatcatcactgtctccagtctatgtgcaatcactatcacctgtgaatgcaaacataagagccatggaaccaggaagtttttgaataatatcagtgatgattcaattaaaaggttgtttagaatggaagaatcggatgtgtgcttttaccgtatggtcttgcattacacgttcaagagcttctctgactagcaactccgacaaactatccaatgctgatgttgcttcatccaaaatcagtatggatgatttctgatagagcgctcttgcgatagctagtctgcacatttgccaaatgagaacaagacgcagtaagcatcgtgaagagaatatatgaaacaatcagtcttccagaccccacctttgcttctggcctccgcttaagcttgaacccctgggaccaactcctgtgttgtatccctctggtaggtttctgataaattcatcagcatttgcagtttttgcagcaagctcaactctcttcatgtcaattcctgtcgtgagatctctgtacccaatgttgtcagcaattgtccctgaaaacagagtcttgcatgtgcaaaaaaagttatgtaactacgatgaaccattatgaaattcttgggatgaatcacgaaaggagtaaatttgaagactggaacgtactgtgtcctgtgaaactagaccaacatgtttcctcaaactttccagtttgatatccttgatgtcaattttgtcaatgatgatagagcctattaaagggaagaaaaaaacaaacacacatatgtgcttagatgtcaaaccgttggttcttaatattgtgattaagttaagaagtaagaatttctaaccagatgaaggttcgtaaaggcggaggagcaatttgatcagtgttgtctttcctcctccagatggtccaacaagagctacagtctctcctgctttaatatgaagatttaacccatccaaaacgggaagcatattttcgtcatatttaaatgatatatcgcataactcaacttctccagcaactttttccaattgaatggcctcaggtctctcgatcacctaattttcaagacagggccagaagcactttgcatcatattttgagatagacaacgaacaaaaccaaatcattaggagtataaactgaagagaagatc

SEQ ID NO: 693 - DNA, 79073 bp, Arabidopsis thaliana
gatcctctcagatgtttcctccaaagcttcgcctaattgattagaactcattgctgtaataaagtttcttggaccaaccctaacagaatattaaaaaacaagaaaaccaacggtatttgaggatatatatatttatatagagtcataacggtatcatacaatctttggtgtttttctatcttattctttgattgattttacatatgagaatatatcctttgcttggttactgattaatttaattggaaagattttcttttggacagaaataaaggttcttctatatgaaaaatatataaatccgacaaaaaaataaagaagctcgtacagtattttattgtcaaggtttcaagacatgtcttttggctgctttaactagtcagttttttgcacagttcatacttcatagggtgatatagtttgtcaaaccctaacaattatttatatataaacgcgctttaacacaaaaaggcacagctataaaaaaaaatataaaaccattacaatttacaaagtaccaacagtagagtagaacacttgaaacaccaaacagagagtacaaccctagaaacacaaacaatagaaaaagatctagaagaaatcttcttattgcgttacattaaaaagggatccatatatcttctctcatcatagaggtgcctagggtgcggctatcttgaaaatggtgcggtaaaactatttatcacccatatcaacgtccgagttgtagtttagtacgttttatgatccatgttttcctataaaaaaaaactcattgccgtgttataaaatgacttggaccaaccccaacaaactgtgtatgggatatatatgcataagtaactgtcatgtctgtacgtatatgcagggcataacggtaaacggcaacgtacaatctttggtgggttttatcctattcgttgattaatctcaacacaagaatatatcctttgcttgggtactctttattttatttggaaacgtaatttttctgttagaaagaaatatgaagtttctacatgaatatataaactggattttttttttaaaagaagcttatttgtgacaataatttttgggttcatgaaactctttattcacctcctcttagcttaaccaatgaaagtgtgccaagtaatattacatataaacaaaaataattaattaaaattaaaatcagaaaaaccaaaacaaaattagatgcagatgtataaacatagataatcatcatcacttgctccaaaccatcaagctttggatagaaactgtgagccttgataatcgccccatcgtaaatcattctccgatagtttcctctcagcaacctccactgtaacagatttgcagcaactcggtgcacaagtgaaaagaagaaactttgcaaacactcgtgccaagtaaatagatccaaaatttgtatgcaattttattgataagtttaaatgatcagttataggagatttgaggacttttcaaattcacaaagagagagaagattaatatgagatttttcgagctcccctccaacattttaatggatttgctgagaactttttgttctataattgatgatataggtttcaagtttcagacgttatgaccggtctcaatgatctcaatgttgttaatgaccgtacaatatgttaattccggtctcaatgtttgaccggtccaagagtttttatttttcaggaaaagcattattttcaggactcataattactgtactaaagaattttctaattaggcccattaatgtcttaggttaggcccaacatttcatgtttctgtcaaagatcccttttccataagtggagaagatcatttccttgaggagaggatactgaagcagaacaaacaacagcgccggtaaacaagcaaaaaggatcgtcggagcaacaatccatttcccttctttacccatcatcgtgaatagcgccgacgagaatgctataagcatcgccgctattgaaacgaacagtatcgaaagtccggcaatcatctttgtcggcagaaagaccaagaaatcgtcgaaggagtatcttgcggttagtatcccgaggaagatgaggacggaggtgcaagaggcgaagcaggagatcaaatctgagacgatgaatatgatgaatcgccgatcacgtaggtgaaagggtttaccttttgaattgtcgtctgtgccaccagggacagtgaagaccgccgcaaaggtgaccgtgacgatgagtgccgcgactaagctgcatgacatagccgtgtctttcatccatttctctgcttcttgtcgcagtccttggtgctcctttgtgaatatctcgatcggtgtttgctcttctgtgtttactctctccttctcgatctccggtgcgattctctccacttcctgcattaatcaaggaaacagtttagacctctgtttcctctgttttagctatgcatgagagaaacagagcaaaccttgaaccattgtaactcgcgttgcaactgcaaaggtgcgccaacgacactagagagcttggaaggaggagacggaaagccagcgagatgaagcacaccatttccatcacagtccttgtctgcgagcaacaagtactttctgtcgtccagaccgtataggagactaaacaccttctcttgtctgaactcgacggccaagagaaacagagtactgctcgagcttgttctcgtggaccatagaagctcggagttgtttctgatcatttccaccaagaaatccacattcccatatctcactgcaaagagtaaagcctcatccactgtctcggaacgttccttcaagcccaaggccaatgtttcttctgatattcccagtagaagcttcttggcttgtagatgcatgaccttaagtcggtacacttcatctattcctgaagcatcacttaagtaagatttaaatttcatgtgaatccttttgaatagactaatacttaccagtccatttggagaggcctttgagcagtttcctcatcagagtatctggaaacaaatcgaaactttttctcactttcttcagaggaatatatgaactttaatgtatacggaagaacttactctgctgatctctgtttgaacgagaaggctgtggaagagttggcagctttacttgtatccctagcaagtgagagaaggacaaattctttgattaaaaatgacaaaatgagtgatctttgtaatgaagaggtcttagattagtacgaacaagagtagatgaaacgtgtcaatggtccaagatagcagccaccaggaaaaagatctggctttgaagccaagacaatgatgggtatcgactcgatttgcgagtgttttgtgacggctaagcgtctgctcatgttgaacagatccaacgcgatgtctaattatatatagaaaaacaaatcaagaaatcatcatcatcaaaaccgccaaaaatatggtttgcttgatgtccaagaaaccgcttaccaagcattttatagaagatggcattgagaaagagcaaagaaccgtgatacccatcttggtcaagtaacacttgaaccggagttctggtgtaaagatagcgagccatctccatctgtgtattctcaaccgcaaccacaaccggaatttgtccattgattccaggaatctctagcagcttagggttcttggcgactaaggcttcagcaatctccatgtttccactaaccgcaacaacagtgagaggcgtgtggtatgaagcgttttggctcatcttgggaagcatttgttcaggtgtcatacgacgtagaagctctttaacaatctcgggtttcccacacgcacaagcctttaacaatggcgtctcgtaaaggtttatccattcgtccactgagtccggatgatgattcaagaagtccttcacgatttctacacgaccttggcttattccttgacttaattgtatatactcataatatacgttcgtattctttcctacatcaacaacaagatatatacacagaataatttaacccgacactttgatgtatctccttgtaacttgcttataggcgattgattagttgagaatggtataaagaactcttaccgcgaagccgagatgtggaaagagctgattcgatgaatggaatctggatattgacggggtcatttggaacttcttcttcttcaggaacttcttttataggagagacactgtcgcctagaccagcatgaggaacctttgtattagcgaatttgaaagggctcctccgaaatgtttccttcaaagttgcgtctaagtaattagaactcattgccatatcaaatttgcttggaccaaaacctaatagaatatgaaaaataaacaaagacaaatagaggtaatcggatattatatgtaaaagctcaagtatatgtagtagatatccggaagtatatgcaaggcataacggtaacatacaatcttcggtgttttctctatcctattctttgattggtcttacataagaatatatcctttgcttggttactctttattttatttggaaagcttttctgttggaaagaaaattaaaggttcttctgaaaaatataaatattcgacaaattagaaagaagcttatttgtcaaggtaaaacaatatgcagtgttacaaaccggaaccttaacctagaagattacattccaatttggtttctataatttcctaaacaagaaaatcaattttaggttctgttcttgttgtgagactgaggaccatccacgaacagaagcaactagcttaacatttctcaccatgtcttaagatctttgttgcctagagagaatatccggggagttaatcatccacaacgagcttcttgtctacgcttgagaaagatcgataaaacgccttgaaatgtctgtacgcgatgtctatatcgtctgttccacaaatctctctcacactgtctcacaagtaacgagttccaaaaaccagaagctgagtctaacatattttgatttggaaacatgagaaagagttgctaaggaatggcagtagttaacatacctatgcatagaaagctgagctatgccacaatcaacggttcggatccctactcctgaagccaatataggtcctattgttgaaccacatcccatatcgtttctcaccacaaactcctgcagaaatagcaaaaatctaaatgtcagtatttcattcttaaatgtgggtggattagtgcagagcatctagaagatctatgatgtgtagattcatcttaacattaagaagaacacctaacctgaattggaagatcatggagctttgctacttctttgaaaagaaaagaagtgattccactggttgcatagcgttgatttgcgttatgtttgattacaagacccttgtgtagttggggacggtggttctcttcatgcttgtctgcaaagttggggtggactccatgagccatgtctgcagacactgcaaccacaagaacccaaacacaagtttcagtagaaattagaaagtaagagataggaaaccatcccaattttgtaaccactgtctcacaaaaattctggaaactacatatgcataaacaactgcaaaagtagaaagtgtgtaccaagaaacgatttccggatagcacggtcaaatgtacactcagtgacctgcttatttcctagggaactcacaatccgtctcattgcttgaaacatagtgggcgccccagcaccttgacatgaatctgaaccaacctattgaaacaacacatttttaggaagaatttttacaaaaaggctcagacggttcaaggacatcatcagctcaaagcaaaaaagttatggaaggttaaatgcaagtcctctttattcaacaattttcaggacaatagtgctgctagtatgttactcgatttgaaggaacctaataaatatcttagaggaaaagggtacctcctcgttgtcaaataaagctatcatccggatatcatgttcagtcgacagattttctgatgattcacatgaatcaatgagagctctcaaagcacagaaacttgatgcaagattatcaagtcttccagagaatatgaattcattatttgctcctccaaggcagctaggttgggtgtcacagatatttaactcaagactcactatatcctcgaccttacagtccaggtcatctgacaaaatctgcaacacgatcaggaaactttgagatatttgcggattttacagttacccaaatttaaactaaatgatacaaaaatttagcaacactaatggattatgatgacactatgatagaaactcgaaatgttggtaatgatacaaaaatttagcaacactaatggatgatgatgatactatgatagaaactcgaaatgttggtaatgatataaaaaatttagcaacagtaattccacagttctcatgatctaatatcttagaaacttggtgcatgttcagaaacgatgcagaggaatgactctagtgactaaccaaattatgtcatactcatacctgcatgagtaatggatgatgagcatctttggaggatacatttttgtccttggactctgctgaggattcatctgattttgttgccagtagcggaacaagttgggtctccaaatttggtttaaatccatcactgttcactgtgctaaacaatacacgaagaacaaaacagcatgaatgagcttcaaaacataactccacttgatggcaaatgcattagcctaaaacttcactagacaagctcatgaaagaaatttaccgatcaagatgaatggccaaagtgggtacccttagtaatggccttttcactttgacaagcctatgaacaaacgagccatcactggctctcacaattgctcgccccgcaacacttaagtctcgatcaaaccatgtgtgccacaaaccacctccataagtctgaacattcaccatgagatagccagacttggatgaagcagacttcggtttaagtttaagacacgggctatcggtgtgagcagctatggcatgaaaaccattaccaggcacatacctacaaaatgaggaacaaatgtaggttccctgaacccaacaaataaggaatctaagaaagaaaaaaaaaacgatttttgtgaagaacccttcaattatcaaagcttgaactagttccaggattcattatcaaagccaaaccaaatcttataccatggaagcataattgaatcggaagactcacttttctccgacagcaaaagcaaccaaacaggacatgtttcgtgtaaagaagtaacggccaccaggtttcagattccagtcttcgttttcactgaggagatcaaacccagcagccaaaagctgtctcttcgcctcagctgccagcaaagagaaaaagaccaatgagagtcgtcacttaaagttgaataccgaaaagaaaacaatatttcaatataccagtggcgtgaaactgtgtccaggattcattaagataatccagaagatccccaacaatcgacgcattagaatcactccccggcgatctcgaatcgcgatgggaggtgcagaggattggagagacggaggagaaggagcgaaagggagagcgatggagataagtaggaaaagagagagactgagagaggaaggatgaaggattgaagatggagggaagagaatgagttagtggaagacgagctatggccgccattaatttcgctccggactctaaagatgaggtcttcttctgttatctctaaagtctaaaccatccgccgacgattaccatccgccggagatttgaagaccacttcgacttcgagaaccggattttgtttcttactgtgtgtccccagtcttctaatcttgaggagctgagctgagggccatggcccatgaggattatatgggctatggtgccacttctatgggctttgggcccatgtactcttcacatgattttatttggaccaaagaacctttgccttttatggtccacacttgcatcattccaattttattgaacgcgtgttaaggacgtgtctttatgtattgggccttattaggcttcagtactttgcccttgggccttattagacataattacatgaaagatgatgacattaatttgccaaaagtctttatctttattgggtctccgtagactttaccaaaaggtgactgcaacgaagcttcgttaatgggttccacaacgtcacctacttgtttacttccttttgttttgtttacttcgttgcttgttactccactcttccttgccttttcttctctccacttatctctctctctttttctcatcggcctttgccatggcagatataatcggcggcgaagttgtgacggagctcgtgaggcagctctatgcggtttctcaaaaaaccctcagatgcagaggcatcgccaaaaatctcgccaccatgatcgatggtcttcaaccaacgatcaaggagatccaatacagcggcgtcgagctcacacctcatcgccaggctcagttgcgtatgttctcggaaaccttagacaagtgtaggaagctcaccgagaaagttcttaaatccagccgttggaacatggttagacagctactccatgttaggaaaatggagaatcttcagagtaaagtgtctagctttctcaacggtcaattgttagtccatgttctcgctgatgttcatcatgttcgagccgattctgaattccggttcgatcggattgataggaaggttgatagtttgaatgagaagcttggttctatgaaactcaggggaagtgaatcgttgcgtgaggcgttgaagacggccgaggctaccgttgagatggtgacaaccgatggtgctgatttgggggtgggattggatttgggaaagaggaaggtgaaggagatgttgtttaaatccattgatggggaaagacttattggtatctctgggatgagtggttcagggaaaaccactcttgccaaagagcttgcccgggacgaggaggttcgaggtaatgacttttctttgctggcctctgattccatatcgtttgttaatttgcttggtacatctttgtgatctctattgcagtggctttgtggtgtttcttaatggtatattttgttggtttatcttgatgatcatgcttctattgttttgttgtatagttgagttgctaaaattgctttcatttactgcttttatacaggccactttgggaacaaggttttgtttctgactgtgtcacaatctcccaatcttgaggagcttagagcccatatatggggatttcttactagttatgaggctggggttggtgctactcttccagaatcgaggaagctagtgatccttgatgatgtttggacaagggaatctctggaccagctgatgttcgaaaatattcctggaaccacaactcttgtggtctcacggtctaaactcgcagattctagagtcacttatgatgtagagttactcaatgaacatgaagcaacggccctgttctgtctctctgttttcaatcagaaattagtgccttcagggttcagccaaagtttggtcaagcaggtaattggtctgctttaggtgacacatgcatagtagcaatgttcttttttgctttcagtactcatattgtattgactctgtttggtaggttgttggggagtgtaaaggtctacctttgtctctgaaagtcattggtgcttcattgaaagaacgacctgaaaaatattgggaaggtgcagtggagaggctatcaagaggtgaacctgctgatgaaactcatgagagtagagtgtttgctcaaatcgaagcaactctagaaaatcttgaccctaaaaccagagattgtttcttggttctcggtgctttccctgaagataagaagatccctcttgatgttctcatcaacgtgttggttgagttgcatgatctcgaggatgcaactgcttttgctgttattgttgatttagcaaacaggaatctccttactcttgtgaaagatccaaggtacggttggttataaaactctttatgatctgatctcttgtagccactttcaacggttttattcgttcttagctaatgtaattaccatcgataaattttcaggtttggacatatgtacactagctactatgatatatttgtcacgcagcatgatgttctaagagatgtagcacttcgtcttagcaatcatgggaaagtaaataacagagagcggttattgatgccaaaaagagagtcaatgcttccgagagaatgggagaggaacaatgatgagccatacaaagccagagtagtttccattcacacaggtaaggatttgttacacgaccatcttctaatgaataatttggtttgttactagaataataaagttttgatatggatttctgttttattttacaggagaaatgactcagatggattggtttgacatggaactccctaaggctgaagttttgatactacacttctcttctgacaagtatgtattgcctcctttcattgctaagatgggcaagcttacagcgctcgtgatcatcaacaatggtatgtctcctgcgcgtctacatgacttctccatctttaccaatttggccaaactcaagagtctctggcttcagagggttcatgtccctgaactctctagcagtacagtgcccttgcaaaacctccacaagctgtctctcatattctgcaagatcaacactagtcttgatcagacagagctagacattgcccaaatcttcccaaaattgtctgatcttacaatagatcattgtgatgatcttctggaactaccttcgaccatctgtggaatcacctctctcaattccatcagcataacaaattgtccccgcatcaaggaattgcctaagaatctgagtaagctaaaagcccttcagcttctgaggctatacgcttgccatgagctgaattctctgcctgtggaaatctgtgaactgccaagactaaagtatgttgacatttctcaatgtgtcagcctgagttctcttccggaaaagataggaaaggtaaagacacttgagaaaatcgacacgagggaatgcagcttatcgagcataccaaactctgtggttttattgacttctctacgccatgtaatatgcgatagagaggctttatggatgtgggaaaaggtccagaaggcggttgcaggacttcgtgttgaagctgcggaaaaatctttcagcagggattggctcgacgattaggttcgtgattctctccctccgagcccttagaagcatgttgtataaaatacttaattgctaatctgtagcaaagtcttgtataatattatattttatgagcacactcaagagtcaagagtcagtgcaaacttcgttcttgctctttctccagaaatttatctaactataaaatttccattcaagaatcagatttatgttagtatcattccagattcctttattagagtagcttttgagccaacgccataattgatttatgattttatttcaagaaaatgaaagcgtgggtgccaagacacctttgccttttattgccacaactccacacacaaatgggactaacacaacaaagaagtacccgttgaaacacaaacattacatcctctagacgaccacggctttctgattttggcgacatccttctgtaatatcttcttatggtagccagttctttgtatcgcggtagaaaagtcgtttgccataggtggaagaaatcatctccttgagaagaggatattgcaacatcaagaagagaagcgatgggaagctggcgagtggcttcagtgggtatacaagcgctggcttgtgacgcattgacgcggaaagcgacgtgataaatgcaacaagcattgaggcaatagagataaacagaatggattgacccaatatcatctttctaggaagtgatacaatgaagtcatcaaaagagtatcttgaggtcagaatgctgaggaatatgagcacagagatgcaggaggcgaagaaggcgagagtgtctgtgaaaatgaacgctctgaaatgtaagtcattaagaataagaggtgaacccgaagttccatcaatacctccaggaacagtgaatatggcttgaaaagtgacagttgcaatgagagccgccacgaagctacaagcagtggcagtgtatttcatccattcttctccttcttttcgtagatgttcgtgataatgttcgaatatttgtcgcggggtcttgttgtccttgtttttttgcactacttcacgttctgataccaagctctctacttccttaaaccattgagactctctttgcatcttgagagcagctccagaaatcttagaaagttggtcgggagtagagagacgaccggcgatatggagaatgttattgtttcctttgtcgtaagatctaagaagcgtgacctttctatcatctaaaccatgtatgagattaaagatcttctctttcttgaattcaacggccagctgaaagaggtttcggccagaggtagggttcaagatccaaagaagttgagagttacatttgataatctcgatgaaaaaatccctgttcccactcttcgccgcttcaagtagtgcttcatagactgtttctttccacctgatctcgttcttggccatgatatctcgtagtgatgtgcacatttgttttagcaacttttgagcttgagaatgtcttttttttagatcatatgtttgcttgattcctatgttgaaaaaaaaaggagtacatcttatattgttatggaagccacactaaatagcagaaaaccctaatatatgatataaaaaagcatatattcatcacatatataattaactcatcatgtgaatactgcactgagtgtgaccacatagttaaatctatctactaattaaactactaaatgcacgtttaattaacgtcatttcgaaatgaagcagacaagtcctgtctatgtgaactctattgtagcatagatcatagatgcatcaactttggataaaaattagaccatagttagacttacgtaccaaaccatttaagaagactttggggtagtgtcatacaaaaaagacctgatgtaggaaatagatagaaacttcaagtcgaggtcaaaagataaagaaaaaaaaaaagatagaaacttcaatgtgtgtatatatagcaaatgtttaggaaaaaaagtccaaattataagagtgtatgtgagtggcgtacgattgtctcggtttggtctcggattctcagatacacgtatacctaacaaaggaagaaatttatataggaacaattaagttcaagaaaattaaatgaaaaaagaaccaaaaaaggagtttaatggattattatatagatagatcatatttaagtacatacacgagtagatgaggtgtcgccagaatccaaaattgcagtggctacgaaacaggtcaggtttcacagctatgaacttataaataggtaatctttgccttgcgtgtttagtcacggccacagacggtaaatgcttgatgatgtccaacgcaatgtctaacagcccatgaaaccaagctattatattgaatgcccacttattatgttacactatttttatcataaagcatggccgaaaatttttgtaatctaacaactaacatatatgaccacaactaaaacaaatcatgaattttgatcacataattaagcaaccgaaattagtggagtagctcaccttttcatacgctatctacaaatgttcatggatattctcatattcatttaaaacccaatttttctgtaaaaagagtcttttttttttataaatataaaagagattttcatccattgatgttccttatattatatatcagattagattcctattaatactaatcgatcaaagattcctaacatttccggttgaggtttccattgtactactacagtctacagcactagttgtgtgttatcattgcttcaagtgcgttacatatcattatcaagtagttaaaagacttaccaagaaatccataaaatatggcatcgagaaggagacatgtagcccaatatacatcattatcattctccaaaacaagaggaagggttctcttataatgattgtaataaaggtagtcagtgacctttttatgccctgcattagatgcccgcacaaccggtatagctagcccatagcgaactgaattattacgagcaagcggctggttgagatggggttcacacagttgctttaccctcgtcaaattgccattcccggcagcaatatcgagcgctaaactttgacaataagcatcgttttccatttggccacgactcgtcatttcgtccaatagtagcttcttgacgatctccaattgacgtcgactacatgttttttgccatgttatctcaaatgcgtccatcaaggcagtaattgtctctgtctgcaggttcaagaagtttcttttcacgcgctccaaatcatcgtcgctaatttgctgtgatagtgataaattttcacaaatttcacctaaaactgcaaccgcacatgaagaagaaaataacataaccaattagatagaaattaaattatccataaacaaaattacatataaatattttgtgctgaatgtagagcatctaattttacatcaagcagcctgatacatatataaacaaacataacctaacttagaaaacaagttatgagaactatgacgtacaatatgtagaccgttggaagttaccaaaatctcctcccaataaaaaatcagatcaggaaacgaagtaaacttaacgtggacgaaacatgcgatgtgtttcatttacaatgagaattgccacaagtgataagtagtaatcaacgaaatgatgaaaagaaaaactgtttaccttgcatttcgtccgaagaacctggcactccttgtgaagaacaaattggagttgtactgtcaattttcttctcaaaataaatctcttttgtgatttgcgatttgatgaaatgttggcacagtgagcttgcttaaatagacttttttcgcttaaagttaataatgcgcaattaactttcacatcatcacattctcttactgtcttcatacgtcatcgcatctagtttcttactaacagtttttttgtttgttttgagttctcccaactagggcatgactcatgttcttatcagtaggatcattttgtttgtttgactctaattcttttcctgttttgttttaattcctaaaaggtcaacgataatttgataaatgtttaacgatcatttttaccaaatatattataaagtctgtaattagaaatatctcatgttgtacattttaaattcttttgacattttcgcatatatatttttaagaagtcctttttatatgtgacgtttgtgtttagtcccttttggagaatccatcaaactagtgaacttattctattccttgtgaaatttaaataatatgaaagctgtcaccaagaagtagaattagtcatcaaaacaataaaataaacttcagcgaagtgtttttttctccttttattatattattgacatttgggacgacaaaagtaaagtgacctttgggaaaagaaaactagaatcagtcaccaaaacaattaaaaaaaacatatgcaagagtattgccgaataattatgatggatcccacgtcgaaaagttcactcgttaattagtttgattgaaagttcataattttaaatgatcaaaaaaacagtccaagtaggattcattgttggttcgagggtaaaatgcggtttgagatagagcgattattaagagtcgttatcacgaaaaagcatgttggatcccaaatttagaatatatgatattaatagttatatattaaggagatgaacaaatacactcatgccacttaaggagattaataagtctaatccacaactttgttttgcattaagctgttattaggtgtgttacggtgaatagataagtccgcatgcttgcccgtgtcctatacttctttctaataaattagaccgcttcgaaaaaccaccaaattttgcgtccagttttcaggttaaccacagactaattaaggtaagggaggtttcagatttgtaaaaattgagtcttctacgaattttctaaacgcacccaaatcaagtgtcaagaacccatttattttttagccacagtggttcaattatagtatcacgaatttccacataatcttccatacagaagtctgaaagtttcgcaagcacagatatgattgctttaaaggataaagagcagttttgttttagagcaaacaaaagctcatttagtagctgtcaatgtcagtttcaggccttctcaggaagtaacgcagacagttcaccaaaacctgcaggagatagttgattctttttacctctctctcttcttttaaaggtgcaaaatacaagactaacagaaacaaaaacttacctgtgacaaagatctgtttagagcttgcccttggtagcttacgtgaaacttgtctttcgcaaccagtccctgagagagacaatggagacgtactattataatgcatagcatagaaatggaatcacagtgtatgtacttatgtaggttttgactacctctgtatctatctctgcggattccacgtctatgttgacatcagccatcactttgatcatctctacgacaagacctggcctgtccgctgtctctatgacaagcaggctagagaaaacaggaaacaggcgagaattatgtaaactatttcaacagggctattctttatatatgattttgtggtgtcattaataatgctaataaatatggtgaatacctcctctttggtccatcttctttcacatgtatatgagttgcgatatcgacatcaatctgtaccaaataaatccaaagcagaaatgagacatcagtaacctagagctagcttttaatgactgcaagcttctttataaaactcgactaagacattagaaaagagtttgtataaaacacaggacacaaaagtaatcatccaataagcagagtaaacattaccttcttttcgggagcctttattccaaaagtctcacccattgcaagttgctcactgcattcctgcaaaacaaccaaaggcaatgttcaaaaaaaaaaaaacagctgcatgcaagcctctttgaatgtgaatgtgattacggtaaagagataaagaaaactgtaggcagaccggatggtatttcaagagattgttgatgattgttaatcggatttgttccaacaagtcaggatcttccactttccggccagtgtctctggtgtgaaaaagaaaatttatttcaggcatctgtaacaactgacaatgcaggttgctgaagatgatatatgcacacaacaccaataattctcaaaaacagaaagttcttttttatcagattcacttgtctcaagctaattatctagtttagaaagaattctccagagaaatgatatagcccaatgtcaagcatgaacttcataggacaactgcagaattctatactagcataatttgagataagggaagatcatatcagcactaagcagtttgagacaaaattgtgcatcctattgaacaagtgagaagtcaataagtgatagaaaatcatctaaagcaaagggagaccaggaaaagaaaggcctttcttaccgtttcgttatagaaaatttggtctgcttaatggatccttcagttgagacagttccttttattacatccaatcccaaatctttcagcgcccgcatctgccacacacatatgattcataagccgaaaacaaggcaagtttacatctgattctgatagtaaaaacgctacaaatcaagaaaagctaaagttttttcacatcgataagatagaacaaaaaaccaaaacaggatatagaatccctcactgtgtcaataagagccccaagacgatttccaaaactgagttgtacaatagtagcttcagggtcagcatcctggtctatcataaccattggcattggaacaacgtcgtcatcgtcttccgatttctgcgatcaaattttccagcaaatgtcatctcaaagcacacgtgaacacaaaactcatacgcagaccgtttccctattaaacatgagaaaatcaaatcacatatcaaatagcatacacatgaacacataacgacatactccctacatttccttgctgagcttctgagagcgaacatacatgcaagtcaaatcaatagatccaagaaacatccgacgaaacaaaaaaagactgaaacaagttactgaccggatacgatggagtagcggccgaatcaatgctgttaatcgaagcatatacacggtttttaatactgcatacaaaacgaacaagcacggaaagatatatcagcaacctcagatacatcatacaaagaagaatttggaatcggtacatagagaaaccaaactaccaagcaacttattctaattatctaaagaaaccataagaacttcaatctcgaaatcgaaatttaatctacctttgctttctcaaatctcttaagttcaagattcataacgaccaatacaactactctaaacgagaatctagtataatagttccgtttgccggatcgttcgagcacatacagagcaaagatttttagtcgaatcaagcttaatagtagctgaacataaaagacgaagcaaagattactcaaatcgatttagcagaaggagcaagaagactataaatctccatcaattctagtaaaggaaagatctaagagcgagacacgacgcataagaaataggaaagagcctaacctcttcgtcaagagagacattacacctccgacgaacttccggcgatcatcgaacaaagcaggcgatagatctggagaagcaatttgagcgggaaaacgagtctgcctactgattgcagaagaaggacgcgaagctaacgaagaagaaaactgagtaacagagaagatggaactcgagaacgccattgaagtttgaaacaagaatattttttttctttctttctcctccgaagtcagagagaacaccttaatctataaaatggcgagagaaattggcgtttagtgataacaaaaagatgatggagtgctgaatctgctgatgtgatgtgtgacgtcactatcgagatgctccacctatacatctactaagcttttattttatttttattttatatggtttctacaagtaactaattgaatatttgcaaattgctatagaataatgtgatcatagtgagacgaatgtagatgcaattatttgcttgctgacgttcaaacttctacgctgcaagttaccaaatatcttctcttttctattcttttaccctccaagccaatcggactggtttgctgtttgcagattttttaaattaaacctgctaaagaattttaaaaaatattttgttttgtctctaataaaaagtttaaagtaaaaaaatcttgtataaaaaattaaaaacttttattcgttgaccaaagaaaaggaaaaaatatctaaaaacaggggaaaacatgtatgtcaacttgggccattaaaccaaagaattgtagacgagtctggggaaaggttctcactattgggctattgtagcccattgggtcattagaccaaagtccttagctaacaattacgccggtgcaatgttctagcgggttcttcaataatctatacccgacccggtccggacccgaagctgcctaactgtctcttcactccaaagacattttctacccaaaaaaaacgattttgagaaaaccatctcactgattagcaagatgtcgtcggctcgttctgcgatcacaaagctaaagctggctcgatcctttggggagaggcagattggtgcatcgcgttcggtggtatcgactcgaggaccggcgattcggtacttcagtgacgataaaggtcgtgtgctcagcgaagaggaacgcgcgaaagagagcatgtatatccaggttcttcttcatcgtcgactttttctaactcttgatttatgtatcgatgctataatagtttgtttagccgctgttgcttatttggattcaatgtttggttgtcgaaattttgcttcaagttagcgaatactggtaaaaatctgatctcaggaaatcaatcaaattatatgaaatatcgtttgggaaattgcgttagcattgatttttaagcttatgagatacactgataaagatccgaggcttattcttatcataagacttgaatccaattgttgtctatcaaattgtaaagtcgtcttttgataataaatggtcaaatagtgtgtggatgagtttttcaaggcgtattagttcatacagatggaaaataattgaagtaaatgttgtctgtgtgaatctgtgatccaacttacgcctctacgaaaagtatttgttgtagaaaggggaagaactgtgtgttgttgacattgttgttaagcaatctctatagctttttgtgttcctttttgatttgaggttgacctcatagttacagtttaaacacaattttatagcttcgttgcatctcacttgcattactcaggctcagaatatttggctatgactattgaaattaatgaaggaagctatttctcttcacgcacttataagaaaccgatctttttgttgtagaaaatggagagggagagactggagaagaagaagaaactcgagcaagataagctagatggtgagaaaggaagtgccaacaaggtaaactttcatcataccatcaacttccattggtctcttttcattcaagtgttcagttttacgtacgaaatgccctgtggtcagaagaagcgcatttctgaacctgaatttggctttaatgtcacagcaaatgatgatctaacttaacatagcaaagaaatgaacttgctcgttgactgtttgcttttcactctcttgtgcagaaacctgagacaaacaagccatgagtttatcactcacagtatacagaatccggtcataaggcaagcagtagtgaaaaacaataatgcctttgacctatgttctctcttggtatgagagatcttgtacttgtacagagatctttaaccttctgatgtgtgtgtttgtgtgttgtaagaaatcaagtttaaaataatcgagaaaaacaaccatatgcattgattcaaaataccaaaatggttaccaaacatatttgtgtttacaaaaagcttccctatacattatttttattctttgatcatcatcatcatcatctgtataagaaaatacccaatcctatttctttccctattcacataaaatgagtaaaaccctattaaactaaagccatcccaatttgtctccccctttcttcatcacatccgaaacccaaaatcctcgaaatgaccaggattcaattgctgaccgaactcagacataatctgttgctgctgcggcgcctgaacaggactcccgtgttggccagtccagtccatgttagacccaggcatagccaaagtagcatcaaccgtagttatatcatggatgctcgaccttttcctctccttcttcaccgagttctgtctcagaaaatacttctgagcgtgactcgcgacttgcgtcggtgtcctcgtcaccacaacgtttctcgagatactcctccaatctcccttaccatatctctttaatccgatcagaaacaatctgcatcaataaaattcatatcaaacaatgtaattaaatcacctaaatttagcaaaattgcatttaattcctaaattctcaaaccaaccaaaaccctaatttttttgaaatgattgataaagaaacatacttgtgttcgttctctgtccaaggagttcctcttttgcgttcactctcgccatgtttagacccaaaagagatctgaccagcggaatcccaacccgccgccgcagccgccgagtcatccatgtaatcagggacatcaactcgaccagaatcaatctcgaaaacatcatgaaccaagacctcgtaatgctccctaacttcaccagcagatttatgaagctgatcagcgattctctcccaccgattaggagatccttcaggaaaaagaaccaaagcttgctcaaacatcttatcctccgacctcgtccactgacttgacgccataatcgttgatgattactcaagtagagaagaagaaaacaaaaacaaaaatctgaaatttgttggatattggaagaaactgttaggataatttatacggattcttctggtttttattcttgggaaagttttttgtaaataagaaaataaagagctggaaaaataaaaataaaaaagggaaggaagaagcagctcagagaccaacttcaacacggtttctctgcaattgggatgtcttttgtctctctctttctctcagttttattttcaattttaattttagggttaacacctgacctgacttactgattttttgctaccagtttgttacagtttctccctttttatctttaaaaatttttatttaaaaggaaatgccactttgtttttccaataaaatgggaacacgtagctatttaaaaaaaaaaaaaaaaaccaaccgcctaaaaatacgaaaaagcaatctagaaagacttgttttatttaggtttcacattctcgaatcaatcacagcactgcactgtctacgtcttccttgtcactatttttgtccaatcctctctcaacttcactttcgtaattatggttatctgtgattttccatctgtttatgattttttcattttactaaccttataattcttgttatgttttcggatttttttttgggccaaggacgattctcatgatgaacaaatatttttttttatagtgatggtccaacatttgacgtgttaattaaattatgtaccgcaaagtttgactaatttttgacagttgggtcattaatgttagtcaaaaaatccaatcctcaactgttttaagtgtattgaccagtaaaagctccaaacacacactacaatcaatcatattctattcatagcacttccatcagttcatgccttggtgagtgttacattattacttgttgaaacacataatgttagattgtcagcgtaaacgtgggaagtggaaaacatgagtatatttgatttcgaacgtgttataaaatagttcgatttatactttttattaaatactcctgtagagaaagataacaccgaaatttgtcttatcttatcggaagagtttcattgtatttattaaactatgttctcaacgaccttcaacaaaagaaaacaaagcaacttcaactaatttttttagtatttttttagccgtacttgtttctttcttcacacgtagtttactttacttgtttttaaaaatggtttacacactttttactaaattaattggattgcaaatatgaagtggatacgttacgaagtcgaccaagacgccaagaccgactcttcaccagtattgagccacgtgtcttctgccaattgttttgcgaggatactttttggcatcggactggtgcatctacatgacgtggcctcttgtttaatcgtcacctggctttccaatttccaaataaaatctactaagctcttgctattttaagctttttatctgctaccatatgtttcaagttttgatattatcttcaaaaatatgggaaaataaatacagaaaaatcaaaaaaaataactgtgagtatgaaaaatatggggcgattattggatgataaaaagaaggtatgaaatttctgaattgaaaaaaatacatagaaaggaaattagaagaggggataaattggtgaggtaaattttgaatcaaacattaaattaacaaaaatgtagtaaaatagggggaaaaaaaagttttttttttttttttggaaatgtgtatgggctagtagcccaaaaacaaggaaaacacaaactattggactggactgatcaaaatagttaatgagcggttttggtttatgtaaaaaagagaatgggccttttagatagactctttaaatagaatttgacaatctcttaagttatctatttatggataaataagtgatccaactttaactaggtgaatttgacaatcttaaactagtagggagtctcactcatgaacattttacatatttatttttaaaatactacactttcttgaatacacagctttttttttgggtgatataataaggtatcttcaaaaatttatatatgaaatcagatcctaatatcttgcttttactgaaaccaaaaattgtgtttacaaaacggctcacatatcggattggcactcaaaagtcaaatcacatattttgccacggattttatataacttcaaatatatggagaatggaatttttgtatttttcaattagaaaaaaatactatagggaaaacagagatgggcaggtctggcacagggcgtgtgagacgtggtcggattgaggcaacctgaattttgcatcttatctaaaattcagatttgaccatcccactcactgtataaaccactccacattatcttttttatttatttcattattactcttttgtgtacccaaaaatgtgagacttattggtgaccatacaagtcataatttattcttgtcgaaattaatttatatataaatgtatgcgtatgtgtgttgtagatacgaatatgtgtcaacgttgctgacactaatctaattatcattattgtgaacaaagagaggcttaagagtgttcgattgaagtagatatttaatactatttgtttggataaggtagtgttaattcaatgcagtgcgcggccaaccaaaaaataaaaagatcaattgcaacgtgtatccagttacgggtatgattgggagcgatagaacttttacataaacatacacaaatcattctacaacactttttaatcaagtttcatagatggttagatgagttctattcgaattaaccttatagtgagttttggtgtggtaaaaatagtgttgattttggattacatatacacatgcggttagttggtggtgttggtgattttggattttggatttcagtgaacagcatcaaaggctccgagttcgacccatgaaaataaaatcagtcaatccattgcttcttcttcatcttaaagcgtcgagtctaatgccgatttctctatggagaatactcatcaggatcatgatacaacctgcaaacatgttgcgttgcccttatcacagagaacagatcactcatcttttttttcaagaactcactcatgcatattaccactcacacatactatcaaataacacggcactaacactaaaacaaattactaagttacaaactgtaccaacacaagatttgcggttatttattcctctaagtaccaaactattcgtgtcctcgttttaaaacatttaaatgcagagacaaaatcagttgaagaagaccttaattagctgcaaatatgcgataatattttcctagtaatgccaagttgccaactataaaaaatgagaagattgtcgaaaagaaccaactaattacaaaaactcatttcctcaaattctggtcacgcttcgctttaaacctgtgtgcttatccattgaaaacaaaacaacatcccacgtgtcaccttctttgccacacgtgtgaatcttaaaccacacatagccgttagaggtaacgtcgttaccgtgtcttatgatatacggaagttaacgccgtttgtttagttttttctttttaacgtccgtgacggtttcataacctcgggaactaagtaaggaagagcttttgaagcagagagtcgttacgtttcaaacaaccgatcatagtcatagacacaattatggtattaatttcattaattagtactaattccctatcaattacaaggaacgcaattacaaaattttgtctataataacatcaattttagaccctcatttcaaggaaaaatgtgggaatgattctccaatgacatatttatgattaaaaagttcatttctcaggttcgaaatattttgaccattttgaaatatactaataatgttgtttaaaaacatatcttattagaatgtttatatggtgttatagtgttgagatattttttttaaatataaataattgagtacaaatctataaatttaaacaataaagagtgttattaacaattaatgataagtagtaaaaaaaaaagaatattcttcaataaaaaccgtaattcatttttttcctattttttaaaaaacaaaacaaaataagataaccataggaaatgccactctgttacaactcagcagtctaatgatatttaataaaataccaattttagtggtttatggtcaacaaaaatagtttacaagcttagctagatgtgaatacatactatatactaccaaactagtttatgatttgtatatgaatcaataaaagcgttagcataattagtatatataaatgtaactgtaattggaccaaagagataaagcatcttgggtttagtaagcttttgagctgatgatgcttatgtgattaatgtgaatataagaattagggaacaatcttgttgttaataacaatacttataacatttaaatgcccttaagtatcgtcataattacatctttgtccctatccttctctttttcacttttcctaatctctaatataaaaccaactcttgtcaaattcaacaaaattctcacacaaaccgacccgacccgaatctggccggtgagaaaatggaggtccaaagcagcagcaacaatggtggtcactcttctttctccagtctccgcgtctacctcaactctctttccgcgacgccttctcgcttatcccgccgcgctatttccgtctccacctcttccgacgagatgagtcgcgtccgcgccgtctccggcgaacagatgcgccgtactctccggtggtacgatctcattggactcggaatcgggggaatggtcggcgccggtgtctttgtcaccaccggccgtgctagtcgtctcgacgccggtccttcaattgtcgtctcttacgccatcgccgggctctgcgctctcctctccgctttctgttacaccgaattcgccgtccatctcccggtcgccggcggtgccttcagctacatccgtatcacattcggttagtctcccgcgaaaatcatcactactcctccgatctgttcacggttttctgaaaattttaatttcaaaatcaaaaaccgtaactgatttcttttctgttacatttccgttcaggtgaatttccagcatttttcaccggagcaaatcttgtaatggattacgtaatgtcaaacgcggccgtttcgagaagcttcaccgcttatttaggaacagctttcgggatctcaacttccaagtggcgattcgtcgtctccggtttaccgaaaggattcaacgagattgatccagtcgcagttctcgtcgtcctcgtaatcacagtcatcatctgttgcagtacaagagagagttccaaagtgaacatgataatgactgcatttcacatcgcattcatattcttcgtgatcgtgatgggattcataaaaggagattcaaagaatctatcctcaccggcgaatccagagcacccctcgggattttttccgttcggcgcggcgggagttttcaacggagctgccatggtttacttaagctacataggatacgacgccgtttcaaccatggcggaagaagttgaaaatccggtcaaagatatccccgtcggtgtttccggctccgtcgcaatcgtcaccgttctttactgtctcatggcagtctctatgtcaatgcttctgccatacgatctggtccgtacttcaaatttattattttcttattgtatatttccgttttcataaagacggcacgtagtctgagtctaaagctgaaaacggcggggcatgtgttgttgtaacgcagatagatccggaggcgccgttttccgcggcgttcagaggatcgaacggctgggaatgggtgacgaaagtggtggggataggagcaagctttgggatattaacatcacttttggtggcaatgttaggtcaggctcgctacatgtgtgtcatcggacggtccagagtggtccccttttggttcgctaagattcatcccaaaacatctacgccagtcaacgcctccacttttcttggtacgtttctttgtcttcattcattcatcaaaaaaacatttatttaattactgtcaaacaaacaatgatgaaatataatcaaatcatatatagttaaaaataaattttggtccagaaagtgagatagaggagtagtagttaggttaaaaggggaccccaatgagaaccgtttcggttgtttccatgatctttttattgatttgaacttttaacgttttctctaaatcatacgatccacgtgatttcattatatatacgtgtccatttcaatatattttaaagatcaaaagcttttggacgttaccattttaaaaatcttctgctatcgatttcgatcgtgacaagggctatgtacgttgtgtaagtatatctcaatgtagggacatggttcaatgtgatttgtatcattgtatggtgtttaagacaagagtcacagagagagcatctgagtccgattgctagatgtcgttgttcaccactggttttcttttctgctctgtgaaaagtttcgtgttttttgattgttcaaagattcaatcttttcaacggtcttgattgtgatggatttggtgggtctctttggttctttttgtgtctccttagtgttaaaaatacatattccacttttttttaaataaaaatacgatagttggattattagtcatccattggacgactagtagttaatcaatcatttttttatttcattttttttgtgaagatactactaagcctagtcggctgatattttgacaactccaacttttcgtaatttccggaacatctggctgagctatgcaactcgtgagttgttaggtaccaggatttagaataatgaccatctttgataaaatacatagaagattggaaaacatatactaacgtttagagccatatttatatgcataatctttgtaacaagcattgttttcctcattaagttactctcatgcctttgtcacaaaatggatcattataaagggggtcatcatcgttcaaccttatccttgctaattttagcacccactaactcacatttgctatatccatcaatagcattgacaaaaagacaaaataaaggaacaaatcctcccactaccattcatttcaaatttggacttttttcactagtcgaatcatctacagttatagagaatatgaccattgaccaatcttattaacgttcgtatattttatcccttatcaggcattttcacggcggctcttgcgcttttcaccgacctaaacgtcctcctaaacctcgtatccattggaacactatttgtcttctacatggtcgcaaacgctctcatcttcagacgttacgtcccggttggacccaccaagccgtggcccacactctgcttcctcacactattctccataacctctctcgtcttcaccctcatctggaaacttgtgccggaaggtaagcctaaagctttcatgctcggtgccagtgcggtggtggctatagccatcgtgctgagctttcagtgcgtggttccccaggctaggaaacctgagttgtggggagtcccgttcatgccgtggaccccgtgcgtgtcgatattcttgaacatttttttgcttggttcgttggacgcaccctcttacgtccggtttggattcttctccggtttgatcgtgctcgtgtatttgttttatggcgttcatgcgagttctgatgctgaagcgaatggatcttttggtgtgaaagatggacaagtcatgaaagagctaattgaagtgtgaaaagtatttatttagtttagttttctaaagcatcatgaaccaaaatgtaattaaactctctaattttttttctacatgagggggtttgaaatattaatgagaaaatattaaatacaactttaggaaaaaaaagaatatgtattttggtttaacgaacgaccaaaatgaaatcggtcatatgcaagtcaatctgttgagagaatagagaaactgatgatatttttgttttaccgttgtgtacaattcacaacacacaatatttttaaatacagtacaaactattaggttacaagtttttgagattgaaagatcaaatctttgtcaaacctataaggcaagatcacgtatgaaatatacatgtgatagataacattaataaatggaaacgttagatagacataggtctctcataaatacgagatggcgtacaattgaaaacgatgggtccccatctttctcacgggacacacatacgtgacattatccgcaacttcatatatatccaacaagatcaccttttctttttcatttttttgttcacaatcacttgtttcaaattccttgaggatatttatacattcttttattatttgcatttatatattctatatatcaatagtactattgaactttcgtaaacaaagaaccatgcacaaaaagtttcagtttattaaagatgtcttcatttttctacttttatttcttatcaagtatgatttagtttatcttattgatttcataaagatgaatgtctaaggtaggatcgaatatgtgatctcaattagtataatcagtccaattattcttttagtgaacactaccaataggcaataattatgtgagtaatttagttaggataacatacataattacatttttatatattttgaagtggatgatataaatctcgaatctaaatgaactgtgtttaagtgggagacgacacttgcttgtattctctctctttttggtaactatattcgtaaggatggggtccaaagaaaagcccaatattttcaagatcgtcacattgttggaagctttatttttacattatttatggatttgtttataagaaatattctgccaataagaagatgtgattctattggcaatacaaagatttgatgtctttctagaaaccccactttactcaaagtaatgagttccctctgtaaaagggttcaactctaagcgtgatcagtgcttctttttaaaactttcctttatcctaattacaaaccttaatattggattctacattggattaactaccaaaattttgacttttgaggtttacaaaaagacaacatgtattttgtttaacaacggccatgaaagaacctattttcttcatttttttttttttttggtacaacctgtctaaactaacaaaatatcttggatttaggatcattattattgcattataattatcggctatcaatttctgaaatgcactagagtaaatgaagaaaactagagcttaatccttgattaaataaattatatagaacacgggaccacgaaaatgtcaacctcttataaaccattcaaagcaaaatctaaggcaagttgtgtagaagatagagtgagcccattaatccatagctatataggtctaatcaattatttcacttttttgttgacatttttatcacgaaatttttttccgacttctcatgagctttgacattcgcttaaagaaaaaaagatctttatgtataaaatagtgttttccaaaaaagaaatcataagaggaaagataggaagaaggataagactttgattctcaccaaacagcgaagtttttggcaacttgcaacaccctccacattttaattatccaaataaagttaaataaaaagttaaacttagacattctattccatgatgttaaaatcttgtcgtcaagttggtcttactcatatttcaacattcttaatcatacaaatacggaatcgcaaatcttatttatctgctttctttcaccaattgtaatagattattatattttgaacaaacaacatttatgactttacaatttaacaaatataagatagaaaaaaacaagttaaaaatatataatcatctgttaatatggcattaaccattcccgccaaatttccaaataagttgtataacaaaaaaaaagagcagacttgagaaaaagcccatcaatattcgaatgtgatagtacactttaggcatttaggcctttggcccaaactaagtatgttgtctccttcgctgccaaggatgaacattcttggtttcacggtgaacttcttgatccgatgcaaagtcttacccagaagaagcaatacgagttctctctcccgaaacatctccgtactcgccagttatgatcaggaggaagtatcaccgggacgatatagcaatgagttttcgaatcgtaacttggtgcacgaaattttacagctttgtgctagaaacggagctgttatggaagcaaaagcttgccatgggaagattattcgtattgatttggagggagatgttactctgttgaatgttcttattaatgcttattccaagtgtggttttgtggagcttgcccgccaagtgtttgatggaatgcttgagagaagcttggtttcttggaacaccatgattggtttgtatacacggaatagaatggagtcagaagcattggatattttcttggagatgcgaaacgaagggtttaagtttagtgaattcactatatcgagtgttctttctgcttgtggggtaaattgtgatgccttggaatgcaaaaaattgcattgtttgtcagtgaagacatgtattgacttgaacttgtatgttggtactgctttgcttgatctttacgcaaaatgtgggatgatcaaggatgcagtgcaggttttcgagtctatgcaggacaagagttcagttacatggagttctatggtggcaggttatgttcagaacaagaattatgaagaggcactccttctttaccgtcgagctcagagaatgagtttagagcagaatcagttcacattatcttcagtaatttgcgcttgttcaaatctggcagctttaatagaagggaaacagatgcatgctgttatatgtaagtccgggtttggttctaatgtctttgtggcatcctctgcagtagatatgtatgctaaatgtggaagcttgagagagtcttatattattttctcggaagtgcaagagaagaatcttgagctttggaacacgatcatctcggggtttgcaaagcatgctcgtcctaaggaagtgatgatcttgtttgagaaaatgcaacaagatggaatgcacccaaatgaggttacttttagttccttgttatcggtttgtggtcacacgggtttggtcgaggaaggaaggagatttttcaaactcatgagaaccacttacggtctgtcgcctaatgtggttcattactcatgtatggttgatattcttggtcgtgctggtctattgtctgaagcgtacgagttgataaagtctattcctttcgatcctacagcttccatttggggttctcttctagcttcttgtcgagtctacaaaaatctcgagctggcagaagttgcagccgagaaactattcgaattagaaccagaaaacgccggtaatcacgtcttactatccaatatatacgcggcaaacaaacagtgggaggaaatcgccaagtcaaggaagcttttaagggactgcgacgtgaagaaagtaagaggaaaaagttggattgacattaaagacaaggtccatactttcagtgttggagagagcggtcatccgagaatccgtgagatctgttcgacgctagacaatctagtaatcaaattcagaaagtttggatataaaccaagcgtagaacacgagctgcacgatgtggagataggaaagaaagaggagcttttgatgcagcatagtgagaagctggcattggtttttgggttaatgtgtttaccagagagttctccagtgaggattatgaagaatctgaggatttgtgtggattgccatgagttcatgaaggctgcatcaatggctacaagaagatttatcattgttagagatgttaataggtttcaccatttcagtgatggtcattgttcttgtggcgatttttggtgacaaagacaaactctgttttattattgatctcacagataaataaattattttttccaacgaatgttttaaattatgattgcgtcaatttgttgggcttattggccaataggcaaaacgaagagcataacaaagcagctctcagagaggcaaaggtaaaacttttcaaggctttgctgatgattttcacttaattactacctagttaattcgtagacgctttctgatctttatgatatagatcaaagagcttaaggctctcataggtcagctttctggaaggagttcactgtattgttcagatgcatgtctgaagagatatctggaagcgaggaattggaacgtaggcaaagccaagaagatgttcgaggagacgctgaaatggagatcgagttttaaacccgaggaaatctgatggctatgcatcattactaaatcttggaatccttttgagacttcctatctaaccaaaacttacccgttgcgttttgctttttactagaatgaagtttcaggtgaaggtgaggctggtaaagtttacaaagctggattccatgacaggcatggaagaacggttcttatactgagacccggcttgcaggaatctaatgatcatttttcttagttaatgagttaacttcaaagcacaagctaaaacttccattttcattgacattttttgtagaacacaaaatcattgtatctcattgcgaatgctattctgaatctgccagaggatcaagaacagatgtcttggcttattgacttcacgggttggtcaatgagcactagtgtgcctattaaatctgccagagaaactattaacatactgcaaaatcactaccctgagagactagctgtagctttcctctataatcctccaagactctttgaggcattctggaaggttagacgaatcacttcatctatgactcatagttagacaatacattggtttggttaagacaactttgtgtgtgttttgttcgtctatatgtgcaggaacatgcaaagacattcgtcaaggtgaagtttgtttacccaaagaaccaggaaagcgtggagcttatgagcacatttttcgacgaggaaaatctcccaaccgaatttggagggaaagctttgttgcaatataactatgaagagttctctaagcaaatgaaccaagacgatgttaaaactgcaaacttttggggattgtgtaacagtaacaataaccagctgcacgcgagcaacgggttttctggagctgagattgcccctgagccagtccaaacacacccttgactgtttttaaaggcaatgtattgttataaccaacccttttgaatcttagctcttgatgctaactagagaggttgtatgatttagacatagcatttgaataaaataaagaggggttgtgtgtgtgtattagtaactcttgcaaggcttgtaagtgaatccaaaaactctttacactcataagcattttattaacaggaagcagaaaataagattcacattaccagcaacaagctttgtttctttcaatctgaatctgaccaaacacaagaagaagggaaaatgaattctttcaaaatttgaaggcacaaagagattaaaaaaagtacataaaacaaaaattatactagacagcagtattagcttagactatatagcttagagttctgcagtcaaaagtgatgtgcaacggattggagttagagcctagagggagagagagagagtaggcaatttgaatgaaactagataatcctccttctgaagtttctggtggttgattgataggtgcgaaccagcaggccaaccccaatgccaaaaacctacacagacaccaagaccaattcccacaccagcgttgaaccacgacatctcaccatcttcaccatctgcgtactctctattccaatacatgtcgctgtgttctccttcatattcttgtttactgaattggaaataggcccaacaaaatgcgacgaatgttagggcccattaatggaaaacctatatttatatagataagcaattagggattgcgttgccgcttagcttcgtctgaaaaaagggggatcagttccgtcgccgcttcttcgatttttgacgccgccgcttcttcttcttcctcgcaggtacgttctgggtaacttagggattgcgtcgttgtcggaaactgcaaaagcttgtgctgtaggtttcgatttgttgtttttttttttgtctctgtagcttttgaatcttaggtttggttagattcgttaataagataatggaaaagttatgaaatgggttgatttttattaccggatactgccgctgcatcttcattcttttagttttattgtatcaatggcttcgttgtttttataatcacattaggcctctgtcaagttcagtgttatggtgatgtatatttcttgattcatttgcaattctctagacattatttgacattgcatttacatgtgattcctgtgtttgtttagtgttacacctgaatgttgatgtttaagacacaaatcaactatacacttggttgtttcttcatttgtcatatgcttatggatctctattgtttctatttgacattgctgttcatatgtttccttgaactatgattataacaatcgatgctttaggtgcatttcttgatacataaatggttttaatttcatgatgtaattgaatcacggattttgaaccctaactaaagacatggaatttctttggtttttcccctttcagcaggtaagtcacacaggtaactgaaagatggggcgtgttagaaccaagactgtgaagaaatcttctcgtcaagtcatcgagaagtactactctcgcatgactcttgacttccacactaacaagaaaatccttgaagaggttgccatcatcccttcaaagagactccgcaacaagattgctggattctccacccacttgatgaaacgtatccagaagggaccagtccgtggaatctcactcaagcttcaggaagaggagcgtgaacgccgcatggactttgttcccgatgagtctgccatcaagactgatgagatcaaggtggacaaagagactcttgagatgcttgcttctctaggaatgtctgacactcccggcatctctgcagtcgagccacaacaagctatggcaccaatcgctgctttcggtggtggcagggcacccagaagatactgagatggctttgttatcatcagccaatcaaggcaaacgactggctctcttttttcacagttagggataagaaagacatgtgtgttcttggaaagtttattgtttcttttgattcaagtttttatgtcttaaactcagagtgagactctttcgtattaatgggttttgagttatgtggaaccaaaattggagttaaaactttcgatagtaacaatatcttttgcttatcagatccgagttgattcatgggggagaaaatatcgaaattcacctgaaactttctcgaaagttgggttaatacttatttggactttgagaagggcaatttggtaaaatttcaaaagttataaggattatgtttcgttataaccagagagaagagatactagagagaagggaaagatagagaatggataatggagggagcgtgttgtcgctctctgctccacacttcccttactccgccaccattctccgacgtcactctccggtggcttccatatctttctcccttaagcaaccaccaccgcaaccaccagaacctcctgagagtcctcctgacctccgccgcccggagaaatctattggttcttcttcatcttcttcctctccttcccctatcccttctcctaaaacccctcttaagattaatccactcaagggtttaaccaatcgctcttctgtgtctcctcttgttcaatcagaggtttcgagtaaagtttcttcctttggctcctctctagcatccaagctacgtttgtccagcaagctctctcctcctcctcctcctccacctccgcctcctgttgaggaaaccacccaattccgagatgagtttcggagtgacacgaaaccaccggaagaagaaactcgaaacccgcaacaggaattccgacaagaagggaagatattcgttggtaatttaccgacatggataaagaaaccagagtttgaagagttcttccgacagttcggaccgatagagaatgtgattctaatcaaaggacatcacgaggtcgagaaaaacgcgggatttgggttcattatttacgcggcagagaagtctgcaatgaaagctgtggagttcgacggcgttgagtttcacggcaggatattgacggtgaagctagacgacggaaagaggctgaaaacaaaggctgaacagagagtgaggtgggtagaggaaggagaagaagacacgaaaatgtctaataagtcgtcgtggcatcaagagagagaagggtctcgaaagtcactacagaggattttagataccaatggagataactggcaagctgttatttcagctttcgagaagatcagcaaggtttgtcattgttaacatcaatcacttttgctctgttttttgacttatcatttggtcaattgatgaataatgtaaaaagtctcacttatacaatgtttatactcagccttcgaggacagagtttggtttgatggtgaagttctatggaagaagaggggatatgcatcgtgcacgtgagacttttgagagaatgcgcgcgaggggtatcacaccaacatcacgtatatacacaaggtacaaaatgtgttacatctcttgttcagattctgcttagtcaaacatttcatggataaagtctttgttatgaattggttcactctcttgtctcatttccaaagtaaaattgattggtatcttttgtgtaattagtttgggattcctcaaaggttaaaagaggatttgtttcatgcagccttattcacgcttatgcagttggtagagacatggacgaagcactgtcttgtgttcgtaaaatgaaggaagaaggaattgagatgagtttggtgacttatagtgtaatcgttggaggattctctaaagcgggacatgccgagtaagtaaaatattgtgcctgcctgtattggtaaacgttgttaatcattgtatatgctaattcgatctgatactctgttgtctttggaagagctgcagattactggtttgacgaggccaaacggatacacaaaacccttaatgccagtatatatggaaaaatcatatatgcacactggtaagcattgatatgatttctgactctattagtgatgtttgtcttcattctaaaagattatggacattttctcagtcagacgtgcaatatggagcgggcagaggcattggtgagggagatggaagaagaaggtattgatgctcctattgctatctaccacaccatgatggatggttatacaatggtcgctgatgagaagaaaggcttagttgttttcaaaagacttaaggtattatttggctttagatttggattctttcttacttcctctttagaatctgagcaagtgaaaagttgatttacttgttttgctataggaatgtggatttactccaacagttgttacttatgggtgcctcattaatctttatactaaggtaaggggaacaatagtgttgtgtataaagtgaaaacattcatcttggtattattgtgtcttgatgcttgcctcctgttaggttggaaagatttcaaaagccttggaagttagtagagtgatgaaggaagagggcgtaaagcataatttaaagacttattcgatgatgattaacggatttgtaaaactaaaagattgggccaatgcgtttgctgtatttgaagatatggtaaaagaaggcatgaaaccagatgttatactatacaacaacatcatctcagcattctgcgggatgggtaacatggatcgagcgatccagactgttaaggagatgcaaaagctgaggcatagaccaaccacacggacatttatgcctatcatacatggatatgcgaaatccggagacatgaggagatcactagaagtttttgatatgatgagacgatgtgggtgtgttccaaccgttcatactttcaatggtttgattaatggtttagttgagaaacgtcaggtatgtttcacgaatctatgtcttgatgttttcctatagagattatctgattgaactaatctcttgtcaaattatttttgtagatggaaaaggcggttgagatattagacgagatgacattggcgggtgtaagtgcaaacgaacatacttacacaaagatcatgcaaggctatgcatcagtcggtgataccggaaaagcctttgagtattttacaaggcttcaaaacgaaggtttggatgttgacattttcacttacgaggcgttacttaaagcttgctgcaaatcaggaagaatgcagagcgcattagctgtcacgaaagaaatgagtgcacggaatatcccgcgcaattccttcgtctataacatattaatcgacgggtaatgtatctggttttgtagccactttttggcctgcttctagaattctcattcgtttccctctggtttattttagatgggcacgaagaggcgatgtatgggaagccgcggatttgatacagcagatgaaaaaagaaggtgttaaacccgacattcatacttacacatccttcattagcgcttgttctaaggccggcgacatgaatgtaagtttccattcaagaagcagattcttgtcacgggtttgtaacgagaaataaaacttttggaaatgtttggcagagagctacacaaacaatcgaagaaatggaagcactaggtgtgaaacctaacatcaagacatacacgaccttaataaaaggatgggcgagagcatctcttccagagaaagccttaagttgctacgaggaaatgaaggcgatggggataaaacccgacaaagctgtgtatcattgccttctgacttcgcttctgtcgcgtgcttcaatcgcagaagcttacatttactcaggagtgatgactatctgcaaggaaatggtggaggcaggcttgattgttgatatgggaactgcggttcactggtctaaatgtctgtgtaagattgaagcttcaggtggtgagctcactgagacgttgcagaagactttcccacctgattggagctcgcatcatcatcaccatggcttcttagatcaagtttctgatgttgactccgatgaagatgatgttgatggtgaagatggtgaggacgatgaagatgttaactctgtttcggatttattatcaccttacaagtaagaaaaaactgatattgtaacaacttaaggaaagagcaatatcagcatatttttgtaattttgttttcttgtgttttacgtttttgcaaaataaaccttattgaacgtacgatttcttcataaaagcgaaaataataaaaaggaacctaataataaaagacattagaaaataaatccaagaattgatgaaagcaactttataaacattttgatccatcactacatgtggttttgcagattagtttgcaattaaccgccaaaaatggattgaaggatttgacagatttggtcgaccgtcttaatcttgacataattgatcttattcttatatgattaggataggagcataactgaacttgatttttttttttaaaaacgaaaggaaattggctctaaagaaacttatacagattacaatagtggactagtgtacagcattatacagattatacaggttatttctgtcagtaaataaaaccaatctaatctaagtatcgatcatgtgcatatccaaatactaacttataatgtatctgtaaaattcatatctaatgatatagatactaggaaaatgtagtgtatatattaagaattcaaacaaaactgtactatatatttcactgagtgttaacacctaatagaacaaactacattatcttaacaacacatgtattgacagtttgtttacatttatttaatttatttaaatggtattcttgtgtctaacgcatccacgaaaattaacatttataaagtttcttttatatatagttttgaagatatgcaaatctgacttagaaaacagaaaaataattgagtgtcgatccttaataaaacagtagtcagaactctcctaactcatgagcccatgcctttatacgtatttaattttataaatactcaatataaaatttggccaatacgttgcatgataggttaaagaaatcatattaactataaacatgtggttcgtaaacgtacgtctcacaagcaaagtcacatgttataatggttgtataataaataaacattcatacaccaaattaatcataatgtcgaaagacgcgcgtataattgttatctatcattgtgtaaggttaggataagaacaacaaaattgcattatataatgaatcaatcatgtacgtaatttaatgttaaaatgttcatgtctataacattataaagaaaaatgtttatgactaggaaggccatagacaaaaggaacaatatgacatggaacaagattcaatggatctcccacttttgtaccttattctcttctcccactttaacttttcacctaactaacaaatagatgaagtttagatgaaattggttaacctaaaatttagatacatactatacagtgtcctttctttatgtagactagctcatttccactatgagtttttggaagctgccggctaaaccacattttttcatcgcactgctatctatcgacatttaattctcgtatgaagagattaatgaagtgcggggtcaagaaagaaaatgttttgttttcttattcatcaaatcatttgaaaaaacgaaatagaaaagtaacaagtcaaaatctagttgagacaaagagaagtagagaggcggtgcccatgtggtctcctataattaagtcctaggtacacatacatgaccttaaacgttacattattattcccattctaattagtaaagacttctcttatcttcataactatttcattcataaatatgaaccatttttagacgagagttttcaaacccatatttactgctgacaacaaaactagcctttattgttattgtaaaataggaacatcagaaaaaggacaattctttatttttagtatttgtcccatgcaatatgttcatactactgcattctagagatgaacctatttataagtaggtttccactttgcgctcatgcatataacttgttgaacgtgtacgaatgtgtaactgtgtatctatgtaatatagaagacacatattaaatatttggagttttggaccaaacaaaagggacccaagaggcccctataagttatgtgacatgataattttatattagttctctagctagtttattaatgactaattatataggtataataaaacactcatatgagagataatgttaagtagggtggtattatagaagactagttgctaattactacaaagctaaataagtaatcatgagggtcaacggggtacatgttgttccatgcattgctggctttgcctgttgctcgatgatttcgagtaatgctcttttcatgcaatcttgataatcatatttttaaatcaactaacacttgatgattgtacttttccttgttctttttttttttcaaatattattcctatcttttataatagtaagctcgatgattattcaacaaaattttagtttttaattagtaaactccgtagaatcatatgagttgtttgataataggtataataagatatactatagtatattagtatccgaacagtcatataatgaaaacttttaaccaaccaaactaattataacctttttgtaccaacccacactaatgattctatctattaactggtttagctcaatcctttaattttctgtgctgatggagaagatagtaattagtagaagaaagacttatgtgtttggatactttagagaagaattatgttttaataaaaagaaaacattttagtatgtctctatgattagtaccaaatggtacaaagtccgacatacgtatcacttggtcgcacgagcacaatattcgtatctcttttgtaggttttatgttaccaaagtgctgagatttgttactcctctatcatatatagcaaaccattagtaaatataattatgacttttatcaaatttatattttcttttagtttttatgtaggttttcttcttaaatcaacaatcatttaaaacaagattgtttgtaagtgattttttaaaaaatcacagaaccaaataaatcataggggatattccagtgaatcgggatgatgtcgtctaaagtttagtgggttcggaaagcatcgatctattctacgaacaagtgaaccctgcccgaaaagctttaggtcaattactatgtcttgaaagaaaaataaacatcaatacaatctcatgtttcgaagcttgaaaaaggtagcatttttctcataaaaccttggacacttccacgaaacaaaatgcatttatcttgagttctctagctactaatgataatgcaaataaatactgaagctaaacaaaatgtaaacaaattctaagcacaatattgaccatttatcaaatctaccaacttaaaagttagtaaatatcaacatcaaaaatatttgaggtaaatttcttaaaatactttatttagtaatggataaaaaacaaaaaaagtttaaatcaccgtggaagttgttgagaagttacttctaagatttcttacaactgtgcttggcatttattatttcttacacagttaaaactcaagtagaataattatactaatgtcggtctttagcaaggggataaaagaggcatgtccaagatgttcatgtattataatttcggttttcgttgaattgttgaaattgtgaacagtttcataaaaccaagtaagagtattcaaataactttttgttaatcaactgtataaatagggagcaaatttaaaaggataatatggcaaaaatgtcgtatttgaacataaaattaaaaagatgtaggaacactgtagagtattccaaatattgcatgttataaactttatttttagacatcttcatttgcaaacacgttacaagttgaatagtctatcatgaacactgtagagtattcaaagtactgtaaatgaaaaaatgtaatttatatatagtctaatgtatttaaaaatttaaaccatagagaggaatatactgtacttttgtaaatttggtcccctaactaaagatctagtagtagaagatggaaatccacagttaatatatgcgtgattcaacggtgccctctttaattcctcacatgagttttgcacacaatctttctctctctttttcttattctatgttcccatatttatcccacaaacgttgatccaatatcttacgcaaattaaggcaaaacaggaaatttttgcaaaagagaaagatatggaggtgttgggtaaataaagttgaaaatgtacgaaaataatgatgcatttatttcacaacaatgggtttcaacatcagattgcttctgtttaaatcttttactactttcagttttatatctctgataaactctataatattgactgattcctaaaggacactgtctcaggatctatcccctacattcttgttctaccttgatggatcatatattttaccttagtaaagaaaatcgtccaagaaattcatcattaattaaaaacatacatataacatagtccttcttcgaatataagacttcaattcctcaaaaaaaattaaacgaaataaattatttttaaatatatattcaagaaactgatgttcatcgagtttaattattcagttgaattacaattcttacttttagaaatttgtattgcgaccaagaagaaacattctttaagctcaaagcttcatataatttacacatacgtaatttatagataacacgttgaccgagagtattagaagctcacagtgcttataggaaagtcaaaactgactgcatcagtacgatttttacgtgttcgtttatggattatataatacaaaatagcttatacatcagttttaaaaaaattaaacaaattaattaagatgtaaaacactattaaagtcgtaaagagagagtaattaaaaatgagaagaagatttgacaagacgagccaatagacaagaatgtagtaccgtcaatcaacctttataaagtagtagtagtatataaaattactaaatgtttattgggatttgtttttctgcaacattttcttgtaagcaatcgtttttaatgctttgtgttctgcacagtgctttgtcattggctcgggactaacattttttctagtattattttattttattttaattaaaatatttaatttttcttgtcttcaaccaaattgaatgctactgctgtgtcttactatacttgttcatgagtataatattatcatcttaaatttagataacaaagacaaaataaaaattcaaattcccatagagccattatatcgtgtttgcatgaaacttttgttagttaaaaaatacaaattcaacctctccaacaaggcaataacaacccatggagctaataatatgtaaactgcatgaggataagtgttttcgtcacacaagaagattgtcaatttttcaaaacagcaaaatatttgtaaaaaacataattcttccactcatgtgtatatcaataaaatcacaacgacaaaaacattattgtaaaatgtagcaataaactatttgtaaaaataatatatctccattataaaaacatttttgtaaaattgatcaattattagatcgaatagtgtagaaaaaaccaatattaaaaatttggattgtagcaaatcaaatattggaaaaaactattgaaatcccggttgaacagaaaacgaatcgaaaaagctaaccacaaagcaaaacaaaaacaaactatcaacttcaatcatcgtaatttttatagttaagactttagactaaataagtaaaagcacttcaaataactaaccagaaaaaaatggaaaattaacaacaaatagaaaaatatcccaaaattaaatagacacatgacctgaccccaccagctctctcttctctccccatatatcgcattccctccaactccttcctcttccattaattactaaacccaaacccaaccaaagatcttcacaaagaaaaaaacaattggtggtatcaatggggaagaagaagatgaaactctcttctctgttcaaaggcggagccggaggattactagcggttcctctctgttacaatgccaaaactctttcgttccgagtcggcgacgacatgatcaagacggtgaactctgttttcttcgaccaccaccacaacaacaacaatggaggagatttgttggaagcggagacgcctgagtcatggtttactaactcgtccgagacagcgagtcactcaaccgagtcggatcaagaccttgacgctgagtccttagagatggtggttcgtggcgttgttagatcggagcggttattcttcgatccaggagttacgagttcgattctggaagagattgaagagaaatcgaaatcggatttgaaatcgaaggaaacggttgcggtgggagaagatcggagtacgccgattgaggagattagtgtcgcggtggcgatggaatccgaggatccgtacggtgatttccggcgatcgatggaggagatggtgacgagtcacggtgagttggctaaagattgggagagcttggaatcgatgctcgcttggtatttgaggatgaatgggaggaagagtcacggcgttatcgtcagtgcttttgttgatcttctctctggactctctgattccggcgccggaataacgtcggcttcggtatcggattcggctcgttattcaaccgccgtttcgtctttgccgtcgtcgccggtttattcgttatctcaaggtcagacggagattcaagaggaagagagacggagctgttaaaaataaaaaaaggcttaagattcggttttaaattttttaatctccggttttgtttagattaattaaccctttttggattttgtaaaaagtaattagtggttagaggaaaaagaaccattaaatatatatcaaaaatatttttagagccattattgttgatttatgtgtataacagtgccttttgtcataactcgaaagttacactatttttcccccaaaattcatgaaactcagcgaagtttatgccaacagattcagagaaattttgtataacagccccattttaaaaggaaatatacataagaataaattctgtgatacttctttttatttaagctctttattttttacttcttttttaggttttaaaggacatagaattataatttctcattttttttgcaggcatattatatagcctttctcattagatgtaggcatgtagctcctttggcatccatattaaaaatttttttgtcacaaatattggaccttacattttttttccccaaataaaatttggtattacgaattttcgatggttacacaaggactactacactaacataaactgtaagactcattaaatatcatgctcggataattcatgtattaacattaataacatagagattttatttattgatttgactcttaaaagcatcatcacgtaagatatttagcaaaaccctttttgtgatatccatgctggagttaaaatcttgaaaataagcgtaatagaaacacccgtagtgtatgtataaatgtaattgtcatgaacttatgagattcaagttttaaaaatacagaaaaggatagtgtatttacgagggtgcattaaaagagaatgttggtctatagtaacgtttgaattgaaatgttacaaaagagatttgtaatttgtattttgtattgtgaagtgaatggagtaacatgagatgagcaatggtgctgtggtcagtggtcacacacacacaggccctgtgaatcccaacatcatagacctactcacttctctcttatctcttttcatttattactctacatttaattttgggaccaacctagacgacgacgtttatttgtttttgttttgtttgttttgttttgtttcctttcttttcataattttagagctatgcatgttctcattcctcctcaatttcacaaaattgatttttctataggaaacacatataacatagggctggtcctcaaatatatacgagatagtatacaatttggagtttttcaagagtacagaaaaactatagccaaatatttgtaacaaataaaaacacagaactgtgtctgtcacaaacatagcgtctaacagttacttttacacagcttgttttctttgtttctacggtacttacaaaaaccagagtcatttttcgtcttctacaagtatataacaggggcccaaacacagtacatgcacaaaatctaatatctaaatacattacgtcaagcacgagaccaaaagtaaatggatactttagatttgacagtgaaggcccatttgagggaggttcttcgatccggccccacgtcggtttattttgatttaggataattcaaacccaaaagctaaccaaaatcagtatggttcaagtttgttcaactacaagaattttccattcaaattcagttattgactgtatcgtaccagactaaaaaccaacagacgattaacatactgtattacatatttttaaactaaattcgaaaccaaatcgattaaaggagtttcttaaattcaagtagtgttttgaagaaactgaacactataacatgatgtgtgttttgtattttccatttgttcattgggagtcaggatctttaccaaaacccatcatggcatgagtcgctagcatcaagcctcttcgacccatctccattacccgtccgactaatggaaagctaaccgtgtctctgttcctcagaggtttcttgtcccaccttatacacaccattcaccaacaagttaaggcaatgaactaatacaaaaagtcagcgtttatgagaaaggttagctgcagggttattaccagtcttcatgtcgaacgatcttcccgtcctcgacatagagcttaatgagagagatcatatctatgttccttcccatgatcttgtagtgttgtttgttgtcaattagtatctgtttttcccacaagttgtttatgttatatttagatactaaaaaggaaccacgagaccatgttatagtaaacgaggattctaacctctttcttccccggcgaggtttcactttcttgaatatgatattcaactattttcgactcaccaaacacctatagtaaaataattatgatgtgaggttgagggagatagttccatcatcatagtagttaacaaagaagtgactagtgagggaacgagagtttgacaaaaaccttagggagtgaataaaatgctgatttgatctgcttcactctgaaaaagccaagggtcaaaaatagaaatttcaaagtgagtaaatgatctctgcaatagtagaaagaaagaatatttagttggaagattgacatacccctgagcatgcgtcaaagggtcttcaaatgaagcatttggtgcatacatgtcaaaatcgttggcttttgcactagacccgtacctaattcaaaatcaaaactcgcattagatatttagtaacttgatgcttttgtaattcaacaaaaagccatgaaaagacttatcacaatcacaatctacaaactaaaaatttatacagtgctcatgtgtgagaacgacaacaaacttatgataaacattgggatgcaaggaacaagtaggattaagttaagcacacaattgacaccaatttcgtcaatcactgcggatggattcaccatgatctacggttaggcaaataaccaaaaccaaatcgaaagaaaccaaaatgaacaaaacatattccaaaaaactgaaccagattgaatctaaacctatttgtcctagataaagcagtatctaaaccggacctaaatcggacagaacaaaccaagtggataatcaataaggccacagtactaaatttcacgaagaacctcaatttttagaaaaatcaaacaagaaggctcacaagttgagaagatgaggcatgattttatcagcaaatcgcttgttcgatttcaattcgcaagctcctttgccttcgcattcccgcgctggatccatcgctgtttcattttcacatcaccagaaaatcgaagaagaagatgaagagcctctctcatccacaaaccaacaataatcagatcgtacaaggaaacgaacctgaattcggattctggtgttgcttctccacggatgttgtaaagattttcctgagaaaatatcgaaagagacgattgagagatgaacaacaatagaaactaaaattgaagcgagggaaggagtgatctttgttaatagagatgaaactggatcgtggtggattagcttccacgtgacacaatcttctccatacgtaaccgttgattattccaacggagaaaatgtgcctttatttttcctagtcccttttaattattagtatgagtgaaaaatattacaaagttgaaaatgtgattcgtgctatttaatttatgtatcacaaaaatttaaagcaaagatgaggaataattagatttcagatcttcaaacaaaatatacggtaggtgactattctttttccgaaccattttagttaccttcattttgaagcttaaaatttttgtttgactttgacatgtatttttgtcttaacattccaatgctaatcattagtaccattactctgttaatatatactccctcttttgtttattaatctaaattcttgaatggaaaaaatgttgcaaaagatataattttgaagtcttctatgtatttttaagtagttattaatgatgaattgtagatttcaaaaataaataactacaaaattattggtttaaagttgtaaaaaattattaatcacaaaaggaataaatttataatctatttttaataggtgtaacaaaacttaaaatttggaataataacgaacagaaagaataatgtttttttcattatttcatgctataataataatttaatactacaaatgagaatacaaaaaatctcaactttgcgtaaacgacacaaagtactaataaatattataacactaaacgtttggagaagcagaacagctgtttttctctatttattattatttggttctctgataacagctgttttattggtcaactctatttggttaaacttaaatctttgacccgaaacaaaaaaaaaaaaaggccaaaacgaggcccttgattgaattaaaaatctcttggttaacaactatttaaagatacatcgccactttggtaatcaatacgcaaaacgttactaacaaatatgtgttaagcgaagttagttagatcattactttttaactattcaacattttgatgaccccaaatatataaattccaccacttcttctccaccatcacaaatcacattttaaaaagacacttaaaagactcacttctttacaataaattcttcccgaacgttctagactaataaatgtaaatgccacaatcagatcaaatatcttaatcaatgtgacaacacaaatataaacaattttttttaaaaattttataacaaaaaagtacggatggagatgggtcagtgaaccctttgcttgaccaaataataaaaaaaaaaaaaactcaaagggcccaaaagagccgtccgtacgcctcctcctccagccaattggggctttcaaatacacaattcaattctgcgttatacatttatacgcagctgtgagaaagagagagagataaagcaagcaacagaataaattcttctccttttcttttttgttgcaactagtgaaagagaaagagacgatcgcttattttcttcttctcctacactctgcgtttttgctctctttttactccgcattgctcctccgttactatcttcgccggcgaaaatttgttttctttttccctggaggtaaacaagcaactgacgattgacaagttgaatgctttggtctgtttgatgtttatgtatctcattattcgagtcaaaagcactgtagatttcagggttctcttctctttaatgtctctgctgaaatttccagttttttcattgccgtttcttaaaatcttgtaatgggttttagggtaactgttccattgattcaatgttgttcttcttcttgtgatttttgtttttctttcactcttttgtcttgtggggttagtacaagaatggttgtcggaatttcacaaatttgttttactaaaaaaatacttttttctttctttctgggattgaggtttgtgtttgctagctgagaataaaaatcaatctttaagagctgtagaattgaatatctggaagctttcattgcgtagaagctatagcttcttaaggttgatgataagtgaagtttacttttagctaagaaagcttttttggattgttgatttattaggtaaattcgaatcatgtcaaggcctgctccgcttccacctcgttgcccgattccaaagaaactttctttgagtccagttgcagatacattctactcttcttcctcacccattgaatcatacattggtcaatacaagtcttctactcaagattccaggctcgaagatcaacctgcttggcttgatgagttgctctgtgacaaaactgatgggttgctcactagaggaggtcctctgcgccgctcagctagcgactcagttgtgcttttgggagacatttctgctactttttctggttttgatcaaagtgaggatgaagaaagtttgagttctgaagcttgtggggacttggagtctgcttgtgtatatggtcccaactcgccaagagcaaagaacaactctagcttctctaacaaccctattgcttctgccttttcggattatggttctcagacaccgcctcagaacttggatgatacggtgaaagggatcaaccgttcacctgttgctgaaaatgcgtgtggttcaatgggcataccaaatgcaaaaaggtgagagaacattaatcttcttaagacattattatttaacatcattactttatttgtgtagaaattgataagctttggtcccttaagagtagtattctttatcggctaatgttgctaatattaattcggctgcatcaagtctagtccataagctcctatgtggtacctctgtgtctattctagatcaagatacatcggtttctggtttgtcagtgagaaggaagaaaagaatagttccatatctctgttttacacttggatttgtagttggtggggattcttatgactactaaattggcagaaatatgtgtctgtgtccacaagagtgctcttagaatgccaattcggtacttttacattatcttgttgtgtcatatgttgatttttctatctttactctgccaggaacccgggacagcgttcaagggttcgtaagctccagtacattgctgaacttgagagaacagtaggcatgttgcaggtagagattccattcaagctgtgcgctttcttaaaacacaatcgttattttttctgtggacagttatatgtacaaaatgcaatgttgtatgttagatctctgtggtaagatgatctagttgttggtgttactacatagttagatgcagagcagtaaaacattatacagaaacctagcacattgtttttggtagtaaccaaatagcaatctcgttttgcagacggtggaagcagatttatcagtgagagtggcttcacttcttcagacacgagcaacactgtccctggagaatagccagttgaagcagcagatggcgatactaaagcaggacaagctcataagggaaggtaaataaaaacatgacataaaccacacattcaaggagtctgaattacagcttgtgatcgatccactgatgcttgttccgaaatattttctgtaggtgagtatcagttactgaagaaggaagctcagagattgaaatctggattgggatacttagggagcactaacaacagtaacaggctggtgaggtcatattctgctggttcaaatgtagctccaaggacagcttcgtcccacttggactggaatttgctagatctgaccaaactcaatctcaactaaagacaaaaccctccataagaataagtagcttaaggaattcaagagttaacagttctatgttcggaaaatgaacaaatctttgtcgatttgtataaatatgatttaggagtataaagtatcccactgtcttgggatgtagtcttttttagctaaaatgctctgatattggagacattttaagggttcctattttgtagctcattgagtaattgtggtggctttgactgagagtattcttctatttctggtgttctaaaaagctattaatttgatgaacgttgggatctaatatcactaaaatgtatgcatttgagtattactataacaaataatttgggcttcatgtttcatgttcaacttctcaagaaactcaaaaacttcacttctcagcaacatatcttacacatcatttagaatgcgatgctgtagactcccgattagatttccttataaaataatataatacagaccaaatctgaggattcaaggttaatgaaactgctaagcaaaaaacttattacatacagtaacaagactttaaaagcatagtcgctggagatgaatatttatgcacacaaagaggtgtgtaaatgggatttagccccgaagtgatgcacgtggtaccgctggtaatccccattcatcttcagcctgttcatcattacaccatcataaaaatctctcagcagacatataaaataagttccaagtccagagtgtgtaatattcggtagttattgagtaagaaaaatatgcaaaaagccatcatcactcatttagtaatcaagcaatttgtgtgaataaagactagaccagcctcataactaaagataagtttgtaataggaggacatttgtttttagaggtttatcatctgaattctcaaatgagtaagtggaaactcacctgagctcgtccgggtggagctcctgtatgccccattggtgctgaaggcaagttgagctcatcattaagatccggttccttatcgggttggagataagaaggcactccgtctgcttcagtctcgttccccatgtcagcttcaagagcatcaagctctgaattcacaaaccgatataacgtataaggagcagaatttaacaaacacagggaaattgtttctaccaaccccaaggacaagcagcataaagagcagagaaagaacttaccgcccaggaggtcatcttcgtcaatgtcatcaggaacattgtagctcctaccaagtgtctcttgaatttcagaactctcatccattaagtccatcatatcatcttgcaaattctgtggtatacaacaaataattcttaaccaaaacagtatctaggaagcaaacacacaagagaagcttgaataagaaccaagacatacatctatatcttgaatcttgacggttttcatcattcctttcagctccttgttagcagattttagcgctgtcatctgcatattcattcatgtacatgaggttttggttcaatgtgctattttttactaagaagataagaaaaaacttatgagtacatacagtttgttgagcatctttaaggccttcagcagcaaatgaaacttgatcaaggttaaaagtctgattatagagcatgtcacgttgtccttcatacctaaggaaaaatggaaacagttggtattaaaatccatatcatcaatgtccattgagagaagaagcagaaagaaaacactgacatcttcttttgcttgagaactctcatagcacgagctttgatagcttctagagcaggaccaggtctagtccttttgatctgatctttgtatttgcagagctcagcatcaagcctcttaactttctcttccactgaatctcctcttttattgatctgaaaacatcaaaactggaatcaacatcaagtagctcctcaaaagttttaactatgatctcaccacccatcagttcatctaaaatccaaagctaaatcgctatatctcgaataaagctgaggaaaacaatgaaattgaaagaaacgagagagagagagagagagagagagagagagagagagagagagagagagagagagagagagagagagagagagagaggaggaggaacccgatcagaggcatcttgaatagacggaggaggctctttgttattcttcgctccaaagattctcttcatgtttctccttcaaatcaactaatctctctgcgctataatcagatgatacagacacaaagccttctccgaagaagaagaactcgattaaacttatttgcgtccggccatagcttatatattcaaataaaataaatcggcatcatttgtaaatcttgacatgtaaattatgtcctttactttttttggtcttttttcaataacaggccttaaaacactttgggcttgtagcctggtaattctcggcgccggctcttttttttactttgttcccaaatttttatttattatttatttttcattaacatatagtagaaataattaaatttcttagattacgattaattcataattattaaaaataattgatgtaaccacaattttattgttttgttaataacatgtgaaaaacctaaaaatatcaaattcttttttccaaaataataatctattagaaacacatgaatatttaattatttataaaatttcttaactgtttagttttgtataagatatggagaactggtatggaaaactgaaaatcgaccgagatgacaaggctaagatatgagtctaaaaaagattatttttcattcttatgttttactttcttttttacttattatttgtttgagacagagttggaagatggaagccaaaactggcttaactaagccaaaaaatttatttttcgttcttatgttttgcttctttttttctacattattgctcgacgcatggacgagcttgctcgcggtggtacagacagtagcacactgccgcaaccaccacgatcacaaatgcaaatgccgccatgactccgaacaacaccactaagccgaaagaagagtgagactgatgtggtggaagcggaaagtcttgattcgttgagttaatcatggtgagtgagttgcttttccttcactcttcttcttatcattatatagaacagtgaagatcaaaacctgcaacctacagactgtgaattgccaagagtgtcaattgtagttgaaaacttgtttttggtttttctagtaagtttgagataaacgtattacctagaattcaaaagtgatagagccgttaaaaattttccgaattgttgatctttataggttttgaattgttgatcttttattgggaattctagataatgacaaggcccgcctcgttgcccgattccaatgaaacaagtcccgttgcatattaattcataatcattaaaaatatttgatatgtaaattatatcaaaaaatttgttttgttgataaaatgtgaaaaacgtaaatatatcaacttttattccaaaataataatctattagaaacatatgagtatttaactatttataaattttttttactgtttagctttgtattgagatatggaaaaatggtatggagaaccaaagatcgaccgagacgacaaggctaaaatataagtcttgaaaacattttttttcattcttatgttttgcttggtttttgcttattatttgcttgggacgaattagaagatggaaggtgagactggcttaactcatggatgtttcttaacattttgaaggtttgagtggttttctagacacatccacttatgtattgattgaacattgtaaataaattataacttgtaattttatttaaatggatgcttaagtagacgatgtcacactgatatcggtattctgaatagagagaaaacttttctattatatattgattttggttttggattcaataacatttaagaaaaaacagttaccgattttattaaatacttataataactctggtaaatttcctaaatacaaattattggagtgaggagtaaaagtctatctccacagaagacattatgaacatcaaattagccagaaaaacaccaaaggggttatcaagttataaacatcaaaattcacacagaaggaaaactccttttctctatacacttctcttaaactttaacccccaaaagctcagccatttcgcaactaaacccaccactattgctgaattggctcgccaatgaccaagccactgtcacagacacagcagcttctgacacagttacttcggttgcagaggattcaaacatattaggttggtggtgatgaaggtgtttcgtgtagtgaagctctatttgaagacggtgatgcaaagatgaaaccagtcctttcttcatatcagctttcacttgctgtattggaatcgctgcgagaaagctctttatatactctctacatgactctttacctctacacactacttcttcttcttcttgttcttctgattcttttgatctttcgggttgctcagacttgttcttaccaccttgtttctggtttcccatgtcggctttgttgtctttgatgacggatggtaatcttttgatctctgcatctttgtcaaatttcaagacatacgcttggttgcaaccctcatagagcctctctccaagcgtgtctatgatgtaataagcatcgtggttcacaaggagtacaaagaaatgatcattccagcttacaatgtagatcacaggttcgcttgccgactcttctggttcttgtttcatgagctcttcccagatactgtcaaaggacattacacctttgagaaaatctagactagcatcttcttttccttcttcttcctctgatttctctggatggaaaaacccgatgaatgatctttcagggactacacagatgggtctgacttttgcctggagaaccgtctcgagatcgaaatgtttgtctggaaaccgttcccggtattcctcgttttcacacatatttctccactcggatgatccttctctgataagactgtcaaactctgaccttgttgggattatgtctctgttggatcctaaccaatgtgccatcactgcaactagagctgtgcaggcgctttctccagcagctctctcgcttctctgatcaattgatgcgagaaatactcgagccgtgagtttcatcagcccatcacggcttataatctctttggtctcccagctaccaacaacgaaatcatcatctccaaactgggataatggtttcatgattgcatcatcagacctataccactgcaagagaatcaaccaagagttaagaaacaatatattatgaaaaccgagaactataaaacaaacgtagtcaatgaacttacatcagagttagactcatcggatgaacttagttgtctgcggtcaaaatcgatatcatcacctccttcttcaagacaatccttcttaagaagaggctcgcctttctgtttaggagatctaaaactaagttttctcttcttccaagataacattctcttcttagacatttgtcctttcgcctgctccaagcttactacatcattggaaacctcatcactgcaatgtcctgtctctgctaatggactgcggtgactgtaatatatcaaatcctcgtcttcggggtttgtaacagtatgaaatgagcctctagcccaattagcagaacgaagtgttttgtaattaactggatcagctaagctactttcattctctttgttctcttctgattcatctgcagcatcaccttcatctaaagaatctgtatcaaaaggataactagagtcagaatcaagatttctctccggacttttgccgtcacttccgcttccactgcttccatctttctcactctccttttccgatgcctgtgtactagacatgcaattgttgaaggtcttcatctttctcaggcctactttaacaacagactcagctttctcagcctctgcggaaagaggagaccatagaacaggaagagcagacctctgtctttcaggcaacgattctttaggagaaaactgaagggatatctgaacacaaaacagacaccacaatggttagagaaatgaaacaatgataaattcagagaactagctaacaagcaaatcaatgacgcacatgaacatgtggacttctcacagatgatgagtcacaatccttgagaggcactttgacttgaacatcatcttctttcatcaatgaaaagtattctgcaatgttcagtgatgcctttccaaagctacgaactttctccttcgatccttgattcagtccctacacaacaaaaaaaaatccacaaaattcttaacatatgttccaaaaatctctagagtgaatcaaaatctaaataacagaggacctaagcaaaggtacaacctttaaacagaccctgatcattcagacatcaaagtcaacgaaattaaaagaagataggagatagagagagagactaacactgaagacggttaaagaaacgaaccaaggaagaaacgatccttccttgtaaacagagaattcgcaaaccctcttaaactcttcgttccattcaacgacgccatcgccgcgaaatccaccttcttcggtgagattccgtacgacggagcgtttgagagtaaccgatttaggtcctttccatttgatctcaacaacaggtctcttcctcgttgttgtccctcctcctcgctgactctgatcagtactatcatcgccaccaccatcggaatccaacaaaccatccatctggtgaacaacgacgatcacgtcgaatttaacggcgaagagcggaggccacggtggccaacgcatgatctgtttcattttgaccaccatacaattcacaagtggctgcaacaaaaaacctaaaaggtttggaatcttagagaaaaagggtgttggagtaatcgagatttgcggaggaaagaatcggattttaagagatggagatggaggatttggtggacgcggtgtgattcagacgcaaaatatttgaaatttgaagaaagtgagagacagagagagaaaagagtagagagaaggaatctctgcgtttgttttctttagagtcaacccttatagagatagagagagaaaaggacggtaatattaaattgttgattacaataattaaataatgtatataatttaaaattatgtttgacatttttttcttctctgtttttagtataaaagctttatataattatcattttagagaaatataattaattctaaaactgaaaattatttaacgttgtgtgattaccttcttttcttttttgtaactacaattttcaagtagtctgttactttctttcttttttcttgtaaatattattgtagagattttgttcaccggtaattataagattatccggtttaatatagagaaatgtgaggaataagtcaatcttttattgcatttatagataaacccaataaatgctataactagtaaaaacggccatttatattgagtaaagttggattttttatggctaaagtttaggaatttatattatctgccatatttgcttacagtgttaattaaagctaccaaaattattacttttgacttagtaaaggaaaattaataacgattaaaaaaacttgtgtcaactattttatctgtaagttctgactagatttttctaatgattttgtttccataaagttctttaaattgcagccagtagcaggattcatatctataatagactctagaggctctttaaatcttgatcacaaacttcacaagtatgacttttaatatgcatcaattgtttttcacaaatttatttcgacccctcataagaaactgttcttttctttttttgcttactcagaaaattaataaaatttgtagtgttaactaaatcttataggcttatagctaagctattattttgtccaatccatgtgaaagataagatttttaatgtacacgaaggataagttaggtatgtcctaattcataaagatttagctgctaagtcctaaccatatgtcattgccttaaagttaatacagtccctacactaactcatgctcccatgatcctttttgctttttacttcttttgtaatggaaaataaaaccacattttaatccagcgtaaaaaaaaaaaaaatcttatgtgatgagtatttttttgatgttgtgacaaacacgtacattctaaaacaatatgaggtttttagggttcgatattttgagttgcatgtttatatatatgtgtaatgtgttgttcatttttcataggaactgaaaatcccgaaaaaaactaacttaatacgtacaatgattcatttttcaataaaagttagaaaaagtaaactagactacttatatttttcaaatataattaacactttaaacaaggaccaacatatttaacaattagacccctacacaaataaaactttatgatacagtaatcatgatcacgttttgtggactgaaattaggaaatttaaaagggatagggacgcagttttgaaatagacaatttaatcagtttatttaaataaaaccaatttaataattttataaattaaaaagtcgtaccccaaaataaacatttttaaatgtcaacaacaaacgcaagctttaaattatttatttttggagaaataacttgattgtgagacccacttttatatttttcctccattttttttgttgttctaaagagtaagttaggtatttatgttgaccaaaaacactagctaaaagatcattttattcgttttttccaatcataaaaaagaaattaattatgtaaatggaaaataaagatctcaaaatactacgtgtttaggattaggaggtttggtggctattattttcggtgaccaatttaattatctgcttataatttaatttgatttcagcttagattcggtaaggacttgaattatataattcggacaacaaattaattgaaattcggttaagttattttatttctcaaaaaaagaaaactgggaaattacatagaagtacctcaacttttaaacgattttcacataaatactcaaactttttgctttacaagaaaaagccctcacaaaaatttgatgatcgttatcgcaaaatttccaaatcgtgttcaagttttttgactctttgaatttacttacagacaagaaatcgtggtttgtaatgttagaagactatatatgctcaagaagtaacacaatacaacaaagtttccaaaacaagtctaagacaaaacctcatccaaaagattgagagaatccaaaagagggcaagagagaatcttggctgtgtgcatatgtcttcaacataatcaaaatggtatatattatcagaaaactcttttgtcttcttggctttagttttgtacttttaaatagactgagaaactagagtttaagagcaatgctaaagcttttctctagacccattttcacaggtcctcctgtgatgcttcctttctgcatcatcgccacaaactcgttgtagtctattcgcccgtcctacaatacaacaattcaaatgttcaacattatcaacattcaaccaatatatcaatccaaaaccgacatgaaaactcggtttacttcactgtttctcaggaaagagagtttctactatccccctaggtttaacaagaatcatactcaatcgtctcagttttcccaagaaaacagacatgaaaactcggtaagtgaagtgtagttttaataatgcaaggatttaagaggatcatataagtgagattcctatgagtaaaatgtatataatccattgaaatttgatcattgttgagaagtattcaagtcattttataattaggatgagatgataaaaggtgtaaaggaacttacattgtcttgatcaacatcgcgcatcagttcttctatgcggacatcctcaacaccaaactcctcacaagcttgttgaagctcgtctggggtgatatagccgctcccatctttgtcaaagtatgtaaaggctgcaaacaaatggtcctctctctctattttgtttagatgtaatgttgcagctatgaactctttgtaatctattgttccgctgttgtccacatcagcctgaattatatacacatgagagagaaaccagattacttgcatatctagcaaaaacagaagtatataaccacaaccaacagagtaagtttgaatgataacaagatcagttcagaatcttagttagggaactggtatgccggttaaaacttacagcttgcatcaagtcgagaatttcagactctttgagattcgcccctactcgttttagtcctgctttcagttcttcgaaagttatctgaccactcttgtccgcatctatcatattaaacatttctttcaagccggcgatttcttcttcagataagctctcagcaatgacctgcaaaaaggcataaagagagaaacttaatctccgtcgtctctttctttccacataacaagaggaagatgggttaaatgtagctatcttatgtttatgacaggaacttcttttatatggttttaaattttgtttagcatcggaaagctgcttactctaagagccattttcttgaacttgttcattgcagaaaactgcttcatacggctcagaacagcagaatccaaaggcttgtctggagccacaccgtcgacttgaacccatggatgacctgagaagaagcacaactccataagagatagaacgatggtagatcactctacatgacaacacactttattcatgtagtgaaatctatgctcaatggaattaacagaaagagaatcacagcgctttaactggaagagaaggtttcagatcaaaataacttacataatacttggtgggcagttaaccttttcttgggatccctgacaagcattttcctcactaaatcctttgcactttcagatatacttggccatggatcggacgaaaagtcaagatcaccgtggaggacctgttcgaaaataccttgttcggtttctgaatgttcaaagaaacaaaaagattagagatgttgttcagagcctagttaggaaaagtgacaaatctcttatctgtatatatacaattcttaccagcccagaatggaggaactccgcttaataaaatgtacacaatcactccagcactccagacatcagcttcagggccataacgctttcgaagaacttctggggcaacataatatgggctaccaacaacatctgtaaaaacatcgtctgcaaagaggaagggaatcgagttcagaaataattgttcgacaaggatcacactattcacgttaaagaccaaatctggaagtggatcttttaagatgagtaacaatgaaatcaaacctggtttaaagaacatggagagtccaaaatcaatcgtcttcaagagggaatcttcgtgtttactgacaaacagaaaattctcgggcttgaggtctcgatgcataacaccaagagaatggcaagcctctacaaccccaacaatggttctagtgagctcagccgctttcctctctgtgtagtgaccgcgttgaatgatcctgtcaaaaagctcgccgcctgcacaacactccattacaaggtgcactgccacaacatcctcataagctcctttgatggagatgacattagggtgaccagccaagtgatgcattatctgaatttctcttctcacatcctcaacgtcctcatcagtcaatagcttcctcttagcaatcgacttgcaggcaaactccttccccgtagtcttctcgacacataaaaaagtcgtcccaaattgcccttgtccgagtttccttcccaaggaatagaattccttgaagttttcagtcttcctctgcaacactgactcagtcctaagccctgcacttgacactctcttcatgtgtttaggcttcttaggtttagctggaggatcaggttttgactccggcttggtctctgacttggtctcctgcttagtctctggtttggactcaaggcttatctcctctagcgtttcaggcttgctttcagttcgaatctctctgtccttggtctcgacgtcagtccctggcttcggcattgtgacctgttcaggaggtttattctggacttcatcagataatcgagatcgaagctctcccgaaacagcttcacttgcaatatctccattactcatggaagccgaatcatctccatctcttggccgccacattgcagctgaaacagattgcaagaagccatttctgcttggtccaacacaagtattacccattccctaacttgtcttaaatctctttcaccagaaatagcatcaagatctgattacaataacctcaaaaacaatctaatctcattactaatctgataaaagtcaaatcctttcgatcttaaaaccatcagacatcaaacctcggacttctcagacgattgaatttctacacagctgaactgataaacccaacttggatgaggagaaacagcagagagcttgcttatacagaggtgagaaatagcaagaaaaatcaaaagggtatcggaaaaatcatgacttgaaacaaacccagaaaatagaaagtcacaatgaaggaaaccaaacagagagtagaaagcatccccagataacaacaacaaagaaagaaacagagagatctgaagaagagtaaagagaaagaatgagaaaataaattgagttgggtgggaaaataaaagggatagtttaatagcactacacttgcataaaccgtagggacatttgttaatttaatgagagagtcaaggtctgtatagagaagaagacgatgaagaaagacgaagaagaagattgaaccagtttgaaaaacgcgtttcttttgttttgattatctatcaccgccgagttttccgctgagatttgtcttaactctctttttaattaatctttgattacaaagtccaccaccctcttcaatcttggcaacgcagcttcttatgtaagggtacttaattagtaatatattaaaactttgaggtaaaaaggtgattttccataaaatcaatttcctttctggagtcctaataacatcctttttataatggtcccatcatttactacttttgaaaaatataacccgcaagtgaaaaatgcgcaaacaaaacccacatattaaagagcagtcattaaaaataagacatccacatgttaaagcttgaacaaatcacatgctctacacattcttgtcttcgcccttatgttttaccctaattactccttccgaccacagctattattgaagatcaaaacctagaccagaactaatattgtagagacggcgagtttggtgttctaaacatcatgatcaccactttccattgtttttgctggtcctaacggaacactcaagcacccttcctttttccagtagataagccaatgagatgtccctactgcaatagaacggtatgaatctctggacactctgttattgatttgatatggaaagaatgcttgcctaaaacaaaaacgaagctcactattgttatcaagagatggtggtttgaatcagtatttaagaagatatgatttgtggcaaagacgctcactatgatgtgtatgagacttggtttgatgtagtgcagtatgttctgatagtagattatcaatcatcacaacagcgttttttggtgacaaaagtctgttcattgcctctgccacgtcctgatcaagtaaacatccaaggacctccaaaaacagatgatccttattacagagattctcaatcttttccgtacttgttccttgattgatccttttcactatgacgaaattaaattgacaactgtttccatatcttgctatgaggaacaaaatttcctagtcatgactataaaatgaaaagtaacctattcggcattctgtttatgacactaatagagaacaagtgtgggaaagggaaatgacggtattcaagtgtgtgtcttccattgaccggaaaataaggtaagaaaaccctcacctttcttatcatgtgttgcgcttggaaatggaagaatctctttatgcttcttttcgccacctctaaatcctccaactgcatgaacacaattctatatcagatatatgagtgtgcaccatcaactaagtaacagtccaaaaccatctaactgactaatgcgcgaagacacctacattggctcaatctttggctgaccaggttttctgttcctagcatcaaatactatattctcgagaaaatccatattgctaacaccagggatctcaactggagtttggagactcaagaagagaaccgcaagagatccttacatatcatgcagatgctcggctttaaacacaatgatttatgagaggggtacgagtagagatactctaggaatcatatgtttcaacaacatgaagattgagaaacttaccttgaaaaaatgtgttcataagcaaaaaacttacgagcctcaacctttcataatattagttaggaaatatcagcaatgatgcaaatgattcacacaattggaattagttaagcttgtcagaaattttagctaatgctctcttagtacagaaataatatccaatagaatcacggctaacaaacttcacaacgtctatatgtactagtgtttcattaacatgaaaaatctctcctttcttccacaattcaacaatcacaagcacttaaatccctaacctcaatcaaacggctcctattcccgtcatcatgatccgaggatggagacaaagtcgacagaagaagaatcggagaggaaaaaggagagctttttacggcggtggatacacagagcagcgactcagaaacctcgcgaaggcttatgaggaagatacagtagaagcgtattgagcagttcagtgttcgcaacggaggccatagagatagacgaagcggcggcgggaggcggagaatcgccggtttagcgtgagataagagtcgaggaatccgattctcccgcctactgacacgtgtccaaggtacgttaaagcaagtacgatacttttcagtaataaaaaaaagtaagaagtcaaaaaagaaagaaacttttttaaaaaactaaaacgacgccgctttgttcgtcgttatgcatcattatgcagtgtagactggtacagatgttttgtggaaaaacgtgagccaaccccacgtcccaataaaaacaacacaaaaccgcatcaacgtcttttaacactctctctctctttctcaaatctgcttaaaagcgtttattaactactctttattttctcatataaaaattctcagcgaagaagaatcagatattttctggtcttgctctgcctaactctcacatgtaagttcttctttcttcctccattctctactgttgaatcttgcctttttccttacccccaatgtatgcttcttcttatttcttgttttcttggctagcttggttcttggtttcttgtatgaggctagtagctttataatgattcgtttggaaaataagaaaatgagaaagtacttcttacggattcgtgtgcttattcaatcttttgttgaaattcgaacagtaaatcttaaaaagcttgcttttatttttgctttttttcttctttcttgtcactgatgaataacgaagttgcttttttgttttcttggttggctgctgataagcaccaaggtttcacaattttgggggtttcttttttaagctgacaagtgacaagtctttcttatcttgagtttcttccgtctttgttgttttgccagagtttcccctgttacgaagatgagcagagattcagtaagaatcgttggggttcttctatggatgtgtatgtgggtttgttgttatggggatggagagtatctgttgtacaaggacccgaaacagacggtgtcagatcgagttgcggatttgtttggtagaatgactttggaagagaagattggccagatggtgcagattgatagaagtgttgccactgtcaacattatgagagattacttcatcggtatgtaaaagaacaatctttcttggagatttccagaaatctgattacttacttgcttggctagtttaattggttcatttaaaccttattttgggcatcttgtatggtttccttagaaaactggtcggtgctactggtgttgttaggtgaaatgaggatatcattcagtttttgctttcattgaacttcagtttctcatcatcttgttaataaagaactagataagctgcgtaacttgacttggtattgagtatctgtatttgtgaaacttgaaaattgaagttgtctgtttgttctgtacaggcagtgtattgagtggtggtgggagcgctccacttcctgaggcaagtgctcagaattgggttgatatgataaatgagtaccaaaagggggctctagttagtcgtttgggaattcctatgatatatggcattgatgccgttcacgggcataacaatgtctataacgctactattttccctcacaatgttggtcttggagccactaggcaagtattagctaaaacgtttattcgatcttgcatgtttcccatctctgtttctgtgaatgctgtctatatttcttctgatgatagatttgagtttcacagggatcctgatcttgttaagaggattggagcagcaactgcagtcgaagtcagagccactggaatcccatacacatttgctccttgcattgcagtaaattttctcaccgtctgcctaacttttatatacctggcactcttcatatcattggtactttggacatttgttaaagttgttacccactcgctttttgtaggtttgtagagatcccagatggggtagatgttatgagagctacagcgaggatcacaaagtcgtggaagacatgacggatgtcatacttggtttacaaggagagcctccttccaactataagcacggagttccattcgttggtggcaggtaaggcttttgttaatttggttcggttatgatagccttacaaaagtatgttcggtctttcatgcgtgttattttgatagggataaagttgcagcctgtgccaagcattacgtgggagatggtgggacaacccgcggagtaaacgagaacaacactgtgactgatttacacggtcttcttagcgttcacatgcccgcttatgctgatgcagtttacaaaggtgtttccacagtgatggtttcatattcgagctggaatggtgagaagatgcatgcaaatactgagctgatcacagggtatcttaagggtacccttaagtttaaggtctgcttacttatcacaacttcaacgcacattctctgtgttctggcagtagtctttctgaatgaatatttctctttctccatgtattttgtagattcttgaatagaacatatatatagcatgtgtgagttcttagatgaaggagttgattttgaatgttaattccaacttatcatctctatgatgtgtgcagggttttgttatctcggattggcaaggtgtcgataagatttccacaccaccgcatacgcactacacagcttccgtccgagctgcaattcaagctggaattgatatggttagtgtttcatacttcacagacattcctggactgaaataggaaattgttactcatgtttgtgttagctaatgaaataatatgcaggtcatggtccccttcaactttaccgagtttgtcaatgatcttacaaccttggtgaagaataattcaattcctgtcactcggattgatgatgctgtcagaagaatcctgcttgtcaagttcaccatgggtctttttgagaaccctttggctgattacagcttttccagtgaactaggaagccaggtcagttgcctaataaccctgagctagaatctgttgcaagtactacaaagtcttgatggaatgttctcaatttatattaggcacatagagacttggcaagggaggctgttagaaaatcccttgtgctactgaagaacgggaacaaaaccaatcctatgctcccacttcccaggaagacttcaaagatcctagtcgctggcactcacgctgataatttaggttatcagtgtggtggttggaccataacttggcaaggatttagcggtaataagaacacgagaggtacgttctgcaactcttattgcagattatacaagttctatcatcttgtctgtgactgtttatgctttgtaagttgtaacaaatatcttgtgactgttaatagactgtaccctttcttctgattcagggactacacttcttagcgctgtaaaatcagctgttgatcaaagcactgaagttgtcttccgcgagaacccggatgctgaattcatcaaatcgaacaactttgcttatgcaatcattgctgttggtgaacctccatatgcagaaacagctggagacagcgacaagctaactatgcttgaccccggtccagcgattattagctccacttgtcaggctgtcaagtgtgtggttgtggtcatttcaggtagaccacttgtgatggaaccttacgttgcctcgatcgatgcattggttgcagcatggctaccaggaacagaaggccaaggtatcactgatgctctctttggggaccatggcttcagtggaaaacttcctgttacatggttcagaaacacagagcagttgcctatgagctatggagatacacattatgacccgctatttgcttacgggtctggtcttgaaactgagtctgttgcgagcattgttgctaggtaaaatacttcacacagcttcctgtttcatctgttgcagtattctctgacacaagattaagattcttaacccctaagttttggttgctaacaggtcaacctcagcttctgctactaacacaaagccctgcttatacacagtccttgtttctgctacattgtgtctgtttatcttcccaaggtatcatcaccagtttcaacttccgttttgatttctttacagaaattggtgagaatctgacatttcttctggtaactttttttgtgtgtgtagcttaagccgactttgagaagatgaaaagttacaaaagcttggagtagatagattctttcgattatctgatctgatcaagtgagttcttgttagcctagcaaaagagaccctgaatctgtgtcgtgttatgttcagagttattgcaacctgaaacattattggatattcacaccagaacgttcttctatttaggttcttgaaaattctaatagacaaattctcttcttgaaatcaccattcttgaaattaagtcacataacttctcagaaaaaatgatacatcttctcaactgattaaaactgacgtcatttggggaacataacttacaagacataataaacttgtgaagaaagcaagagaacattatgctttctttgtaagagaagtaacatatgaatgatgacctgagacaaaagaagagattttgatgatcacaagacatagccgcaaaactaggaatatccattgcataacagtagagaaaatggctaagtattgcagaaattcaaatcttatttatatgcagagcaataaacacctaatagtatcatcaaagctcaaatttaaccagttcataagaaagaggaaagataagtaattaataatggcagcgagacagcaacaaaaaggaacaggcttcggggttcaatacgaggactttgtccccaaatccgaatggaaagatcaacctgaagccaccattctcaacattgacctaacaggttggtatacaaaatagtaactttggactacttatggtggtttaattataatgttatgatttggtttttaaaggttttgcaaaggagcaaatgaaagtgacgtatgtgcacagctcgaagatgataagagtcactggagaacgtcccttggctaatcggaaatggagccgtttcaacgaggtgttcactgttccacagaattgtttagtggataagatccatgggagctttaagaacaatgtcctcaccatcaccatgcctaaggagacgatcacgaaggtggcttatcttccagaaacttctagaactgaagctgctgctctggagaaggcggcgaagctagaggagaagagattgttagaagaatctagaaggaaagagaaggaagaagaagaagctaagcagatgaagaagcagcttctggaagagaaagaggcgctaattaggaagctgcaagaagaagctaaagcaaaggaagaggctgaaatgaggaagcttcaagaagaagctaaagcaaaggaggaggccgcggcaaagaagcttcaagaagaaattgaagcaaaagagaaacttgaggagagaaagctcgaggaaaggagacttgaggagaggaagctcgaggatatgaagcttgcggaagaagctaaactaaagaagatccaggagagaaagtctgttgatgaatctggagaaaaagagaagatactaaagccagaagtggtctatacaaaatccgggcacgtggctactcccaaacctgagtcggggtctggtctcaagtccgggtttggaggagtaggcgaggtggtgaagtcagcggaagaaaaactaggaaacttggtggaaaaggaaaagaaaatggggaaagggataatggagaaaataagaaggaaagagataacaagtgaagagaagaagttgatgatgaatgtaggagtggctgctcttgttatctttgctctcggagcttatgtttcttataccttctgctcttcttcttcttcttcttcctcttcgtctccttcttcatcatcatcttctaccaaaccagaatgatatatctctaagaaagaaaaatgttgtgcaaattgaagaatgtgtatattatatactttgtgatatatttctacagtctaataaagtttgatgatgtcatatttaagacctatatatcatagttttattgagacaggatttaaaaaaaaaaaactcaataaacatatgaaacaaatgaaaaaatatccataaaccctaaacccttttagatttgaagacagagagacctgaaagcttttagttcaatcgatcttgtctgaccaaaaatctgtgtataggagagaacccagttgaattgggaactgagagaagcagaaagtaacttcctttaccggagaacgagaagtgaacggtgaaggcggcgaggttgagaaccatgcctcttcgctcatttcgttttctagaatgcgtttcacaaaaagaataagcctcttcttggggcagacgaccaggattcatagtcgctctctattgggaaatccgactttatgcaggtcttatatcgttggtccggtctctactagttctccggcgtttctgatttcgagtcgtaatggtgatggtgttacgggattgtactacccgatacgtcgtcgtttcatcgggcacactgcggaacagttctcggatgatgagtacgagtgtgaattcgaggaacataaggttcgtgttttgttcatgatgctaaattgtttagataaatggaatcaatcaatcaacatttgtgttgatctccagagtaaaaagtttctcaaaatggaatttttaggtgtttgtcgattagattgtttggtggaatgactatgtaaatgagagtctttgaacattttctgtttgatcctttatacttgggaaatgatttgatcctaggcgtgaattggttttataggcttcatcttctgtggccaatgttgatgagtggaagtggaagttaggaattttgttggccaatgatagtgaacaagaaattgtttccagagacaaaagggatcgaagagattatgagcagatctcaaatcttgctaagagaatgggactttacaggtatagaaaactgacttttattggaatcaaataaccctatgtgtttgtgtgcgctatgtgctaacccaattcttggttccaatttaacagtgaaatttatggaaaagtggttgttgcaagcaaggttcctcttcctaactaccgaccagatttggatgataagcgaccacaacgggaggtaacagtgtctcccttggtttaccaaaatcataatgcacagtttttatttgtagttttatgctgaaattgtaatgcatctcatcgtgcaggtggtgcttccgttgagtttgcaaagaagggtagagggactcctccaggaacatcttgatagtcagcagctaagctcaggaaaggctaatgaatgcgtagctgattctcaacctcctaaacagactgaagaacttcccgatgaaaattctgattcgtttctcgatggttctgttatggagaaggtacttcagaggaggagtatgcggatgcgcaatatgcagagaacctggcaggtattactcaatcatctttaccccacgcctcttgtctttttatcaaaaactttctgctatagcagtagttatttggttgaataataggaatcccctgagggacggacgatgctggaattcaggaaaactttgccttcattcaaggacaaagaaagacttcttcaagctattgctcggaaccaggtgaattttagagcgggatatcttcgcaatgcagcaatgcatggaaattaattttttgatctcaactctcaaattctcaggtgatagttgtatctggggagactggatgtggtaagacaactcagcttccacaatacattttggaatcagagatagagtctggtcggggagcattctgcaacatcatttgtactcaacctaggagaatatctgccatggcagtttcagaaagagtgtcagctgaaagaggagaacctcttggtgaaacggttagccaaaatccttgtccttcaattgagcatcgattcaaaagctgtctgattactccaattaacactaatactttgttaaaagatgcttgtttattcatgacttcatacctaacagagaatttccgataggttgggtttaaagttcgtctagaaggaatgagaggaaagaatacccaccttctattttgtacaagtggtatccttctcagacggctgcttagtgatcgcaatttgaatggagttacacatgtttttgttgatgagattcatgaaaggggcatgaatgaaggtacatatctatatatctaatgtatgtttaggtttctgcaaatagagtctcataataatatgcccctcacttcttggttgcagatttcttaattatagtgttaaaggagcttcttccacggcgtccagatctgagattggttctcatgagtgccactttgaatgctgaactcttttctaattactatggaggggcacctaccattcacattcctgtaagacaatgttcttcctcaatagtcttgacactctagatattcagcatgatttccgtgtttcgagttgtttctatgggaagccttgaatgtatatatattttcagggcttcacacatccagtgaaagcacattttttggaggatgtactggaaataacgggatataagctgacctcttttaatcaagttgatgattatggccaagaaaagacgtggaaaacgcaaaaacagttaatgcctcgcaaaagaaaaaaccagatcactactcttgttgaggtacttggctaattttttacatcaactggaaattccttagaattaactctaatttgcaagtttaactaactgtgtttctgttggtcaactaggtttgctgagcagaccaaatattccaataacattgttcaccattgtttctttaaaattgcaggaagctctcagcaagtcaaattttgaaagctataactctaggacacgtgattctctttcgtcttggatgcctgactgcataggatttaatctcattgaggctgttctctgtcacatatgccgaaaagaacgtccaggtgctgtattagtatttttgacaggatgggatgatatcagatccctgagcgaccaaattaaagcccatcctctcttgggagatc

SEQ ID NO: 694 - DNA, 86630 bp, Arabidopsis thaliana
gatcaaaagcgtttatcttctagtcaaagagtgatatattagaatatttggtaaatccgattcaaaacaatagtttcatgttttaacagttaacactatcatttcattttattttgttttataagaaattggattaggtactttaatttgttcagatttgtaagacagagaaacaagtatttctttgtttacaatgttttaaaaatatctaacaaaaaagttgttttattttttttgtatccctttgtactttggattaggtacaaaatgactcacaatgttttaacctcgttaccctcacagctttttcattaattcatcgactattttttcataacccatacttgttaaggccattagggcatctccatccatgaaaaacccacaaagtttttcaaacaaaaaaaatattaatattatattataatttgattatttgattaaaaaaatatttttgttaaaaaattaaaccaatagtaagatgataattgtcatgatgggttgtagagactatctcagagtttctcaagtgagaaactttctacactctctctccttcattttcattatttttatttttttaattgtgagaaactcttatgagatactcccaatagagatggtcttagatatgtagtttatttacaatttatcaattgtaaataaaagttacaactcttcacttatactcataatgttccggtacaatccaaccaaaccttaacttagatcatatttattttagagaatttaccaaaaaaagacatagcatgatagcatcatgtcatcaatcatcatacattgtcttatttttgttgttgttgaaaaaaaaaaaaatcaactgtttttctttgtatttgcattttcgtttatgtttacatgttccaaaatgataccacaatcataactgttttaattcaaagtaagaactttgttttgtgtttacaaagttataaaataagttggactattaaacttagcttgatttgttagagcaacaacagaaaatagaagaagaaaaggaagtttctgtttgtggaatgagaagcatgtattaaatgttggtcaacaaaatcgacccctaaaaatattataatttgattttatgttaatacgtgacaaaacgaagtcgtacgatttgggacggtggtgattaccaatcagaatttactcaccttcaaacgcgtgaaaaacactgggactcctttgagtgctaacctcacgggcttgtcacagccacgtttacgtgacagactttgattggccgacacgtcagcagatatagtggctgctttacggtgttttagtggacctacttgaagaaaatggtgcgtgttttgtatacaagagataagaaatccatctaccacggacggtctcattacaatttttttattatctgaataaccaattatagatataacacctaatgtattttgctagaagtcgacaaaaaaaaattagactggagttggaaagaaaaattagaattttttaggctcaaattattcaatatgcatatatttatttgaatcattgtgtcatacttgttctagaactttaagcttatgaatgatgattaaagtttatcttcaacgagtaggcattattattagcttcttctgctactctaatgattctaagaaagcgtcgagaaagttaatacagaagcaaagaaaactattcgaactgcggaagataaagaaaataggtggatagaaaaattaacggttactagtaagattaaaagaaaggtcaattacagaagataaataggcaagattgagatgattatgatgaaaaaaaaagaaccctgcatatttgaatttgctgtagcaaaattgtctaaagctttgtattcttgtagtgtttgaaatttactctaataaatatttttcataggtttatggggaatttagctaaatgattatgaaatttataaggaataagtcatttttcttgtattttcgttgagatctaaagtgtttggagacttgtacgaggttattcgagattatttatcaaacaaattaagagataaaagtataaggacgaggaattcagaaataagagtcaaataaaagttatttgatagaagaagatgagactatataaaaaaagtaatttattagtaattcatacaaaaaatggtaggcatacattttataataagtaattacgtatctccaattcaagatactcaaacaccgtttgagagtatggataacgagcaaaatggagataaccatcaacctcgtctataccaacccctatcaaacaaaaattatgtaataatcttttctttgattaatatcattcttaatattgttaaagatttcggatattcgactatgtgtacttggtttttttctttttgttgttgttaaaaactatgtgcactttgttccaagatatgaccaagcaaactcaaatctctgttgtccacaacaacaacaacatattatatgtgagaaattcgaatcaaattttttgttttacctgttgaatcaatgccaccaatataagaaaatataatccaaaatgccataccggattcaacattatgaaactgttctgtgttctgaccgatataattactctacttttatgacctttattgatattgccacagctagcgcaaagctgagatgagaaatattttaatcaaaatgtcgtgactaaagcagaaaatttagaagcaaattttaattagcgacgatttcgtaaattgcatggcataatttagtttggatttatacggttttcttgtgtgttgtatcgttgactattattacattcataatttatttatacgctttttctgacttttaacgatatcgaaaagagtaaatgcccctttcgtattttgacgctgtttgattcttttgactttttgaaggttagaagatttcttgtgttgacgtcaagtaacaatatatgttatgttaggtgaaggactcatcataagtatctaacgcccaactaaatttcatctaattacatacgagtaaatgattataacaaacttaaatggcacttaagtcagtcattaataaagacgaacaaataaacttgaactgaatagtatggaccgtcgttgaacgacctgtgtccccacagaaagtttcgtataataccgtaattacaccaaattcggatctcgacttcaatccacacaaacttgaagttaaactccagtttccccctaaattgaaaattcgaatgcttaatccccattatttcgattttggtggtttatatttggtttactgtgccgaaatcaccattaaccattgtaacaacaaaactaaaccggattaacccaaaaatcaacccattagcccgtaaaccaaaaatctaaaagaaaaaaaccaaatcgaaaatacccccaaatcgagaagtctttaaatcccagaaccctagcaaaatccacaaattgatctaaaggcaaaggtaacattgtctcgtaatcattattacaattattgttcttattcgaattgatctcctccattacgccgttgtgaagctacattgtccgtttgcaattgccgttctgattccaactccgaacatattccgttcttcttgagacacaatgcatacgagtcctgcagcaaaccatttctattttcaatcttagaatgtttaaatatacttgaattaatatcttttggtactcattcgagtatatgaaagtcataaataaataaaagaacatgcatgagtacgagtgataaaaaaaaaaacatgaatatttgtcttatataatgaacaattattgaataagatatagcttttgttgaagaagaatgtatatagcttttgtcttcgtcgcagtaaagatccaaagcgaaatcattcgaatccatcaatgtcacctttgcctctaaatcaatttagggcttttgcttttacggttctggcatttggagatttctcaatttggggatattttcgatttgggaattttttagatttttggtttacgagctaatgggttgatttttgggttaatccggtttagttttgttgttacaatggttaatggtgatttcggcacagtaaaccaaatataaaccaccaaaatcgaaataatggggattaagcattcgaactttcaatttagggggaaactggagtttaacttcaagtttgtgtggattggggttgagttccgaattcgatgtagttacggtactatacgaaactttttaaggggacacaggtcgttcacccttatcttttcttttaactttggtcaaattaaaccaaactaaaccgatccacagtaaaccggcctgaaaccagaaaacgcatttacaagctaacccttgattaaactaaactaatcgagacagaagtctagttgatacttgataaggcaacaaaaacatcggttgaggttacgtaccaaaagcagtaaattaccggttaatgtatcttaaaaaaacggttaaggagctaagcaatgattgatagtttcagagagacatgagagcaaccacgtcttcaacgttaacctctctttcatctttcttttgccttcttttaaaagcttcgtttgctagattcttcttcttctgctgaagctcaaggaccctctcttcgatactgtttctcgcaatcatccttatcattttaacctcttgtttctgcccgatcctatgaatcctgtccatggcctgttcttcaactgcagggttccaccacgggtcaaacaagtaaacccttgaggctgcagttaggtttatgccagtaccagaggccttgaggctcgcaagcaacaccacaggtccggttaactctggattcccaaattctccaatgacttgggtccgtttcttcacagtcattgctccatccaagcgcaagatggtgaaacccgcagcttttagtggagtttctagtaaaagcagcatcttcctgaattgagagaacacaacagactttgtgttggggttttcttgtctcgatgccatgagcagggatagtaaagctgagacctttgaggatttggttgaagatttagcgtcttctccatcggtattggaagaatccggaggaggaggcggagcattgtagagatcagattgggtaagggagccacggcaaagagggcacaatggtttacttctttgaagagtttgaaggatacaagccctgcaaaagatgtgggcacatcgagtgatgatgatgtttgttggtggcgaaatgcagattggacagtcaaaatcttcgccatcttgcaatgctgcaaccagcttttgcagtagctctggcttatcagtcacatctgtttcacaaacgcacaaagatataagctatgcaaccagaagtaagaatatgtaccggttttgttattattaccttctacagatgtagaagtggtaaaagatcttaattctggagggcatagagacatgtcatcgcaaagctgtctaagccgtaagattatactcaaaactgttgagtagttgcgcatcaagcttccattatttataagattctgcacaacacctttcgcttctccttccatgtgatcatataactgacgttcttccggagaaagctcaacataacaagtttcaacagtcttaggcggtaaaccaatcaaactcttttcttttgttcttcttaacgaaattgtcgccattaaaacctgaaaagcgtgtcattaaataacttttcaccaaagagcaaaacaaaaaacaggcagacatgtaagtaatgtattattattacctgcagacgtgaaagaccctttttattcccttggccaagcgggcgttgtatcaaactttgccaataactcttaatcgaaaatggctcaaaccggagaaaggccatcaaagagtacaaatcaaatgaaccattctgaataggagttcctgtgacagcccatctgcgggaagccttcaacttacaaactactcggctctgttgagcatttgcattcttaatggtgtgtgcctcatcaagaattattctcagccactccattttctttacaggagaatcttcccacgattcctcaacagctaaagtgccgtaagtagtcaacactatgtcatacttcataagctcattaacatcgtctgtcctttcgccaccatgatacatatacaccttcaagattcccggtacagtatgctcctctaactgtgttatccatgctgaaatcacagaaggtggacaaacgatcaacgttgtcttttgagacacattcatgccaacaacatcatcagttttaagcttctttcgagttacactttcactgctcttgcctcttcctctctttttacccttcttttcaatcttgtctccttcaccatccaaaggctcttcggttggcgtactggtggatgcattgccatatctatcaaaagctatcagggaaagcaaagtaagggtcttacccaaccccatatcatcagcaaacacccctccacgcaaaggatcaggccgcttatccgagcggtaattcgtcaaagtattcaaaaattctccatctttctcctcccaaaacggaggcaattctccagatttctctctatggagtaaccagcctaatccttccttctgatgagcaaaaagttcagactttatcacttccctaggtggctcagccgctaccaatttccccattaacttcacattctcatcaacaagtttaaaaatcttatcaacactcctcttatctccatttcccatctgttccttaaccacaacagcctcagataacccaaacgatgtatctgactccgaaatcaatactaacccacctctagaaatcgtcgatttcacagtagaggacgcttctaactttgcaaatacatgaatttgacaagggattctgtacctattggagttagaacgagtattgggtacaataccctcgacgacgatcgtgtgagaatcaatcatcggcgcgagaacggctgctactgtacgctcgatgtgacccacttgctcagatcgcgtgttgagtactctgattgcattattgtcatatacgttcaagggttctcgaaccagacccaccatctctcgaccgttgattcggccggaatagtactttaaccctactatgttcgcgataacaaaccctatcagataagactccgaaacacagtcctgagattgctgctgtgatggttccaccggagattggaattcgtcttcgttcgccatgggagaggaagagaagcgtcgaagaaactgagccatgggagaggaacgatgacggagagaagaaggagctcgaaagtatttcaaaacccgcatcctttcgaaagagtggtttttttttttatattggtatcataaagtaactaaaattgagatttgcatctcaaattcttataaatagaatttgacaccccaaagtcagaacaatatcaagtttttattattatatgaaattcaaatgcaaataacaaccaagtttattacaatgttcaagtgcacaagtactgatttgacacaagccgataatactatgcaagaaaacaaaggtgaggaatgaaagtttaagaaatacttaaaagggaaagattacaatttcacagtttgagtgagagagaaagggaagaaccatcattttctttctcagcatccatctcttctgttgcatcatttggttcttgaggttgtggttgggtttgggagctaccaatgccaaggcaaagatccaaacatattggtgacgatagtggttgaggttgagattggggtaggaatgggatcccggtaaaggtccaatcctggttcattccttgacttgggtcactttgtagtcctgcaaagctagagcttgaggatcccacatattggttgtagaccatggacatcttgtatgatctatcaactttgtactgaggctgttcaaatcccggtgggagtgcgtattggttaggaaatgaatgatgatacgaatacgagtacgcgtaaagatctggttctggtcggttcaaatgcgccaaaaatgctttttgttgtttttcgacctctctctcctttctgtgtgcattttgatgaccacctaatgcttgtgttttatcgaacttcctaggacaatacttgcatttgtatataggattctctatcgatccggtggcggaggcatcgtcgctaatatcactagcgtaattcgagtccgaggacaacatttcgttgtcgatcggatcgggcttttagaaattaggtttgatggcttgaatatgttattgcacccggataggtatttaaagatttaatactttgtatgcacttttaatatcaaggaaagttatatgttgtaatgttatgatgtttgaataagataaatgcatattgatgaaatatggaaagggacttagttatagagaaacatgatgaagaacaaagactaactgaagtacttaacaaactagtttatcatttcgacaactcacacataacatgtttaattactatatatatttgacattttacatttgccgaatttgcgtagtaaatttgtttctgaattaatacttgttgcatttagcatatttagtcaaaattagttccaaacattactgatttccaaagtgagtagggagattttggttttgccctattaaatttgagatatagttgaaaacaaaattatttagaagagtttaaagagttaattagtagatcttaatgtagtcaactttagaaaacaagaattaaagatttaattagtgtcattatgtagtaaacttttagtacataattatctcaactcttaaataaaatatttacctttaagttttctattgttttccattgcttgcaattttatttattttcatatacatcactttggaggtaataaaaataaaattattttcatatcaacataatgaaaatatatattaaaagtaagtaattaaactaaatttggctaccttttaataagagtagagaaactgatggaagcattttaccatcaaatctataatgctgattctcacatcaaaaaagcattaacttaataattttactatgacatatagcacattttcagactttcttgtgatatacatggcttagtatgacagattggattaaacttaagataatgaacatctatgtatagtcaaggtttaaacaagatattcaactctaacataccaaattaaaatctatatagtttcttagctatcttttcagcattaaaatatacagattggattaaacttatgatattgaacatctatgtaatcaaggtttataaactttgtaaacatttttataaatagcacattaattggagataagaagaaagctatatgtattataattagggttagtgaactttgagagcttggattgacgatgaacttccgccgtatcattggttctagtagccatctcttgaaaagggtctgtacaacggagtatgctccgacatcgatcagggttgatgtacttgcgaagacaaaagtggaaaataggaggatggagaagaagagaatcatgcatgttcgagaaactgcaatctctcactgagccggagggaatagcgcacacgttaaacaagttgatgaggattgagaaggagcacgaatccgtcaccagagaagatctgaagcacgtagattggatggtgcgacgacctgtctttccttcaaaagcaaagatattgattggttattagctacctgagaaggaaaaaggggactataacacactttcaacacatttcgtaaatcgcaactggtacctgaggctgtccaacacactttcgcaactgaaactcatggtttctttgatggattgtcttaatgaataacttaaccacggctttcagattttctctttgccttttaaatctctcttgtaattagaggtaaaatctctagtgcaatcttttgcattttgcaatttgcgcttctgagtcacctaggcttcttcctagtgcaatttttgaagggtcacttgcagcaatgacctagttcgataataaaacgaagcttatgacactgtactatggaaaattaagaaagtgcgtctttgatcgttttgagtaaatggttttgtttacatagaacatataacatgaaatggtatagaacaaagaaaacattctatattgttttattcatttaatctctatatcaaattactaaaaaaacacatttttgaacattttatatgatttctacaatcaaaaataaaatattgtaatgatttgtgttctatataagaaacaaaattttagataatagccaaattaaccatacaaaaaacaaagtaatgtttgtgtgaacaacctctccacttctgcttcccaagacaaatttgaccaaatgccaaagactgagcataagtaccaaacacatattgagaagcagcaccaaactgatctttgaggttgagaaaagaaaactgatcttttgcatatttttttttcaaaggattaacaacattgatttaaaatgggctttcagatgagtccataaaatgggcttaaaaatcatatttaatggcccataatatttgtttgcttctcttaaacggaaagagtctttaaccggcgaaagaaaccaccctctgactgttaagaaaattctcatcggcgtttagatcagaaacttgggaatcggagaagctcactgagaacaatggatatgagacgtgcttcgatgtgtatgatgttaatttgcgtctccttggttctcctttcgggttttggccagtttgtgatctgcagtgaagaaaaaggaacgtacaacgacaacgtcgtaaagatgaagcttggtggatttagcgattccaagaacgattggaacggtggaaaagagatcgatgatattgcactcttcgctgttcaagagcacaacagacgagaggtttgatttcctccaacctaatttgtatattctctgcaattagggttaggattctaaaacttttagcgtaaattcaagtaatttgcgtgtctgagtgttcttgatttatagtctgaagattagagattaaggattttgtattagtatttagtgatgaattttatgatttctctgttcacggtgtttatctctatatgtggtctaatagcttttggattttatgcgtagaatgctgttcttgagcttgctagagtattgaaggcaacagagcaggtggttgctggcaagctataccgtcttactcttgaagttattgaagctggtgagaaaaagatttatgaagctaaagtttgggtgaagccatggatgaactttaagcagcttcaggagttcaagaatattatcccctccttcactatctctgaccttggcttcaaaccaggtaatcaccgtctctggtttagtcacagccaccgatttttgtgcataaaactgtttccttttcgatctttgatcataacaagtttttaatgttttttgatatctttgctctgtttgaggcagatggcaatggatttgactggagatcagtatcaacaaataaccctgaagtccaagaagcagcgaagcacgccatgaaatcacttcaacagaaatcaaactcactgttcccctataaactcatagatataatcctagccagggcaaaggttgagttattgtgcttattatattcactatcagtttctttcgtaatcaccaaacccaggcaggcacctaattaagtaaaggaatgatatttttacgagcaggtggttgaagagcgtgtgaaattcgaactgctgctgaagctagagaggggcaacaaactggagaagttcatggtagaagtgatgaaggatcaaaccggcaagtatgagtagaagttgcagatagcttttgggttgtgtgccatgtgtgaatggatcctttatagtatatagtatactaaatactgctatgtagtgaaaataaacatggtgattgtttggctttaaacaaggtttcttgtaaataaatacatgacttcacatatgtaaaagttacaaatatgatatgattatgcgtgtttgaaaaaaaggttaaatctagagtcaaaaccgaccacaccaaatcatgagaatgtgataactaaactaaactattctcatgtcttcaaaagggaaagttgtcttctttagtatttggccccaaagacaacaactttggggaaatttcaaattggaaacgttttgttgggttaaaagaaaaattaaaggctacaactttattttattctccccactagttttgtgtccgagacagagagagagagagagagagagagagagagagagagataaagggtcgataaggtctttttccgtttccttgacctctctgggatttggatttcgatttggatttcgatttcctcatctcatcgatttgcttctcaatctctccaattcgattctcctctggaaatttcaatcctttttatattttccttggtgatttctaagataattaagatcgagaaaaggagaattttgagagagaaagcatccatccatcgatggccgctatgagcgacaaggaagctatggtggatccttttttggtcgaggctcttcagaaccctcgtcatcgtctcaccagtaagtcaattctcttgcaagtcctttaattccatgtttatttttatgatttgatctgattatggttatgtagtcgtcttctatagagttcgttattgacttgttgaattcttggtttctcgaattttgtgacttgtttagggttttggtctatttctttatgaattagggtttggctttcgtacttgatgattagatccatggctattgtttcagctgaattgagaagactcttatgttcagtttgtttaatatgttctgtatcatggtcaatggatgttaatgttccttatctctgttttttttcttggtatgctagttttgcgtatggagcttgatatacagaagttctttcaaagtccagagcagcaacaatatgagttccagcctttgcctacatcttatcttcgtcttattgctcaccgtgttgctcagcattacgggctatttaccactgctttagaaggtggtggtgttgatggctcagggaacagaatcctggcgaccaaaacggttgaaagtagatacccttacgtctgtttgtctgagattcctgtaaagcaacctgagattcatggtaggcctgagggtttcaaaatcgccatcaagcctaggcctaacagaggagctggtgggagtggtagtggatcaggagtagagaagaatcttttgagaagcgttgaggagagaaaagaagagtatgataaagctcgggctcgtatcttcaacagccctagcagttcagactctgaagattcttcaacacgagctcctcctcctccctatcctcgtctcgactcaaaacataatactgcatgtccgagtagaaatgagactgaagtggtggttaattataatagtaatcctgttgatgtagagaggaatggtgttatcagagactcagggcggacttctcgggttgccattattagagatagagagaaggatcgttatgatcctgattatgaccgtaacaggttaaactaatccctctgttgcctctaatatctgtacgccatggtttcttcatcaatattaacagttttgcggtgttgcaggtatgtgagggttgcgccaccggtacaaaacttcaatccgataccgattccgcttccgttccatgacgcaattttcccacagatgccaagaactcaagccagcctaaactatggacaccccttaaacccagctatgacggcaccttcttatacagagtggcctagtgccactatgacttatgcacaaacattgaatgcgtcagacgtacatcatttcaggttaacttcactcttagaaaccttcttcatgttctctgttaaacgctcaagtctctcaagtctcttacattgacaattgtgctgtctttttcttttgggttgcaggcacccgaatccttgaccttttggtcgtattcagcacaatgtcttgtatccaaacaggttttattgatgtagctttagattttcagttcttgttgcaaacattggcctcttttatcgtaagacatctctaagcttttgttacaatatattattattatcaagcttctccacgaaatccaaaatctgcaaaaaaaattgttgtacaatgggccggcctgtaaaggttgtggcccgtttagagtagatagacgtggaagtgtggagttttatgggtcaatgattacattttcttgttcttatggtcaacatagaaaacagagtcaacgtatttccaaacaaattttgttttgtttttaatcgttgattcttctgattgaatgcaccttagaattaatgttcaggttcactgttttagcaacaatgacataaattttattcaactatttcaaaaatactagtttgaaatatgccttgttattattaatgggattcataacttttataacataaataaagtaataattaggacgactttttaatttttataggggtatgacttttatagaaacagatcagaaacatgccagctaatgaacccaccatcatgggatggctttaattgatcccctcatatccaataaataacctatagtttttgtttatcaagattatgatttaactattttaaaaatatgataaactataacagaaacaaatcttgattgggtttggtcccataactgagtctacgtacatgaataaataatcaattataaggcatgattaaggatatgagaccatcagatcctgggaatcagtttctgactggcactgtctagtccttgctttttggctgcttcatgttctttgtacactgtactattgaatgaatcattggttagtcaatatttgtgtattattcaactatacataattggatttggccatttgggtcttgagttttagaagaggaagagaatttcagtacctgcaaatgctttatgatattttcaatgcaaagttacaaacaacttttaagaacaaatctgaacccacaagaatagaaaaaaaaaaaaaacaataaagtagttgtgtaatcaaatctagacaacaagtgaaagatcacttctttttatgcatttcattacagagtaaaactcaatctttaaggagaccaaatgttcctcaagatcgtggaaacattagaaacattaaagatctagtcacaacagcaagaccagaaaaaaaaagcagaactcggattgttgacgtttaataaaaattcaatcgtctcgagttggaaacagagtcaagaccgttttggctcctgatttcaaatcttgcgtgtaattagcgacttgactatgtaaatgcaatgaagatggtttgaaaactggttgctgtagttcactctgctgcctagccaagaacattgcttggtcggtcgctttggtcggtgaagtgaaattaacggcggagatttgtcggtggaggaactgagacggtggtgctgcgatatgttgctgctgagttgaaattgggacaaaagagggtatgaaaaggtcggagctctgtctacttgtcggatggaggaaatgtggaggaacaggtgagctggcaaagagatgatcggaatcaccgctgccgcctcctccgccgccggatttcattcttttgaggtaaagtctgtatttttgcaaatggctagcgacgttttctcttgttaaaccatcaacgctcataagctgcatgatggttttaggaaccgcgttttttatcccgagatgagccaccgcgtctacgaaacgtttgtgtagctgtggcgtccatactaaacgcggtcgttttagcgttcttgctggttcgtctccggtagagtctccggcgatttcggctgaggaattgggttgtggcggtgtggtttgaggtagaggttgaccggagtttgagttgttgttacggtggagatcgaaggcgatggcgagatcaggcgtgattaaagattgagataaaggtatgagttcctccggcgacggaagctcttcttcccatttagcaaaccaattggaatcttcttctctcatcctcaacactaacaaaaaaaaaaagaacacaaatcttgaatctcaaatttcacagtcttgatctcacaagacaccaatattgtgaagatgaggaataaaaatcaggaggaaacacaatgatgatgaagagagagatattattgattttgaggcaaagacttgtgaaagagagacttgacaagattcttgtaaatttttaattgttgttatctgtttagattcgaccactacggctcggatgattaggaccatatgggccttagaatccatgccagaactaaactcaaggcccaaaaagcaattataattaccctcttcagaatctgccgccaaggtaatcttcttcttacccttatggtttttcttattccttcactctataataatggttttcttacacatgtttctcaattaatggtttcttcacgagtttgtaagaaaaaatacttagtggtgaatttctgatttgatctctttgtatttttagggactaaaacggaaacgtagtgatgcagccgttgcaaaaagcatgtaacaaaagcagctttagatttgcttattctaattgacttcacaaaccatctgcctgaaactgaatgttacttgaataatttttttctttttgggataagcaaatgtagtcatgtcattttggaaatatcaggtattatatttgttattgatattcgatatgattaggtcacacataaatatgtctttatgagtgtgtacatttgatggttctttcaaacttagtctcattgttgaagataaatcttctaagactatgtacattgacttattttttcaacatcctaatttattgtttttaacactccccattatgttctttttcttccacctaatcattcaacatctatttaacttttaatctttacaattgtttgtttaataaaattcaacatcataccccattattttaatctcatattcttttttttatttttttggttatatattaataaaacttatcaagtagaattaaattaagattacttaacttttaacaagattttttgtcttttatgagagtgaatgatggcgtcaagacatgcgtgttggcggcaagagaaggtttagattttctttacaatatattcaaataaactattatatgattaaaatactataatggtaaaaattaaatgttaaagtatggtttgcccttaagattataatgccaaatataaaatccattgtggagttagataccgtgtagctttttttgttattgttaagttgatattgagcaaaacaaaagtttggtttgcacgaaaatgtcactagacctagacctagtaagtatggtttgtccatggacttgtttcaaagtgtttgaactaaatattatgggatcatttatccttagttgggatcattttcaaactataatgtagaattttacttaatgtttcatttattaactttcatttttataagaaaaaacaaatctttatgatagcatatgaaaagtcatttaaacttcatatcagtttttatccttttttctctctttagattaaaaaataaataaattgaatggtctaaggacattttctttgattaatatcagattatttttgttagctaaataaataggagatagccacggttactatcttgcatctcgaagtacggagtgccatcaattttatctgtaccaacacctattgaagtagcttaataaagctacaaatcacaagtttattcacaaaccaaaaacaaaaaaattctcacaaaaacaaagagaaagaaacaattaccactccaaaaacattttcagattcgatcccaagatccttaagagcatgtctcgcatcatccaaagatatagttgaatgatataattgcactttgattaaaaaactgcaaaatcaaaatcgaaatatttagctagagaagtttaactaagtcaccttgatttcacaaagtgtaactattcaaaattatatgatctattatataaaaaaggcattattatgtcatgggactattacaaagaaaaatccatttttgacataccgtttttcaaatatgccattttcccaataatctttcaaatttgccattttagccatgtaaaaaacctaaagatttaagaaattgttttcactaaacacatacttaataacaaaaactataccctaaaaaaattggaacttaataaatgcaagcacttttataggccaaaactgaaaacctaagttgatatatatatcattaatgataataagattatgatttgatcatttagccaaatgctaccaaaataaatacaagcgcttttattaagtctacttaagttccttgattagggttatgttttttgttataaagctagcatctaaagaaggtttacatatcattttttggataaaaaataataaatttgaaggttgatgatcataaacaaaatcagtaaaattaaagaacaacacctgatacaagtaacggctactttagtagttagcgggtgaaaaagaagaagacatgctaacggtcaattccagcctggcacttaaattacgaaagtaccctccaacttttttctttatcctttttaaatgatacgctcctttagttaaataaaataaacatttgtctctatttctcttataaaaattcaataattgaacctcctctctctctctctcttctctcccttcttcttctccgatttcgactttgaatcatttcttcgagagaggtagcgagaaagggatcgccttttctcactctctgcggattctcaattttgggcaagaaggcaagaacgtatgttgagatttctgatgaaaaatccattcttttattctttcttgaaatgatcgacttgggatgtgattcgttgctttctctcacatttcgtcgatttttgtatttagcttagcctcaatttggtcttatgagttgttcttggaaaccctagagtctctgtctccgtcaattgcggtagatcccaaattgattcgttttagggttttctttgattcatcaattggttggctttgttcttgtttcttggatgcgtttcgttcttatcaaggtctaatttcactaattttgctttactctcagttaattcgtgtcttcactctcctccaagagtttcaagtttagatttttgtacatagattttgctcaattgccttacttttaatagttcatttctggtgtggaattggatttatgatttgacggattgatatgtcgatgaaacgttaatggatattgttgcttagaccacttagtatgaatcgacgcattaactttttgtggcttttgcagagtttttatcgcaattgagtcttgaagaccacaaggatttgatcacattggtgcttctgcctgtttatctgagtttgaggacaagaacttctggggcgtttataatttgccatggtaattatctctccctctgtattccttgcttagaattgtgcttacttggaaacttgtgaaaagccctatgaagttgtatctgttctgattttgtcttctttgatgctcaggctagtaatgagaatctaccacccaatgttatcaagcagcttgccaaggagctgaagagtcttgacgaatcccctccagatggcatcaaggttgtggtaaatgacgaggatttctcacaaatatgtgctgatattgaaggaccaggttcacaatcattgccgtatcaatttcattctcgtgcaagattatagatgttgaatgatgtaaagtaaaggtgttttcctactttgatggcatacagttggtactccttatgagaacggacttttccgtatgaagttggccttgtcacatgattttccacattcgcctcccaaaggtatgcatgtcacttaattagattgaccactgagatgttaaggcagagacacatagaatttgtattcatggtttctaatatcttgggtttgacattccaggctacttcatgacaaagattttccatcctaatgttgcttctaatggagagatatgtgttaacacgcttaaaaaagattggaaccctagtcttggattaagacatgttctctctgtaagatgtttaaccccttatgtattcatctctttgaccggtttcttaaaactgaagactgaggatctgtgttttgtacatgttaacaggttgtaaggtgcttattaatcgagccatttccagaatctgcattaaatgaacaagctggcaagatgctacttgaaaactatgacgagtatgcgaggcatgctaggtgagctatctactttggtttcaaatgttgtcaaaccttctctactttttcgttgctaaaagatgaaatgcttatatactattactgtatgcaggctttacacaggtatccatgctaaaccaaaacccaagttcaagacaggagcaatctcagagtcaacaaccgctctaaatgttggccagacgaacaacgagacgcctggtgctgctactgcaataccctcttcaatgacagacataaagagagtaacaacgagtgcccaagaccaacaacacgtagctaatgtcgttgtagcagcctctgcaagtgtggtcactacgacgcaaaaaagggaagcaggtttggccaaggttcaggcagataagaagaaggtagacgctagaaagaaaagcttgaagagactatgatgatgctatcactcagtgtcttacgctctttgaacctaaactgttgtttcctttttacttgtaagagatctgttgtttgaggatttttcatttctgggaaataataatgtttgccaatgaagccgaatgttaaacattttggtgttctaatctacacatggttttgctgagtaatcgtggataagacaaaagacacatcgacctctggaatagtcgtctgtatcttgccacacagattcagaatgtttgagagaatatagacaaagatgatacaacagtgagagattacttgggcaagtctagttgagatgagaaaaacgaaggatcgcggtcagaagcatcctctctagttgtcgtagatctgtcgtagttatcactaatgtccttgatatcatctaagtttcgtgttggcaaaggaagcttcctagggctatcccttttaatgagcttgcctcccatctctgtatcgtatctcacggaggaggtatactctgactcatactcggaatcgttagatgctatagtcatgtcatcttcttccgggaccattgctctgagatctagttgcgaaggcgggatcttggcaaatagtacttctttaacattcttcagtaaccctctcttgtaaggattttctttcttatcataacggtaccggaaattctcatatgttgtctgcaaaacagacacaacacaagaaaactcagaaggctaaagcaagctaaaaagatttagttgtggtcctatgataaaggtaaggaatgtacctggtttgtagacatgagatagaagtggaaaatggtaaggccaccaacgaaccagacagcgacaaatgtatatacaataagaatgacagacactatatcatcagacattgtcctccatagcttcccaggttgtctaatcaggttgatccaggagaacacaaaaacatatatgcatagcaatgttgaagatgagatgaagcaaatgaagaacgggtagtttctctgcataagtttcacaccaagaatcaatcactcttcgaacaaagagtgggtatattatatatatgatcaagaagtggtgatgaagaatttactcgggcaatgcactgaccaacccatggacaatggtgatcaaagcgttggacacagttgttgcagatggagcaatgtgatgctcgaggtggacgatagagcaagcaagtatcgcagaacttgactttgatagtgtaaccattgacgaaaacgtctttggttctaggaatcttgagattaggagttttgttgttgacccattccatagattgtgtcaaggaactatctgaatcatcttcaagaatcattgatgttttgttccttgggatgattcctggatccctagctgatgtcaacattagaaacgtaaaatccaagagggtgaggataaatcctgaagctagaacggtatagttgaagaaaggatctcctcttttgatccacacgagcatccttatgcagaatgtaagcgcaggagctccaatcaagaaggaggttaggtacagagatgatacatcaggaccaaagattagtctaccaccacagcaaaatctctgatgaaacaaaagaaaaacaaaatataatttcacattcttgtggaacaagaaagaaagcatcttatattggcaatcattgagaaatgtgtttacagagaagaaagaaaatgatattacgttgttacccttccaggctttgtagaatctgatatgaggaatgtgtttggaagaagaagccgtcatgagaatatgatcaccagagggaatgcaatgaacttgactaatcttcttcttgctcattctctccctctgcattttttgtttttcctcagaaacccatacatgaagcctgtccttccgcaaaaaaagttcttcaaagattctatctgagtttcagaaattctcaagtttttttgatttggtatcagccaaattaaagatgggttttggggattctgtatttttttttattctgtattttttcttgttttttttttttgcttaataatccaatgcaaaccaatccttctgcatgcagtctttgtttcgtctctctctctttctaacaaattatttttgtcctctaatagtttccaggattttcggattttttttttactgaaaataaatttaggaggatcaatcaataatagataaagaattgaagaagtgccgcaaggataaaatataatttgatgtctctgttacgtgaagagtaccatctaagattcttagctttacctaaatcattgtatggagatataagatctaaatcactttgataagaacatctttcccggtttcttgtttaaaaaaaaaaaaaaaagttatttattatagtaaaaatgtaatcaagaattaattcaagatattggtaatgaattcaagatagatatgtactgtcacgtggctaatgttatttctctggagtacgttcttgcaaccctaagttaccctcttcttgatttcttgagaggtttgtgatatatctacatctatctatctatgcatatatatataatcgcaagcttaaaggtataagtaaatgtagccgattatgttcgatttttaaaaattcacaaagatgatttttattaattaagtatatatagaaaatgaatatataatatcatactatataatagtagaagtcaaatatagatgcaaaaaataatgatatagttattgcacagaagaatatgataagatcattaaaaaaataattattatagttatttgtaaatcaagatatttatagtttaacatgtacattatactagtctttgccatgctcacttcttaatttataaggtttttttactcgtggttaaaataaataaataaaaagattttgatttcgtgatttactcacgaaaattaggattctagcgaaattttgattgtttttttttggttggtgttagggaagaagtctggaattgggcacgacttctcgaacaatgtctcactccattgtatgaaaagattatagtgatttgtgtacacatggtttcagaagctatatataaacttaagctaaattgagcgggagaagttcaagtaatagcatgtagttgggtgcgtagtcaattcccggctaaatagtcacaaaatcatcagtagccaagtgcttgggaattggttattattggctacgctagtgagttgtaccaggcaccaacttgctaatgatcaatatcgctacccactgaccaaaaaatattcaatgacaactttttatttattacaatttacagaacattgttcgatatgacgtaaccagacggtatgagacgagaccaaagtaaaaaaaattggtgagcaaaacgatttatgcaaaaaaattagatattagttgaccaattattacgacgaaaaaaaaaaggttgaccaattattttagttgatgtgtttatttttctaactggttcacttatttttcttgacatttttaatttttaaaattatttaaatactcgacgaaaaaataataattattatttaaatactttaaaaaaaaaaactactccggtttatttgtcaaaagttaaatcgtagtaaacgtgaaaagccctttaacaataaacgaatgaaaactttggtaaaccgataataaagaaaaaaagatattttttatcccaatttccctaaatcataaagaaacttagggttcgttatcatcgccatctcgattctcctaaatcataagcgatgttatctccgattgagaatgagagatccgaaattccttcccctgagaagctgaagttagtggaggagccatccgacgatgaatctaagttctctaattatgattcggacgattgggaaactttgtcagatgatcttcgactgttagatgaagagtggggcaagagcggggtttgtaatctccaaccatttctttcttttgaagaattgtttgattcatttaattttgatttgtggtgttttcagggttttgatgtggacttctcgaaagtgcgtcacagatttggtcgcggagctgttcatctcgacgacgacaatatggttagcgagcctcatgagaccaacagagatttgctcaacaggttgtccaacatggctatctccttctacaacgacaagacggttagtaatctctaatgactaatctagtcgatgttggttttttgctgattttcgacgaaataattgtgctaggggataaaactggaacttgtcaaggttttgagagcaaattttcacccatctgctgcaatcacactctacatcacgtttgaagccaatgacccttcagatggtaaccagactaaacgttaccaagcagtggttcgatacttgtcctttgatatcgaagtttgctcttgcaatcctgaaccatcttcttcttgaattctcttctgaaaggtatatatactaagcccagattttacattggcttcagtacatgtagattcctttgcctaatcattcttatgtaatcctgctgcatacagtactagttgtaatgtataagttttgtctgggtgtggctggtatagttcagcttccagtggatatatagtgcttactaatgtttaggttgaagttcccattatatatgatgtccttgatccaaatattaaagaattctttgttatcatttctgcagttttccaccggcgagtttatgcatctatctatctatctatctaggggaagcaaaagggcactagcaagtttcaatttgttccttgaacttctctatttgaaattaagttgtatttttatgcccaaatgttggtctctcggtgttttactgttattgcgactaagtcactactctttccattagctacttctattattatatggataatgttgttacactccttcatttttcctccctcagaggttaggtgcttaaattcttcaccagttccagctgtttggcattgcttagttattagttcatcacattgttttggtagaaagaaaataaaacaacattcttagaatcacaatacaaaaaaaaaatgagcatctttactcttataatatgttggtaggtagccttgcgattttgagaaaggatacaagtgggattaagaatgtatatttgtagtggtgtatttttcaatcaagtaaatatagaacttttcaaaggttttttttcatttttgacagaataggccaagaaaatctggcaaaagattaacaaaagatcgataaaattcttcatcttaaatccatggcaatatggcattagaaataaaaccctaaattgtttcactttcttgaatcaacaactttctccctctctcctccggaccgagcagaagttgagctaggcttcatgcaaatctgcaagcacaaaacaaagctatttcagtggcaaactttcttaatctcactatcttagatgctatccgttgttatgtatattctctaattctacttatctctcaactatttgagttaaattctagtaccagtaacttgtagtctggatgtcaagctccaccatcaaacctacaaaagagaaactaatttgtataaaatgcatttgtaaggtacgaaactagccacacactcgtcaaactacatgatcataccacaatgtcgatagcaccgacaaacaaagaggactctccatttttcaggctacacttccttataatctttccaatgcctttttctccccaggcttcaccataagagttttggatgagccaatagtgctcaccttcgtcggttgtaccaaaactaacaactaacaccgcatgtcaacaaaaatacatatcttttggcttcctacctttgtatattccctaccattgttacattaagagaagcaaaagtcaattttagtatgttcagttaaattagctacaggggttaaattcaaacatactgatttatggtccataaagctttggtaagaatcaataataccaactataggacgctgatatactagcttaagcaagtcttcttccttgacatcctttttggtgatcacattaaattccttgatcttgtaaaaggagtcatcctgaagagtgaattgaaacaagatgatggatggagctaaatactgagctattaatagttgtgatctctagctagctatcacaaaactctcgaatgataataaagaaacaagaaacatgacaaaggaaaattagtgaattggcttactgaagtttgtttggagcattctttagggcaagttgcctttatgctccccgagaatttgcacacttcttctaggacaagaccttggttcttcaagtagtcggagagctcctcgaatttgattatatctccctctttactcttgccagtgatgttgtttatcaaatgttgaggagaaagctctactttaataccccttatagcaaatgaagcttgtacacatctagcaatagccactgcccagcaaacacctaagaagaataaacaaaattgcttgtgggcttagtcccacaaatatagctagctagtatcttaacaaatgcaactaagaattgaacaatagttattagttagttagtgttccttgatccatccatgaacaagaatgcttacttagttttccttgtttaatagcaccacttaggtattggaaccaatctttgcaattcgtggtaaaatcagatggaagatcctacacattgaaattatttcagaacgtgaacttggctagcaaatatcgttaacacaaatcagatgttacctttgcccattcctcgtcttctttagtaaatctctgatacacagttcccatcaacaaattagaaacgaacgaagatatatggatacatgcatttacttaactacaacatagctaaacatagaaataatcaaaaacctttgtcgatgcttttgcaggcgacttgtttttcttagatgaagaagaagaagaagaggattttttgtttttcccctttcgtccagcaccaacgccgacgactgcggattcttcatccgagtcactcttgttccctccgtttcttcccgcaccaacaccagctactatggattcttcatttgattcactctcagacttgtgttcctctccgaactttttatcttcactctccattttccccaacgatcgctctcgtttcaacgagaaaagctctctttttctttagaggaaaacgccaaagtttgcgatcttcatgaataatgtccgtacagatatgtgggtccaggattcacaattatagtaatttaaattatgtttagtgacgctagggtttttacgcatgattaagacaataattccatttaattaagtagtagtgtacaacataagacagagattttccttttaaatagaatatttggtagctccgtgtattagtatcaacaaggtttttcttttactttgtcaagacaaacactactctcactctcactctcactaatcactagtgaaaaattcaactatcatatttcatgcttaacagtttactagtttacgtttttgtaatcaagtcgttcatttgacaaaaagaaaaacaattgtattaggaaaattaaacatattcaaacatttttttggacgaaaatcaaacatatttattcaaaaagatagaaaggtcttggactttcaaagagcagaaaagaggatcattttcatattttccatggggaacaaaaagtaagaaggcttgggaagaaaattgacagaaaatattccttcttggacttcttccgttggacttggacccatttctgaccctcgcttcaatgcgatattcctttttacagacatagtattattttagacaatcaaccatctaaatagactattcaaaaataatattataacttattatttaactaaatttcgaaatcttaaaaccaaaataaaaaatgaggcgtgaatcggttaattaggtcaagcaaacagtcaaaatcgtgattttccccaatcttttcattaatcaaaagatgtggaattttagggtttaagtaaccgaacatgattactatctacgatattgtcaaaatgtaacaggcttattactgtactattttcttcccttttttttgtacgttagcttattagcagtaactaaaataaggttgcgtatacaaatgaatttaatgatcttttgtttgtactccagatagcaaagaaaacgaatctatgatgatatgtcttttttctccgacgaggtcatttaatggagggaacgaagtttatttttgtttctttgttctgaaactctgacttcgatatgacctgaccagctgacctttttacccatcaaacgacattacctcctagacagattagctctgtcaaactatgtaagatattcgtcggttataaagataatggtacctagacaacgatgcaaaaagtgatagtcgaaagagagaagaaataaattaaaaagacgtgtgttcgaatcttcgagagaataatggggaacagtgatgtatgtaagacactattactaagactctaacaacacacagtgatttatgtaagactctctctaatccattaacctacgtttctcaaaattatacgtaaactacatatatagtacatacagtatatgataaaaaaaaaaaaaaaaaaatatagcccaacagattgtggcctagttagctagcctgatgatactgacagagatttgctcaacagatttgtcgaagaaggctatctcgtacttcaacgaaaaaacggttagctaggaactaaagaaaacaaaatgaatctcttactgtgatggtgatgccccggcccaacaataagtagatccctagcgcaaaaacaaaattgtttgggcttttacagtgtatattactacatttacaatattatttggacaggatttcttcaaaaattagcacaacatttctaaaattttacaaataacactataaactttaattcaacttaattaaaatatcagatagaaaataaaaataagagcaaacactaatctaatatttaattgaattaaaaaaaactttaaatagtaaaaatatatatccgaaattaaaaatagagaacccaaatataataccacaaaaactaatattaaaataaaaaatctcttttaaatagtgaaaatatactctaaattggaaataggaaacccaaatataataccataaactaaaattaaaaggaatcaaaatttcttttaaatggttaaaatatataccataaattagaaatagagaacccaaatataatactttaaatttatttctaatttattttggatgatagaatttatataaaaattatggtattgttgaaaaaatatattagtaataaacttcatagtaagttaagtagtgctatttttagaagtttatggagtgtgtgctattattgtccataaaacttgttttagtgatatttttaggaatttctcataaagttattagacatggtttaacaaatatagataaaagatcaaagtaggaggaggaggggtgagaaacaggattgaaatggcggatggatgacaaacttctattgagagatcatacatttcaaaagaaaagtgaaagtagtatactagtatttatttcaaatcaaaatagtaaacttacattttatgataaattaaaatacataccaccatctcaacatactagagcaccagagagtatggaagacggggaaaaaggagataaccacggtctccatggtcaacatctccattactatcctgcatctcgaagtatggagtgccatcaatttcatctctaccagcccctattaaacaaaaaaatcaaattaacaatatacaaagataagtttccttttgcttatgttaattattaatctcatgtgagtattcggtatgtgaatcaaatcatcattcttaaaaaaatatgaaatttaatctcgtaaagtgattcatcagttgaaaatacttgtcaagagcatggtgtgagtaatagtcttcttataaacttagggagtttttttataagcatcacattcatcatcagttggtttgtatattccctaccagaaaaaaaaagttaaaatcacaaacaaaaattaatctacaaatatttcttacatctccgctatgatcatgataacttggaaaccagagtacgctgacgatcactagaacctcatctttagccaaatattcaatcacattgtcccatctttccggatttttgttgtcttcataagaaactgtcattgaaatagctttataaactttcaagtcacaaatttactcacaaaccaaaaacaaagagagaaataaacaattctcactaacaacaacaaaaaataaacaattaccacttcaggatcgttttcagactcgatcccaagaaccgtaagagaattttgcgcaacgatttatgcaaaaaagtgagcaaaacgatttatgcaaaaaagttagatattagttgaccaattattacgacgaaaaaacaaaaaaaggttgaccaattaatttagttgatgtgtttatttttctaaccggttcacttatttttcttgacattattaatttttaaaattatttaaatactcgacgaaaaaataataattattatttaaatacttaaaaaaaaaaaactactctggtttatttgtcaaaagttaaatcgtagtaaacgtgaaaagccctttaacaataaacgaatgaaaactttggtaaaccgataataaagaaaaaaagatatttttatcccaatttccctaaatcataaagaaacttagggttcgttatcatcgccatctcgattctcctaaatcataagcgatgttatctccgattgagaatgagagatccgaaattccttcccctgagaagctgaagttagtggaggagccatccgacgatgaatctaagttctctaactatgattcggacgattgggaaactttgtctgatgatcttcgactgttagacgaagagtggggcaagagcggggtttgtaatctccaaccatttctttcttttgaagaattgtttgattcatttaattttgatttgtggtgttttcagggttttgatgtggacttctcgaaagtgcgtcacagatttggttgcggagctgttcatctcgacgacgacaatatggttagcgagcctcatgaaaccaacagagatttgctcaacaggttgtccaacatggctatctccttctacaacgacaagacggttagtaatctctaatgaatcaaataacttttgctcttgtttgctgatgcatgaatctcttaattaatagcgtatatatttagtgtgttggttatggtgatgcatgtttgtattgtaggattcaagtttggaacttgtcaaggttttgagagcaaattttcacccatctgctgcaatcacgctctacatcacgttcgaagccaatgatcctaaagatggtaaccagactaaacgttaccaggcagtggtcctctacttgtcctttgatatccaagtgtgctcttgcaagcctgaaccatcttcttgaatttatagagatgtgttagttaagcccatgtttacatgatgaatatgttataaaggatagcttgttaagttttgcaacgtgagtttatatataaacaagcgaccataataacctttgacataattggtgaagaagatgtgacatgagctacttttgaattagcaaacaaacgacgaaatacttcgtattcgtgttatgtccactacagaataagtgaatttgcggtgggtatgtagattttaaattcaaagtgtatcttagaaagcagaaaaaataattaaacaaaaaaattggagaaaaattatacaaattaatgtcataatgtctatactaattgttttataaaaaaaatcaagttgagtaatagtagtttcttattaataagtaaaatggaccaattaagagatagtaacgttttttttatgtatattaggtgagtacccatgttacgcgtgagcttatgtttagctttgatgttttataatgttttttatattatctttacttgttcaatcgttctaagaacttatagatttttgaaattattttcatatgaaactattagattttattttatatttaatactgatgataattgctttcttttttcttataaaataggtagataataaattgtttatattcccatattcaatttttatattgtttatattaaaattttaaagatatagacttatataattaaaccaaaaatttagggaaaattaaacaaattaatgtgtatactaattgttctattaaaaaatccaagttgagtaatattttttattaataaggttctaaatggaccaattaagaaagtaaaacatattccatgtatattgtttttgttttttttttaaatgcaagtaaactaataagatgatgaaaatatgcatttatgtatatgagattaaatctcaataaattaaaaacttatacaaatatgaaaaaaatattggtaaagcaaaacaaattcagaacattaaagaaattaattagtttataaataaaataaaaataaagtggagaaatgtctacatccaatatgggtaaagtgtaactttgttatttatttatatgataataaatttaagaaaataaataaataaaaagataactaaaaactagaaccaaacatagtttgaacacccttaactaatataaatacttcaatatttgggtgtaaaatgtacatctaaaatcaaccaaattatttggaagctctcaagaaaatattgatctctaatccatggactttgtttttaaactcgtcggattccttttcatagttttaatagttcaatctaaaggaaatgtaaaagatttgatgtccgtaaaggtaaattgaaagaagaaataatacatatatgtacacacatccaagtcttaatctaatattttatagattaacttatgatattaattcatatatatgtttttatattaattgatgatattgatctcaaattcatagttaaatgagaacaccatatatgattgtgtggatatatataaacaaccgtcgttaagtcatccactacttcaaaatcataaagttcaggtatttattcactaatttacatttttacatgtggttctctctatctcttatagaacaataacatattttctaggctatgcatctttctaaaggtataccgtatacaataacatatactttgattttgagtagctggaaccatctttctccaaaccaaaaaatcaagttaaaggtgaaagtgaaagaaaaaatatcatcgagtgtcctaatggaacagttccgataataagaaatacaaaaaaatatgttgcaaatgctcaatattggacagaaaaacacttaaatccgcttacaatcgatagtcatgggacacatgtaagcaaatctacatgaatatttgagttacaattatgaatatatttaaaattaatgtgtaggatataataaacttgttataaatttgagaatttgaagattgctggagttagaacaacagatcaaggtccttaccgtggtgtgatagcttcgcttagtgtgcatgacttgaatattagtagagatcaagcttcatatgctaatatatatattggcagtggaatctacgacaaagttaattttatccaaaccggctggatggtaactattgttaaattatttctagattgtttaatataatttttttttgttataaacatagaatgcattaatttgactcacagataaatccaagtttatttggtgacggacgtacatggagttatgggttttggaaggtacatatcataattctttcatatgataatatttgatgtccacttatgtacaccaaatactatgtatgtatatataccataagaattaaattaaaaatatcaacactaaacaataacagggagctaacggagcaggttgttataatacaatatgtcgtggttttgttcaagtatcaaaaacagatcatttaagtggacctttacctcaactcccctcaggaggggacagagatatttctgtttctattcgacaggttacattctttcttgaaacaaatatgattttgttttttaaaattatcatttttgtagtatagaaaacctaacacagtatatattttaacttttctattttattaaaggacaaagagacaggaaattggtggactacagatataagaggcaatgaatcagaagaatatataggctattggccaaaagaactatttgatcttattagtaagagtgcaaacatagttggagttacaggaacagtccaggcttctccttcgggtcaaagcccaccaatgggtaatggtcatttaccaactgacgatgaggcagggtcggcgcgtgttggagaagttaagtttatagataatgattttgtggtcaagggaagtgaccaatataagttagagaaacttattgatgatagtaacaaatgttatggtctaaaagatggaaagaagttaattttgttcaaatatggtggacctggaggaaattcttgtgggatctaatatttcctaaattaatattgttcttggctatttgaataaataagttatcggacttcagctgataatgttcaagtattaaattttttatatatctctatattaagtgaaagattatctctgcatgtgatctctcatttgatgtggttgatcaaaattggtttatcatttaatttcattaattacttaagtaaataattattttggttaatatatttttgtgactaaaatatcaacaataaaaaaatgattttatgtgaaatatgtagatgcaatctttaatcagacaagacaactacacaaaaatgtatatttaaaggtgtttaaaactggattggacctgccagtctgaccggaaaatgatcctagtgtggatcagaaagaacctccagaatgaactaattcttacgaaagtttgactccgatggcaaccaaaagcaaggaaagacgcgtggagaggaaaataataacatgatttttcatctaattaattaacatcatttaaacatcttttcttctaccactcgtacaaaacacattaactacgattttgttaatatgatagaaactcttcttaaaagagcacatatttcttgttcttttttttcttgtagacttttaatgcagttaactctttttagttacttctcgtgcacgtaaaccacaaatacattaattataatatccatatcaaagttaaagaaatggtgaaatcaaatgggtgtctcatcatggcttcgctctcttccccttcacacggcctaatttccctccctgggatcgacatataattgagggtgtcgtgtattgttcacatgtcggagaccctagagaccctgctatctcgaatgccactgtttacttaacatgtgccggctcaaccactagcctctctaagcagtgaccaatcccgccggtgcatttaccatggtgctcagcatcttagataatgctttgttggaccctagtttctgcgctctcggagttaatcttccagtaggaaattgcaaccttgtcgtaccaaatggcgtcctctgccacagttaaactggtcattggtcaacgtcattgtgcctaatattgctgatttcgccgccagcccatttaccagtcgctgatgcaaggagaaccttaatgcaattgatatacgtgtaaaactgttttatttgttttgtgttgattttgttagtgttaaaatcaatgatataaatttttgttgacaaaaaaaacttgtgctaagaatgtattattggataaaaaaacaaattctgcttcgacaaaaataaaaatatagaaaattgtgccaatattgtttttttcagcatggccttgatattctatgcatgcagtttgatttgattaacatatcaaatttagttttcgtttaatttcaacattgttttgttgtttagtttgtatttgtgttggattgagcacatataaaccggagttaatttgcatttaacttttaatgtttctattcgtaggaactaggaatacacaaatcccagtccagatcatacgtagctacgcaaaagtatccatagactcggacctaatttttttttttttccttctaaagattttattgatagaatgcggttgagttatacatcaccgataaggatcgaaatcctttcataaacaatggaaactctcactaagacccaaattgaaggaaacatatagaaaaaaaactttacaacataagctacaaagataaagttaaagaatccaaagcaacaacactgcaaacttttccttacaagcatccgactagcacttccataaaatatttcagcgttgaagaaatgcaacttacatgaaccttgaaaagaatccaaaattagatcaccttcaaaatgaggacccgaaaagggagctaaaccgagctcacacagtctcttccacagcaaaaacaaagacaaaaaaacaaaaagatcagaacacataacctaaccacaacagttgctctagtaaccaacgaaaacgagaggcgggggattaaagaaaaaccttgggatcaaaaattaaaaaaacgcaaaagaggaatggcggttggagcgttagaccataagcctttgttgtagacttactttctcatacaaatgaagtttgttaaatgaatgcctcttctatttgggttggttgggtaaataaaaggaccttttccacccaacaaaaaaaaaagaaaaaaaaaacttagaagacccttgcgtggagaggaaaataataacaataagcttcgcatgatttttcatctagttaaagtcgtaaatattactccaaattcacataaaagacggttttgtcaatattactattattatagaaacttttctaaaaaataacacatatttccaattccttttcttggagttaattcaatcaacaccttttagtaattcaaaatttatcgtgcacgtaaaacataaatacattataggaaatattaatatcagatataaccttgaatagcttataactaatacatcagaatctgattgtcacaatcagattgtgagacgcgaagtcaaaattttaacagtagattgaaaaagcattccgtaacaatatcgcataactaaatctttcatttttttttccaatataaataccgctctccataggcttcttttgacacacagccaaaatacattccataattaaacaaagtaaaaaggagaaaaaaaaatggtgaaatcaaatgtttatatcacttccatacttctcatacttctcatggccatagccatggccttactttcaacttcttcccacggtctttcaatcgctggcctcagcctaggccaaggccaaatttacggagtcctgcggtgtaacattagcggagaccctaacgcccctccagtttccggagcccccgtttacttaaaatgtgatggctcaaacactaccatcgctgacgcagtgacaaagccggacggtacgtttagggtattgctcagcgccgtacaaacggttttgattagccctagttcctgctatctattagctaatcttccaggggggaattgcagtatttacgtaccggacggtgccctcactgccacatttacactgctccgaatcatccaaacgaatgccacaaatatcgctgtttttaccgccggcccatttgttgatgaaattgtctgatgcggtcgtcgctctcttaccgtgccaaaggggattttcatgcatgctatataataatggtcatacgttttacatttgaggtgtcgtagggagaaataagtgagtttatgctccaccacaaagcttaattataagcagctccctttttgttaagtttccatgtgttgataattataattatcaaatgtataaatattactgggaattttatatatagtgtgagttcgtcggtcgcatgtggctactcatcatgtgatgtgatatgctacgtgcctacgtacaaacagtgaaaataaagtccaatcttcccccatttacaacttcatttgtattatatatggtaagtaataaacagaaaaaaaaaaaaaactgcattacaaaaaaatatataaatttgtattatatttctcaagttctaacaagctttgatcactatgcaggcaatgggtctaatgtccagacgtatagataactggggacatgtaagtgaccagatcataccttcaactgtattaacgagtctgatttttctcggatcagtggtccgatgtttcctctggtgaatttacattggtggcttgcttggtggagccgcaattacatggcttctatctaggaccacagtggaagtatgagtatacaacaagagatggtcgaagagtcttcaaggaaagtgctcctattccgatacttttgcggtggagaaatgaatggcaacgacgttgatgcaagaccaacgaagctgaacactttctctctcaatgccgtgtgaatatagggatcgaatgtacttaagtaaatcattcttttggttaatattttttttgtgactaaaatatcaacaattaaaaaactgatttatgtgaaatatgtagatgcaatctttaatcagacaactacacaaaaatgtataaatgagtaaatgtttgtatgatttgcaatgaaatgacaatgaattatttgggaactagtgaaagaagtaaaaaaacgattgtaaatcgtacttgtatccttaaaacattgaaaaagaagttggtaaaaaaagaagatatgaatatgtataatgtcttagaattaagttgagaaagaaatatcctagcaaaatccgagaaaattaagattgtacttttggcatccaaaaaaaagagcgaaatccaacaccagatagtatagaagaaattaaaaacaaccgatgcccccaaaggagtgtttcatatgacttgatagttctgggcaatcagctgcgtcctctgcacaaacctaggagtcgcaccaccacctcctctcagaggaatcattccagtcacctgcaccgttttgaacaagcctctcatttgtaatccaatataaaatgccttcaaaattctcatataaaccaaaatatggaacttgggttttctccagaggaccaagattcataccttcaagccactgtaggtacttgtcgctgcaaactgaacagagatggggaagaacaccgatgaatccactggaggcacaacaaactccattgagccactgcaacaagattttttcatgtattatttatatacgcatgtcaaaacaaaactctgaagtatagttttaaactgatgatatcatcattagttacctgcggttggagttgtcaataagtagtatagaccattccagaacagaatttcttgggtcgtacctaatattattcacaaagatatgaaccataagatttggatataacaatcatgactttcatctcagaacaaataaacagataaccagagtgaaaaaagccaaattccatttcaaacctccactccccatcgcattgtctaacgcttggtgcctctctcagagcaggaagtggtacggagatgatgacattagtcagatcaaacatggacgaggcttcgtactcgaggctgacatatgtctcgtttccagagactgaaggccagcagtttactgcatcagacaaaagatttacatcaatgggacaaacatttacatgtaaacctgtcaaaaaacagacacgataacctccacagccttacttgttagtggcaccatagactcgtctgctctttgcattctccacctgagaagaccaacaccatctccaccttgaccagtgggaaatggctgatcaggtctcttcagccctagaatattctcattattgaacatatctcggttgatgttgggatgggtcttgaaaagaatttcgggattttcaccggttgcaatctgaagacaaagtaaaacatagatgtattcatacaaagataaaatacagaaagtgatgaattcaagaaaactgtaaaatgcataggaagctcttggaaatagttaagaaagaacgttggagtacctggacttggacaaatccatcttcttggttaagaatttgaagtgacagggttccctgcatatcaaagctactaagtccaccatctcgtctcaatgcaacattgagcttctcttcaacagttaatgtgaaaggatcagttggaggtggggcagctgctttggattggccagtaggcttaacatcttcaatgacgtcttcaccttctgctttaagggactccattaactggttctttcccgacttgccaagtttcatgccagaactcttaggaggagcagtaacagaagaccgtgatcgatctgtgaagttaagcacggtggataagaatttcaaaacaaagagattatctaatcgaaatcaagtatatatatatagaggcgcttaagaaacccgagatggaagggcattttgatttgaatacttgggattgaacggtcatttgtgaatgatccactagttaaagcacactaaccttttggtttggtattgatagggtcgacatctgaaatcatgccaaacccagaaccacttccataaccaccgccgccaccactggatatgctcaattcattgaaaccactttcaagtcttccagatcccattgaacccatggacgaaaatcctcctggcttattcttttcaatctaggaattacataagaaatattaataggagttacagaaatagaatacaacagcagggtgcgctcctgtcatgtaccttgcttttgtcaatctcattagccttacgcttcatcacgtccttagtgtcattgatcttgctctgcataaccagtttatgcaacttctcctcatgactttccatttcacaatactgcttcacctgggcaactgtcacactttccttgtgcccaagagatatgacttcatcaaatgcaaatatgagctcaaaagatgccctggaaatcccttcttcatctaaagacatggaatactcaggtacctagaaacaatcaaatgatcaaacagcacttggaacactcacttttcaaaagaactaagaaccagtacacatccagagtcaaggcaataatctcctcaaataaagtagcagaagtaaaaaaaaaagaaagaaagaaagaaagaagcatacaagtttggagagcaaagtaagggtggccaggtcttctagaatgttactctgcttagttgtaacaagaagcaggaacagagcttcaataggctgataaacatatcgcacattctccgtctcgatataggtatgctgctttcccattccaaccagcttaggaaaagctgcaagtagaccttcgattctgatacgggacatatccacatagtgtctggaaacaatcactacataaaaaagaagaaagttagaaaaaacgcaaaaatattgaaaaacgagaattcgaagacaaagtcaaagatagatgaaaataacctttcccagacttgaccacaatggcagcagcaagcacaacctataaagcacaggttccaactttagaaaacgcgccagacactcatcaaacactaaagttaacaccaaattgcgaagatgcactaaaaaggaaaaagaaaaaaaccaatcatagaacaaaagtcaataccattttgattattcaggctcgaacaatctcggcgattataagaaaggtaatgcgaatctgaaatacaaagaaccaatgttagagtaaatccagttagagcgagatcagaagaaacaaacgggatttgatcttcaggatcataaatcacgtaatagaggaagagatctcgaatacacgaatccaaacgaaactagactagcgaatcgaaaatataaaaagaattcatcgcagatccagcggatctacgagcatcagaggctcataatcgaaaaacataactgtagaatcaaaatcaacacaagcggatcaaattcatgaaacaggatcgcgaaatttagaaggaggagaaaattcttaataatggagatccacagaaatgtagccagagagaacattcattcaaaggaaaacgaaaatcatcaccatcagtgaaggcgaagagcgagagaacaagacgataccttgggagtgatcgaaggagatgaaatcaccagtttcttcttcacaagctcgccgagtaaaaaagatgaaacgagtctcagattaaatcctggtgtgtgtgttagagaaaagacgatccacaaaacaaggacaagtaatctgggccgtttcagttccttattgggctttccaacccagtaaatggaagaaaaaatgccaaaagggcaaattcgtcattggtgcagaccgacgacattcggtttagtccggttgaattttgaaaggaatgtactttcatgtattgagatttgtagcaatcaatcatcttcaaaagtcaatttcagttctagggttttaatttgatacgaggtcagcgaatccggcgacgaatatccgccactagtaactctagctcaggtaggttactctctctctcgttttctttctttatctggttttcacttcgtccacttagaagtatgctcatttgataaattggcatttgaccccagttcaggatttaggattctgattatctctcaatacttgattagtttagtgcttaagttattagtttttggtatgcccacttgcgccatgttcgtttctaaagcaatgagattattttcatttaaagatctggaaaaaagaaactaatggagacaacggcaaatgaagatggattttaagggtttttgttcttagtaaaaaaaagttatcttctttttaattttctgagactttaattgctagaaagttataggattgattcagatagtggaatcagacaactttttcttttatgggcgattactcatttttgttctttggtcttctgattgtttagtttcttagcagatgatttagtcttctcttttgtgatccttttttgctttccttggaagtgtaggtaaggatttgtgtccatggcagctttgcaaacgcttcgtgaatggatcggtatccagcagttcccacctgctactcaatctaaattgctcgagatccttgggaagtataaagaagaggttcctttcttgtttctagcttcatctgctttctgtttgtttcttcttgtcttagagagatttaagaaagaaaaaaaactggtgtaggatgtgagctcgctaacggtccttgtaatggggaaaggtggtgttggaaagtcatcaactgtgaattcagttataggcgagaaagctgctgcagttagtactttccaggtgccaagtttaatgctcttctcatggcttgtctttatgactattggctatctttcttttaatttttctcatagaaagtgtgtgattttccctctttatagtctgaaggactgaggcctaccttggtctctcgcacaagatcgggatttacattgaatatcatcgacactcctggtcttattgagggaggatatgtgaatgatcaagccatcaacattataaaacggtatgatgaactgtttccaggtctaaggagttactctcctaatttggggctcatttgtggcatttgtattaatttggattcgtggatgttgaatttgaacagatttctcctcaacatgactatagatgtgctactatacgtagaccgtttggatgtgtaccgggtggatgaccttgataggcaagttgtcggtgctataactgatgcatttggtaaagagatatggaagaagtctgctcttgttctcacccatgctcagttctctccaccagacgggttaaattataaccactttgtctccaaaagatctaatgctcttctaaaagttatccagacaggcgctcaactgaagaaacaggatttgcaggtatagttttttcctccttacataaatgtctgtaacgaccttgatagtagtcaagttaatagactcacttacctctgatcttttattgtagggtttttctattcctgtcattcttgttgagaacagcggaagatgccataagaacgaaagcgatgaaaaggtcagttgattggttttgtccacgttctctttttctcgcgtcttgtagtagttggaccaatcttgaagtcggattttccaaatttgtgacagattcttccatgcgggactagttggattcccaatctgttcaacaaaatcacagagatctcttttaatggcaacaaggcgattcatgttgacaagaaactggtcgaagggccaaacccaaacgaaagaggaaaaaaactgattcctttaatgtttgcattccaagtaagcccctctgaaccattcagtaacaatacagaataaggcttgatcaaaacatcatgcatcatttattcatcttttgatggtttgaaaatgcagtacttgctggtgatgaagccattggttcgagcaatcaagtccgatgtttcgagagagagtaaaccggcgtgggagctgcgagactccggtttagcaagtcgaaggtcttgagttgtggacacgagttttgtttggtttgtttgtctatctgagagattgttctgtagttgaaattgtgatacaactcgagaaatgtggttcacagataattactgtcgcaaagttctctcatcttaattacatcttctttagcctctcgtaaatcgtaattaagagctactctcttggtgaaaatgattagaagagataattccattttgtcattaatggtaaaagtaaccgctgcagttatttttgacgcgatgcaagttttgaaataaaataaaaatttgagttaaagaaaaaaaaaaccgatgtttaaaggaggaatttggcaaacggagaagacggttcagagaagatcgtttactctttcctcaatttcgaacaaagttttcgaattttccaactctctctagtgaatttagggttctgatttcgacattagtgtaaagatttgttttttatccgaggggtgcgattgtgtagtcaaaccagatcaaatgtcggcatcaacggtgtcgatcaccgctaatacggcggcagcgactagacggacgccgattcttgccggagagaaaaaatcaaactttgattaccctcaaagcgaatcgcttgcgaacggtggtgttggggaagccggtggtacgagtagagatctgagccgcggtgaagctacccttgatcgatctcagggacaagatttgggtcctgtgacgagaaggtctgtttccgctgcgacggggactaataccaccgctacgcagcgccggacgcggaaggttgcgactcctaagtctgagaaagcgcggtggaagacagtggtgaggatatttgcgaagcagcttggtgcgcttttgatcattgttgggttaattcaattgacgaggaagatgattctcaaggcttcttctccgtcctctccgatttcttcttatgaaacggagatggcgttttcgggattggaaagccgaattgcggaagtagatggtcttgttaaggctacgacgaattcgatgcaggttcaagttgaattgcttgataagaaaatggagagggaagcaaaagtgcttaggcaagaaatcgagaggaaagcttctgcatttcagagtgagttgaagaagatagaatctagaactgagtcactagagaagtctgtagatgaagtaaatgctaaaccttgggtgacgaaagatgagttagagaggatttatgaggaactgaagaaggggaatgttgatgattctgcttttagtgagattagcattgatgaattgagggcttatgctcgtgatattatggagaaagagattgaaaagcatgctgctgatggccttggccgagttgattatgcattggcttctggtggtgcttttgtgatggagcattcagatccttatcttgttggtaaagggagtagctggtttgcgactaccatgcggcgcgctcatacgaatgcggttaagatgttatctccgagcttcggtgagcctggacaatgttttcctctgaaaggtagcgagggctatgtgcaaatcaggctgagaggaccaatcataccagaggctttcacattggagcatgtagctaaggtaatgatactcttgtactgcaaactatttgtgttggtatcagttttctttcttgtgtgctcttattactacctttggtgtttgcatttacaatggtttgatattgagatgcctggaaaaaatgacgccattttctttgtgactgttgatggcatgaaattgtttgaatgaggcttgagattagtttagatcggttgctgcaaaagatctgaactgaagaggattatggttacttaataagtttcgtcatcatccagtaggtctcgtcatagttctccaattctgtgtgtgccatatgccattgacctttaggagtttgtttaagatctgtttttttctggcattatcttttgaaattgattacacaataccactctatcgaagtatctcaaacctttgtcaaagagttcaatagtatgcataaatagatcctttgagggttttgggttatcttctgtttctatttgcaacgactggaactagactattttgtttgtttggggttatttcaatgacaataaccgagtaaaatgaaataaagaagacatttggatacgctcattacttactgtctctggacatttttgggtcattcttattttggggattatatatgtacactgacctgatggattgatgcattgtgaaaatgaacagagtgtagcctacgacagatcgagtgctccaaaagattgccgtgtatcaggatccctgcaaggaccggaatcctcagcggagacagagaacatgcaacttctaacagagttcacttacgacctagacaggtcgaacgcacaaacattcaacatcttagagtcatcaagctctggtctaatcgatactgtcaggctagacttcacctcgaaccacggaagcgactcgcacacttgcatctaccggttcagggttcatgggcgtgcgccagacccggttcctgttgtgggaacgaatcttgatcaggactcttcacctgaaagtgaataaaacctcttctgttttgtaacattccttcatccacatctcttttgttgcctgtgttttttatggaaagaaaaagaaagcatcagattctgtgattagactagtagagagttgtttgatttgattatgtcttctttgtgttaccttttggtttatttggttgcagaatacataaatcaagaaatccaatttatactgttaatctttaaaacgcatcttacctatcttctagtctcgatatgataataacatcattttaaaagaatatctccaaattggttttgttctagcagaaatatacagctacgttcaaacgtcctattcaattaaatcacatcaagttcaaaagtttaccgaatcaaatagtttctttatataataccgaatcaactagtagttagtttttattcttaaaatcgttgaataaaagatacacactttattgtaagaccacaaactaaagttgatcttttattggactgctctaggctctacgtataccacacgcatatatatgtgcacgaaaaacgttactttctgattgaagtaatcaaagttcggtcaaaggattcatatatatataatggaatctatgtctatctaagtatctatagaccacataatagaaagaaaaataaaacaaaagatgaaaaggaagagaagatttgtataaatgaaaaagcaaagaaacaagaggggcatataagtatcaaaggaagggaacagtgttcttgatttcagactttttcagaatatattctttcaattattttacttctttcttatctttgcttcctaaactcataaagatctcttcttttaaaaaaaaaaaatataagaaaaacgaagagaagaccgaagcattgcataaggtaaaaacaataataattcctttccgctacagtttgttaattctttagtgttcgaagaccaaatctgaagaagaaagctcttgaattctccctcataccacgagaaccatctaaagaaagtcgctttaactcttagaacaaaacatgtcggatccactctatatatttaatagtatgtccctctgtgtatatatctacatgtgtgtctctgtttatcttcagaattttgtcgtctctgtctcatatattgcagctatttcttggctctttttaaaaaaattttgcagggtctcaatccgagatagtagttgaatctcttttagcttcaagcaatctcagatcttcaatgcctactcagcaaatccaatccttaaggtatatacccatagttatacatctttgtttgtgttttttttctctgtatagattcttgatttcttctcttatttttagttatccctcgaaacagagatgtttatttctaatgttttggttttgtgactatatgaagagtctttgtggcgacatggaacgtgggaggaaaatctccacactctggtcttaatcttgatgctttgcttcacgtgcatagtgaattcgatgtatacgttttagggtacacaatttcaaaatgtcttgagtatttcttggattagtgtcttgagggttgtcgatttaatcttgtctcatagttttcaggagattgttccattgaatgctggaaatgtccttgttcttggagacaacgagcctgctgcgaaatggttagcgatgatcaatcaatccttaaacaaatcatcatcatcttctggaggaagacttagcccaaaaactccatcttttggcgctggatcgatgttctttgcgaaaccttctttgaagaagattagtgagagtttcagaacagagtgcaggagaaagctgaagatctgtaactgcagcactttctctgaagatattgtaagaaagtatgggagagaatcttgtttcagatgtcctgaaggtctagttaaccaatccggtgtactttctgatgacgaagaagatgaagatgatgacgatgatgatgaagacgaggatgaaggaggaggaaaagttgcttctcttgtaagcaaccaaatgacgatgaagtatggcttagtagcatcaaagcaaatggtgggtatattccttactgtgtggatgagaaaggaacttattcaacacgtttctcatctcagaatctcctccgtcacccgcggaatcatgggttgcttaggaaacaaggtacagtactttaccactttcatacttaaaaaccataacaagtaaaaaaaaaaactctgtttctgatattctcttcttcttcatcatcatagggatgcatagctgtgagtttgcagctctacaagacgagcttctgcttcatctgcagtcatctagcttctggtgagagagaaggagacgaacgccgcagaaacttagatgtgatcgagattctcaagaacacaagtttccctagaatatgcagaacctcttttactcgtgtccctgatcgaatcacaaagcacgagtaagatttaagaacacaaatatcatcgttaacacaaatactattttctgccttggctaatcttggggtttcttaccgcattttaatatcagtcgggtcatatggcttggagatttgaactacagaatagctttgagttactcagaaacaaagaccctcttggataaaaacgcttgggacactcttctcaacaaagatcaggtttcacaatcggttcctttcctcccaagaaatcaagttttagtgttgatcacaaactcaaataaaaagaagctaaaccggtttattggttctgaaacgaattacagctcaagattgaaagagacgcaggtcgagtgttcaaaggatggcatgaaggaaaaatcttctttgcaccaacttataagtactcttataactctgatgcttacgcgggagacactagcaaagaaaagaagaacaagagaagaactccggcctggtatatatagtaaaccggatatattctatttctgattttgattggttttggttcggttaatctgaaccaggcttctgtacattttcgtcaggtgcgataggattctttggcacggtgatggaatccggcagctctcgtacgtgcgcggcgagtcacgtttctccgatcatcggccggtttgctccgtgtttgtcgtcgacgttgaggtttgcgagggtaaaaccggaactaggagacaataacttacatcaactgttgaaaaacgtcttggtagaattaagatataatctttacatttattacgatactaccactagcggggctttggagcccgcgagagtgtttactttgacgttgtgttgtgaaaaaggtgaacactagagtaagacccaatttcgttagaaatattggccgaccaaaccaaaaaactcggcaagtcttgcggattgtgcatcacaaatgctaagttgccaacaaaacaaaaaaataaaattccagctctttaatttgtttgccaaattgccaactaagaaattttgtaatctagttatatttatgaattatttgttacaaaatatataaggttctcaaaacatattatgataaagtaatctaatgttttccattagtaacgtttgatttttggttctttcaaagcaactgaggttttgtgcatccataatatgattgtgtgtaaattagacttatattttaagatttgagttgaagtcgtatcaaatagccgtatccttgaagtttcatttcggtttaagactttcgatagaccaatatattttctatctacctattgaggtaatcacgatatgatatatatatatatattgattaatctcttcgtgtgttgtaatttgacttttatttaaaatagaaattaatcttggtaaccaaccaacattagggaagagtataattaatttggaggctaacttgtaagtgtaaccaacaaagtgatgatttgagattacaaaaaaacttataaacgggtcttgccttcgccccgaagttccgcaacacctcacatgtattcgttttaacttcattctaattaatcattacgtattcgtttgtgaattatagacattttcattggttttaagtttgctagtttattgatattcacgtattaacctaatatataacctattatatatgtatttgttaagtttcatggacatggaccaatccataatttaacctaatatacgatcctcaaaattcaaaaatgtaagaaatttgaggggtattgctagtcttaattttaaaatggttatatgattttaggaaaacaatgatatacttttgtaaaactaatatttttctagacaggctataaaactcattttttcgaaaaactcgctctaaaagttgcaatatacgtagattcgactctagagtcattaaataatcaccattctctatcgaactatgtcatattgtaatatccatatattttggtcaatgtacgactcgaccacctgatgaactccattggatcttacggtaacttattaagaaaagcatctaaaattttctattatttgatcaaaatgaaataagatatatatgtacgtgccctatcgccctatatagttgtataaaattgtgtataatattttctcggactaataattcctaaacaaggcaacatgcattacattattcataagtttctctctcaagccatgcattataaatgcatatgcatatacctatatctctctcataccatgcatacatgaactaggacaaactcctagtagataacaagacggaagaaaaaaaagcttagaaaaaatgcaaactcattcttcatctctcgtgttcttggctcttctctgtctgtcatgggctttactagtctcaccaacacgtcctccgtcacaacctccatcacatcctccaatacagccttcgtcacagccgccaacacagcctccgtcacagccaccaacgcagcctccaacacagcctccgtcacatccaccaacacagcctccaacaccgccaccatcacagtctccatcgcagccttctccactaccaccaaacatcgcttgtaaatccactccttacccaaagctctgccgcacgatcctctccgccgttaaatcatcaccttccgatccttaccattacggaaagttcacaatgaagcaatgcctcaaacaagctcgtcgcctctccaaagtcatcaaccgctttgcccagcgcgtggaagctgatccaggtacgtcgacggtggaagaggtcagtgcggtggctgattgcggtgagctagcagagcttagcgtcgaataccttgaaacggttacggaggagctgaaagcggcggagctgatgacggctgcgctcgttgatcgtgtcacgagtcttctcggtggcgttgtgactaatcagcagacgtgcctcgacggtcttgtggacgctaagagcggatttgcgacggcgattggaacgccgttagggaatctaacgcgcctctacagtgtgtcgttggggcttgtgagtcacgcgcttaaccgtaatttgaagaggtataaaggttccaaggggaaaatctttggtggtggtaacaaacccgttcgtgaacctctcgagactttgattaaggtaatttcgttactttatttcttgttttgtcttcgtaggtttctaaatattttactacccaattactaatttcagctagacataaactaacgaaaaaggcctagccagtagatcatgtcggaatgtttagaaatattaaagaaattcctacgttcatatagagtaggggaacgaaaagaaattcgaagaatataaatttagcggaccactatatgttatataaataaatttcaagtatatcttatgaaccaaaacataaataaattttcgatttatttagtgtaaatctgcacatgcaggttacaaagttaggagtttacgtattaagaaacactcaaattttccacatggccagatggcctagtcacatattagaagtcaacgaaactgtgaatatatcgaaaatgtattctgacttttaactttcaatttataaacattaatatatgaaacttttaacaaaactaaataacgaataaaatcacatgggtccatatgctttcttccgtaccaatcaacactctcacatggattcccaagttaatgtacatcacttttggaagtatgatttatgaacatgatagttagtgtgtacgaaaatgtgcatagtttactattcttataagcatttaaaactaatggtagagtaactaactaatttgtaggttttacgcaaaacatgcgacaagggcaaagattgtcggaaagctaacagaaatttaggtgagctaggagagacgagcggtggatcgatcctcgtaagggaagcagtgaccgtcggtccatatgaaaccgataacttccccaccataactgaggccgttgctgccgcacctaatcacacattcccggagcaaggctacttcgtaatctatgcaagggcaggtctttacgaagaatatgttgtcatttcaaataaaaaaagaaacataatgcttattggggacggaatcaataaaactatcatttctggaaaccacagttttattgatggttggacaacgtataattcttcgacctttggtacgtatcttttttgttcttacattttccttgcatctgaaataagtcctagatatcttcatagagactagaaaataagaataaattttgatggcgtttgtagcggtggtgggagaccgatttgttgcggttgatgtgacattccgaaacacagctggaccagagaagcaccaggctgtggccgtaagaaacaatgcggatggatcgacattttatcgatgtagttttgaaggctatcaagatactctttacgttcattctttgagacagttctatcgtgaatgtgatatatatggtaggatatatcattttatcttcaactataaactaaaacaacaagtcaaagcaagtatatatattttgaggttaaaatataatcttgtttgttacagggaccatagattttatattcggaaatgcagctgccatatttcaaaactgcaacatatatgcccgaaaaccgatggcaaatcagaagaatgcagtgacagcccatggaagaactgacccaaaccagaaaactggaatctccatcattaattgtactattggagctgccccggacctcgctgctgaccccaagtcgaccatgacattccttgggcggccatggaagccttactcgaggacggtctacatacaatcatacatcagcgatgttgtccaaccggtagggtggctggaatggaatggtacaaccgggctagacacgatctcctatggtgaatatgacaattttggaccgggggctgatacaagtaaaagggtccaatggtcaggatatagcctattgaacttggtacaagccatgaacttcaccgtatataatttcactttgggagacacttggttgcctcagactgacattcccttctacggcggtttgcttcacaccgaatgaaaatttcttaaaatatcatagatacttggtcttgcctcaatttcaaatgcaataaaacattattcatttttgttattcgaaatctaaatatggttttaattaattacttgctacgataaaagattgaacggttcatgtattagataggtatatcgatgttaaatctattatcatcaatgagaaaaaaaaaaaaaaaaaaaaaacctattttgatatcatgatcataaataggaacttgattgtataagttgacgcatacatattatatgatttgcgttaagaagaaacacctccgaaattatatgaatatatagaaacaaattcagacactttgaaataaagccaatacaagaaaatgttttagaagggaatgttgtatgttcgttataaacaaattaaagaacgactagccatgcatcagttttcagaccagccttttccagcaaaaaatatcaaaaatcagagttgaagggaactttggtagccggcaaccagttattgccgtctataaaaggtttcaccgtaaacttatttgcttccttctttgttaaagacgtcttcaacccttgccacttaacccggttcttggtcgatgctcctggcccggaatttaagtactcggcgtaaaagatcgtgtctggcgcggtatctcctgtccacggtaaccaccctttcgggttgatgaatttgtccatgaacgacttcatgataaccgttgtagagaaatccttccaaggccggcctaggaatgtttggatatcggttaagttatccaaaggcttgatagtacaattgtggatagaaattcctgtgttttggttcggatctttccggccctgagcggttattgtattctgctggcctttcataggacgacgaggcaagatctcgcacttttggaatacaaccgcagcgtttccaaatataaaatcaacggttccgaggataacacaatcacggtaaaactgacgttgtgcatgagcgtacattgtatcttggaaagcgtccatggtgcacttgtagaacacagataagtctgcgcttaccattagagctacggcttgatgcttagctggaccagctgtgttaatgaagcccatgtccctagccatgaacccctttccaaacacagctaaaacattacaaggaaaaataaatcaatcttctttttttttatagaatatactagtattttagtatgctacacaaacacaaaaacttttcgttaggacaaaaaaaatcacttgtatatatgtacttaccaaatgtggcggtttcgaaagtgggggttccatcgatgaagttgagtccagcagagacgatagtcttactttgtccatctccaaccatcacaacattccatttcgtcttctcaaccctaacattctctaaataaactcctttcttcacatatataatcgtaggtttctcattcttctcctccacttccgctaaagcctcaccaatcgtccgatatttccccgacccgtctttagccaccacgatagtcgctttcttcttcaaatcaccactctccaaaagtctccgaccttccatcatcggcaagtcagctacaacgactttggcgttaccagtctccaacaaacgacgtcgtctaaacttaacggtgtcagcgattttccctagccacgttatgatcgctaacgcattgctagtcatctccgtcgagtttttcaaatggttttctccgaaagtcgttaaacttggtttgttcgcttccactaacgcatccatacacgtttcttggtacgttcccacggagctaagccacgtccttagatcgtcaaagttcttcaaggacgacgtcattgtttcgttgagttgatcaacggctagcccgataagctccacgcaagcccccattgctgctgacgtggcgttatccatgtgttcgccgttggagaatccgtcgagaactttcgagagctccgtgatggtgactttgacggcgtacttgaaaagctcctctgggcttgatcggctcgcgtttggagccgatccaagggtctcgaaacatttttctttgtgcaatgtcacgtcgcacagggctttcacggagactgatattggctctccgttattctccgtcggtggtttcttgctgttatcgcgagctgtggttccaacgacggctccgacgacaatgcagacgagaacgatggaagatatagcgatgatggcaattctcttctttgtcttccgacttgcctcaagtttcgcttgctcatgctcgtcgagtctgccgtaggaggacatttttgtaatttcctcctaaccggcctctcgtttgtgagatattgaagttttgtgtgatcaaatgtttttgatgttatctgtttactcttgtagagaggatatataagagtcgacgatttgtatttttaattaaagtgaatgattaaacttgattttacgcggcacaaatatatattttgcgtgggaggcactaagatgaataatttgatcgttaacattgcgagtgcttctcatgtttctttgtgtatatgttagtatctttctcgttttattttattttaagatcgatcttcctgtttatatgcatcattataattaaagttaataagatttgatttaataatagtagtcattactctttttatattattttctcactaagccattcattcgattgtagaattctgctggtttcaatgaagctttgaaatccatatataatatatgtagaactagaagtgatgaaatatagaaattgtcttctttcgttttttttataaaaaatcttacaatttggcgtgtaagattctctttattttatattttacacatatactcgtcaaacaaaatgatacattttgtttgagaaattcatcataatgaattatttatatatttattatatagtatatatccttccctaggtgggatccaaatcatatatgtatgttccttatagtactttcactcaatattataatggtctatgagttttgtaacgaaagtagtgacgagcacaatgtaaattattggtggtttttcatacatagtctaacgtcaccttaaacgcttaaatctgaaaattctgtctaagagccaatccctctaaaacgaggaacggaattggttttagcaagatccattgtcgatgaagtcctgcaccaagaaaaaaaaaaacaggttatagatcagttaaatatatagagttaaatgatcacttatacttttagcaaaatgttttacgtcatgtatgattttgattaaaggaaactactaatcaccccatagaactctattttatgtaaattgtaaagcgtcaaatattgtttgtgtttggacccgatcctacaaagattcgaacactttgataggtaaggccaccttcaatacgtattaacctaacgttggataccgtgaagacgttatttgatacgaaaaacacttgataagtggtcaatagataacctaatttgtaaaataaatgagcaagatatccttttttttggccttgatactaagttttttttattttttttttattttgttgaaatcgacgtgttggtaaacgtcttgattagtggatgcaaatctttgttctgttgagtgttgaccacttgacaagcacttgttagtttaaaacttactaacacactcattgtttttttcgggtttctgttgtatttatggtttttgagattactataaatagacaaaagaaaaaataaattcaaatagagaaactagtggttgacaaaaataaaaaataatagtagagaaactagtgaaaaataataactaatgtaaactctaaacgtaaacacaaaaacaaaaacaattaatgtaaatgaagacttgtaaccaatatatctttcttttattttggttcaacttcaataaacaagatgtaaccaatacatctaatatcaaaaacagtagggatatcaaaagcaaacgaaacaatcaggatcatgtaaagcatttcaacaagatgtttactgtagtgtgcttgatttgatgtctgaaaacaaaatcgcattttgtttttttaggatcatgtatgtcaacatacgttgagaaggacgtcaaattggctattcattttaagcaagagacactgatatataaatataaatcaatgtatatatgcaacatcaatttattatcaaaacatattccaattaatatgtaggttggaatgatataaaccatgggagtgaacggaattgagattaaatatagcggaagtctagagcccgacggaattccaattgagatttatccccaacaaagcatgggagtgaacggaatctaatattgacgagtgtttctaattcaacgctatataatatgatatcaaactaatcatatttcttataaatatagtatttaatatattatgataaatttccatggtgacttttcaatgttctgagacatgccttaattaattaccatttaccaactctatatacaatacgttatctcgtaatatgaattaacgataatattagaaattatatgaattaagtttttgaggtccgaatagaagagaagtaggagagataagagatcctttgaggcttgtccacatcttgtatacttcgtagccgcaatatggactgttcatggttcgggaagggttatgataacctaattccaggaggctcatataacataccgttcatgatcttataataatgaacgatataactgaaaaaaagttttatgcatattacatgttttattaacattcgcaaatatatggttatccaagtcgtggatcatgccatgtgggtaaaggcttttagtttggaatggttagcacaattatttatgaatgtatgtatttgcagtaatcatgtataacatgttgatttttttttattattttttttgccatattataaaatgttgattatgcaaatagatacttcaaaatatagataaaatactctgtttatcacctgattatatagattatctataatgttagatgcatgcttatattaactgataaataaatcgagatacatcaaaacataacttataagatatatataaaaaaatttgtactgataaataaaacaatcaagttttaaccatctacagtcttaccatttctttatacgtctaaactaagtataaaatttgaatataattatgtgtgtagagaatctagagatcgatgaattgctaatcttaatttgaagttattgcattataaacgagatccaccacttattattcataacgtatatgaatcgaatcattgatagataaataatttcagccaagaattgaccccacgagtgccaataaataacgacccttagcgagggttaaagccacaacacaaaatttgttcaaagtctaaaaaagattattattacttatcttctcccctgaaataacctcatagtgtcgatatggcttgccaaaacaatctcgttgtgaagcaaatcatcgacttgtacgaccaaatctcaaagctcaagagcttaaaaccttccaaaaatgtcgacactttgttcggacaactcgtgtccacgtgcttacccacggatacaaacatcgatgtcacaaatatgtgtgaagaagtcaaagacatgagagctaatctcatcaagctttgtggtgaagccgaaggttatttagagcaacacttctccacaattttgggatctttacaagaagaccaaaacccacttgaccatttacacatctttccttactactccaactacctcaagctaggcaagctcgagttcgatctcctgagccaacactcaagccatgtccccaccaagattgccttcgtgggttcgggtccgatgcctctcacatccatcgtattggccaagtttcacctccccaacacgacgttccacaactttgacatcgactcacacgcaaacacactcgcttcaaacctcgtctctcgcgacccggacctctcaaaacgcatgatcttccacacaacggacgtactaaacgcaaccgaaggccttgaccaatatgacgtcgttttcttagcggcgcttgtagggatggacaaagagtcaaaggtcaaagccatcgagcacttggagaaacacatggctcctggagctgttcttatgctaaggagtgctcatgctctcagagctttcttatatccaatcgttgactcgtctgatctcaaaggctttcaactcttgaccatctatcatccaaccgatgacgtggttaactcggttgtgatcgcacgtaagctcggtggtccgaccacgcccggggttaatggtactcgtggatgcatgtttatgccttgtaactgctccaagattcacgcgatcatgaacaaccgtggtaagaagaatatgatcgaggagtttagtgccatcgagtaaacaaacaattaataaaacacatctcttttcttaagattgtgttaatgtttttgtcttatattaactgctcttttcatttcatgtcttgtgtgtgtgtggctacgcttattaagtgttaagtttgtgaattttgagttctttgatctttgttatgaatgaaaaagataccgaacattttgtttgttgtactttttatatattatcattaataaaaaagcatatcttgagatccgcatccatatatattaatatcgtcttatttgtaatttatgtttagtggtgactggaaatgaaataatttgtgacttaaaccgataaattttctcttctttattggagactgctatttagagaaaaataaaatcaagaaattatttgataaatatgcgaatatgtccatagaagtatgtttttgaaaatagagtatctgttaatcaaattcggaataatcaaagcttggttattgagcaatcccgtaatatgaaattagatcaattatagagttaaaaacacatctggacctaatgtataaagaatatacgtttgggcacaaaactatgagaaatcaagagttagggagtggaacgataaatttcacaaaggaaaacgacaacatcttacacacgggtgaaaccggcaaccgaaaaaaagtcattacatcacaaactgacgaatgcactaaacaggatgagaatgaaacagaagcaacaacctcttacgcaggttatccagtcatataagaagatcttttgtacggtaaaaagataaaaaagatcaatttagatccgacggttagattttaagcttctctaacagttacagatgtcattgatgtcacagtctcagagatgtcaataaacacccaaaatgttaatgaaatttcccgacttttctacaacaaaatctccctgtttgtttccctctctttctctctgtctctctcttttcggaaaccctatttcgcgagcaagcagcttgaaaagggtgtgtgaatgtgatctatccaaaagcgtattttcaggtttcttctttctgaaagttttaagctttttgctttgttattgtaatctctgaatctggaatgatggttgtttctctgtgcatgcaattggccttttgaggatctctgattcgtagttgtgtttagaaaaggtggactttttactttacccagatctttgatagcttaagggtttcattatcaatttgaattgaggattagattcaaaggaatttgatttttagctatggaaagaaatggtggtcactacactgataagacgagagtgttggatattaaaccattgcgtactctaagacctgtgtttcccagtggaaatcaagctccgccttttgtgtgtgctcctccttttggaccatttcctcctgggttctcatcgttttatccgtttagttcgtctcaagcgaatcagcacacaccagatcttaaccaagctcagtatccaccgcaacatcagcagcctcagaatccaccaccggtatatcagcagcagcctcctcagcatgcatctgagccttcgttggttactcctttaaggtcatttagatctcctgatgtgtctaatggcaacgcggaacttgaggggtcaactgtgaaaagaaggatccctaaaaagcgtcccatttctcggcctgagaatatgaatttcgagagtgggattaatgtggctgatagagagaatggcaatagggagttggtgttgagtgttcttatgcggtttgatgcgttaagaagaaggtttgcacaacttgaggatgctaaggaagcagttagtgggattatcaaacgccctgatttgaaatcaggatctacttgtatgggcagaggggtgcggacaaacaccaaaaaaagacctggtattgttcctggtgttgagattggggacgtattcttcttcaggtttgagatgtgtttggtggggttgcattctccatcaatggctgggattgactatctggttgtcaagggagaaacggaagaagaacctatcgccactagcattgtctcatctggatattatgataatgacgaaggtaatcctgatgttttgatttatactggtcagggtggtaatgctgataaagataagcaatcttctgaccaaaagctcgaaaggggtaatcttgccttggagaagagcttgcgtagagatagtgcagttagggtaataaggggcttgaaagaggcttctcataatgctaagatctatatttatgatggactctatgagattaaagagtcatgggtagagaaaggaaaatctggacacaacaccttcaagtataaactagttagagctcctggtcaaccgcctgcatttgcttcatggactgcaatccagaaatggaagacgggtgtgccttcaaggcaaggactcattcttcccgatatgacttccggggttgaaagcatacctgtttcacttgttaacgaagttgataccgacaatgggcctgcttatttcacctactccacaactgtgaaatactcagagtcgtttaagctgatgcagccttcttttggatgtgattgtgccaacttatgcaaaccagggaacttggattgtcactgcataaggaaaaatggaggtgacttcccctacaccggtaatggaattctagttagccgaaagcctatgatatatgaatgcagtccatcttgcccgtgctcgacttgcaaaaacaaggtgactcaaatgggagtaaaagtgaggctggaagttttcaagacagcgaatagaggatggggattgcggtcatgggatgctattcgtgctggttcttttatatgtatctatgtaggtgaggccaaagacaaatcaaaggtgcagcaaactatggctaatgatgattatacttttgatacaaccaatgtgtataaccctttcaagtggaactacgaacctggcttagcagacgaagatgcttgtgaagagatgtctgaagaatctgaaatcccgctgccactgataatcagtgctaagaatgttgggaacgttgcccgattcatgaatcatagttgctcacctaatgttttctggcagccggttagttatgaaaataacagtcaactctttgtgcatgtggccttctttgccatttctcacatccctccaatgactgagttaacttacgactatggagtatctagaccaagtgggactcaaaatggcaatcctttatatggcaaaaggaaatgcttctgtggatcagcgtattgccgtggctcatttggatgatgatggagagaaaggcgatctctggtgaacaactggagtcggatgattttggttgcaaaaaggtttgtatctctgtcccatatggtaatttatctagtactgaatatgatttacatatggaatctctaaatttgtttatctggcagctggagtgttgagtcctgataggtggaaccgagtacttttggtagcaagtaaagtaagtctctttgatcttctcttcaagagcataagacgcaaagctgtgaaggatttttatactgcttctccagcaaaaaccttatctatttatcggattgtggaagatgtcctcatgcttttatcctgttggatatgtaatcttattagtcagtattcagatcgatttttaggacaaatctctggaaactctaagcctcttttgattaattattatgtgaatgtgataaaggttacaagtcaattttaacagtttagtttttatcagaaaaaagaaaaagaagagacaaagccaacaattaattaaagattcaaaatcaagtttattatagactgacagaagaggaaatttaaaatcaaatttcgacgttctccttacaaaggaaaacttgtgtgctacaacaaaatgagaaaaatacagccgagagagattacgtaatataatgttgtgcaactccataataaacacacagactctggtctttccccataaatgtccactaaatagtaccacgctgtcagtatatataatgataaacacaagaataaaaataaaccaaacgtacacaatgaatgctttcaatcatgcatcaatgattagtgaatctgacatgcatataccataccgtatattgatggttagagagtacttttaaatccttgttactggatgtaataagctttttgcatagcagtttcattaaccttgaatcctcagatttggtctgtattatattattttataaggaaatctaatcgggtgtctacagcatcgcattctaaatgatgtgtaagatatgttggtgagaagtgaagttttgttgagaagttgaacatgaaacgtgaagtccagattatttcttataatactcaaaaatgcatacattttagtgatattagatcccacaagaatgtcctccaggtccaccatatgagaacaatacaatgccctttccatcttttaagccataacatttagcactgtctaatagtttttctaacttgtatttgtcactttcctggatcttataattagaatctacaatttcaagtttcatgacgcgtgctgccgcattgacatcttcagttggtttatgaccgttacccattggagggcttacaccagaaggagaagcttgaactatcccgccaactccaatcatgtccacgctattccttataagatcaaacaattcttttggccaataaccaatttgatcatcttctgttgttaagttcacatctgatagccaccaatttcctgaatttttatccttcaatggataattaaaaaatggtaaaagagacacagcaatacactatgttagattaatttgataaaatacaaaacaatatttaatgctaagacaagtgtatatgttacctgttcaatactaagatatatacccttttctcctttagggtcagtaggttgtggcccaaagaatttagtttttgacacttgaacaaaaattcaggacatcttgtattataacaacctgctccatttgcaccctactccatatgatcatcaaaaattgttaaattgaagatgcataaaagacaaacaacatactttaagataactaattaagactatattacttatattttaaacacatataaacatatgatcatgtttttaaaaacatatagatttaccttccagaacccataactccatgtgcgtccatcaccaaataattttggatttatctacaaattaaattagagtgttttaatttaaaataataataaaaaagaacttaaatagttataatattaaatttaccatccagccggcttaaataaaattaaatttattgttgactccactgcctacatataatgtagtatatgaagcttggtccctattaatgttcaaaggatgtatactcatccaagctgccaaaccatggtaaggaccttgaccatgtgatctaactccagcaatctccaaaattccaaattttaacattatcaaaatatgcatatttatatttgtaactcaaaaatttaagtagaatttcttacatgtgtcccatgactttcgactgtaagcggattaaagtgtttttcttcccaatactgagcatttgcgacatattgttttgtatttcttagtataggaactgttccattaggacactcgatgcttttcttacttttcctttcactttcaacttgcttttccggtttggagattgaaaaagatggtttaagctgctcaaatatatatatttttatgataaatgagtaaggtgagaatgaaactaaattatatattatcttctttttcacaaaactaaacttaaattttatttgggataaccatgagtacgtgtattctatatgattaaaagatgcataatccagaatacatgtcaattttcttgtcagagatcaatatattgataatataaattttaatcaactcaattaaaaatatttaactttgagtcagtttaaactttcttaaaagcaaagttaaaaacaattaaagtcattatttattggatggtttgttcacactttctcttacaaattttttgtcagttaaatcatttatttaatatattaaacaatgaaaagtaaagagaaagtagaaaaatctaatcttgcttaaaatttaagaaaaatatactaaatgttcaaaaatggttgtgtgtagatgaatgattgtataaaaattaagtttaaaagacaaaaagttgagctaaacatcattcaactcattttcttgtgaaatggtagatgaatgggcaaaacatattttttatcattttattatatttttaagtttttagttaaacacactgaatcacttttccaatgttttttttatctcacatggtgaaaattagatgaatgtattataattttatttaacctagttttattcatttaattatacaactatttgcaccccaaaagaaaaacttcatatatgcttcagatatactcaaactacaaagcatatatataaaaaatgaataaggttgacaagataatgaaaacacgtataaaaaaagatagtttgatgaatgagtacctgaattgtatggttttggagtagtggatgacttaacgaaggttgtttatatatatccacacaatcgtatatgacattctcactcaactatgaaaaattgaatataaaaatcaataattataaattaatatacaaaatattactttaatatctagacatgtgtacatatatgtaggattttcttgctacttaccttgaaggatttgacatctcttacggtttctctagcttgagctacataaagtacgagtatgaaatcgaagaattttagaccaacatccattaattaacaatatgtggaattttcttaatagctttgtttggttttgttcttgttaaaactacaattacatataggtatttataatcgttttcagttttaaatctttcttatttatgatttttagttacttaatgtgtattgttgaccaaaaaataattacaaactctctttttgttaactttgcttttttaagaaaacaatactaaaatttgttaataagtactattattcattagttttcttaggaattaggattgtttagtcaactagttttttaaaaaattaatgactcactcaagtcaagatagcctgatttgttggcacttttaggattcttacttgtttaaaaagttttaacagttaggggtgtgtgttgaattaagggttttggaagattctgaaacatattcggggatttggttaattttagaagatttcttttaactaaaaagaaaactgtaatggtcatttggtgagatttgttgtgaaatttgagaagatattggagtattttgtgtgatatcccaaaattatgttttggtaattatttaaagttatgctacctgtagtctttcatcttgttcttcattacaaatatgatttctcagaaccaattagaacaacaatacttgcatcgaacgtgaagagaagagccttgattagtggtgtttcatagccaagtcgaaggcgccaaatttctccagatcaagaaatcaacagtggtaaagttagcgacaccacgatgacaattgcagtgctttgttagggaaagtttccagaattttctcaaccagctgaatcatctcattgaatggagcaaaatatggagaagaagtggtttaactattctgatacctgaaactgaagattgactaacgttcacggagaatcaatgatgagcgagtttttgtgaatatttttatttatgaaatccatccaaactacacctctaaaaatgtgattttctcagccataattctcaactaaaaatgtattaaaagtctctcaatatatgaaaagagcaacatgtacactaccaatttctatttgttttcgaaccaatcagagagctctatttcacacccactcgcaccaagtgcatgttgcgcgagtgagagcaaatctatagggggtatgtatgcctttccaaattatgcattgttcaatcgacacacttctctatgaaaaacacattgggtgactattttgttttttgttttcttctctgaaaaaccaatgccaaccgaaccgaaattaaaccatgtaaaccaaaccgaaatcaaatttcgacactctttacaaaggaaaacttgtgcgtatgttacaacaaaatgagaaaaatacagccgagagagagattacgtaaatattcttacactaacaacccaacaaactctctaccattcgtgaaatagtaagcaaccaagtgggaaaaatggaatatataaattatatttacgttggggctgaagggtataaagaattttgatttgagaatgtgttgttgcttcatatcatctccgtggaggatcctgaatcaggttcatttcaactcccacgggttgggattctctgaaagttccaagcttttcagcctccctagctatccgaacatcggaaggtctgtaatactccactagaaacttgatggcgaatctaggaagcaatgatgtcacaactattgctagcaagcagaaccagaacatccatgtcttgcccacttggaaaattgccctgtttaagaaaaagcgatgacactttcagtatccagaagatatatttttaatttgcttctgacagaatgatatgtagagagaatgaactcttaccagtaaccagggagtgtgggtataacatcaatcacaatgacacatatacaagctgcaacaatggatccccatatggcggcgtgtgtgatccagttccatctgatcacatccatggccaagtgaagattaaccaccacaactgcagctatcgtccataggtctcctaggctcgacgtgtcaattgtactgccccaataagcaaacataggaatgaagaagatggctgcactttgccagattgtgtcaatcattgtataccagaagagcgtagtggaatatccctctgccctctggccaacaccgtagagctgaggatgatcaagaagagtctgccttccaaggtctttgtcaagaataccgataattattgtagggattgctgtgtatatgactgagtacaaaacactgctccattctgtgatggcagttgtcaaggtgtagcaagtaaacaaaacgtacctgcgtgaaattggtgagtgttagtctgcggtcattgttttaagacggaatagtacaaaacatagtaagatggtaactcaccaaaataaaattagaacaaaaactgcatttctatagaaattatatagtatcatgtaacccatcctttggtaattccagtgtccatggacgagcaataacggaactaaaaatctgaactgtcccattgcgaaatcagatgccatcacagcttggcgaccttcttgtccgcttatccctaccccaacatcagccatttgaatcatggagacatcattggcacctgtcaaaacacaaagcatatgagaagatgaaaataaaaaaccaaagaactgggtctgtttagacaggatcaggcagactactttttggaaagaagagtggggtcattaccatcaccaatggcaagagtcatgtcagaagtccggttctttacaagtgcaacgattccagctttctggaaaggagcaacccggcagcagagtatcgcagagcacttacatgccacctggaacagctacattgcaaaaatgagcaattacatcaccatcatagaaagtcataagcagagtacgcaagatattttaatcaacatttcacttaccacatcttcaagatcattgtcgagtacatatatgaggctggtaccgtcaataatcaaggccacattatcactttcgtcattacttgcaatactggcatttgcttcttctaagctcctccgacatgaatccaacgagttgctatttattacaatttgcctcatgtttcttgtcagaagcctcgatgagaagccaatggatatggcagtttcttgcttgtcaccagtcaagacccagacttttatccctgcaatcctcaaagattctattgcttcagggacaccacgctgcaatttgtcttcaattgcggtggctcctactatcctaaggttagtctcaatgtttccagcaacttttcttagcaatccagcccgaccaatcaaggcggtgcttgccgcctcaaatgaagaatgccattgctcaaactctgaatcgttcagctctctcatcccaacaacaagtgttctcaaaccatcagatgagtaagcatgaagttgtatcttggtctcatgtatgacgccaccgtaggattcatccatgacaccaaacatggatgagtctgcaccttttacaaagagtttcaccgacatgtcggggcatcccagtatcactgacattctttttcggtcactatcgaactcatgcaatcccaaaacattaaatctgcactgggcaaaggaaaaggaataaatactaatggccacaatctactatgagatgcaatgacaatataaaattaatgacaaaaagtagccatcacatgtctaaattacctttgcgtttctcctcgcacattaataactatatgaccagaggttctctctatgagcaagaaaccatatgcagctgctgcatagaccaatgcttgttcatcaggggactccccttgataatctaccagtttcacattgggatcagatgtattgctaacaattggcacaattgtattgcaagctgccagtgagaggaaaaactcatttgcacgttttgcttcttctgttgccttgccagttttcgttaactgaagaagcacaggatcaactctcaccctcatctttggcttcaaaataattccatcaactgtatcatgaaaatttttaggcatcatcaaaaatcagtaaacagaaaaacatactactcttaataacagaaacattattaagaaactagttttctttaccttcaatggagtatccaggatgctcgctatcagcaggttccctgtcagagtaatctacgccttcgatgcaggcacattgaaactccatcttgttgtccgtgagtgtacccgtcttatcagagaataaatacttaatctgccctaaatcttcatttatatttaaagccctgcattgaaaacttgaatctgaagactcgtcatacatctgatcatcattggtcatgaagtatgcttgaccaatacggacgagctccatcgatatgtagagagaaatgggtatcatgatctggtacacaatgactgccataaagaaggtgaagaatatctcccacccccaaccatagtatttatagttcttccctcctggcctctcagagtagtcctttcttctataaaagagaatagtgtccaagtcatccctgtgcgttctcaaccacacagcagcggtcgcggctgcgattgtacacaagacgatcagaaacaaagagagtagaatgatctccaaattcattcgagtctctagcctactcctctttgatggtgctccagagttgttgagcatagctttcgtctcaccaccagcatacacaacaacccctaaagcccaagcagtgttcttaagctcacaccctcttagaataatattagaaggtccaagggagagccttctaccatcaatctccatgttggcttgaaacccataaatgttcctgttaggtttctcacacttgataaatccattaaacgactccatatcagcagctttcagaagagtttcctgcttggcatacctggtcttcaaattcgactcaccatccaaattagtcgtctgcacgtagacaaccccagtaggatcactagtagccaagagcaccatgtcacagggaagagtctgattggattggactttaatgacttccccaacccggatatgcttccacttcttctctcgaaactgatgatcctcaaagactaaagccaacctattgttctcaactctatctgacctatgtctccggaaatcctcgtaagcatctttgatagcagagaccaagagaacaaaggcaaggggcatgatggatgcacctctgccaaaaactgcaagctgaggaagctgattgagaacagcgataacaaggaagtaaatgtaagcaactctatggaactgttcaaacaagttcctaggcaagaaggtgaagacagagtatttagcagtcttgatagaattcccagtgaactcaaaccgttcgttagttctgtcaggatcgttaatataaatcaaacgagcatcttcgtctttgatctctttctgagacatgcttagcatctcagaatcagctccagctgaaccatgacggatacgcttagatcccaaatcaccgaaagtaacttctttgttgtctttagaagaaacgctccatcttgaagatacacccagaattggatcgtgatgaggcggcttatcaattgatttcctgggatccatttcccgggtccaggaattggatttggacaatgaaagtagagattttttctcagaaattcattaaaacacacctcctggagaagatgattggacgtagctcgaatcagccagcagcttgaatatctgaaatcggagacaaaacgcctcccaggagaatggaattgaattgcaaatgggcagatccacctcttggagacgaaaatggaattgaattgacctagctaatcgaaatgcacagatccggatcttcaattttgcgcgctaaaaatgaatctatctatccccaggaaaatggaattgaagagaaagagattgaggtgacgcaagccaatacgtcaatacgaagaatcaaataaagaaataacgagaagagagagagagagagagagagggtaataaataaatggagtttcgtatttcttctgcaagggtagacgaagacgaagaaggagacgaatgagaaggaagacttgatgaaagagagagagagagagagatctggaagataattgaagaggacaaggtttgaagacgaagaagaacaagtcgccaatggctggcgacgtcgacgaatcttttttttattcaattttgttttagttttaatttcatttaattttgcattataggcacgaaaataaaaggaacagagaaaggagaagaagaagaagaagaagaaagaaagtgaggaaaagtcatgtcgtgttggtccgtccagagaagccactctcaaattcttactcttctagaaacactcttttttatttttgagccgccgtattatatatttttattttcttcccaaaatgtatatttttataaaataattttatttccaaataccttttcactgattaatcgaaagtattttttatatccacaattactaaatcgggataaacgtaatacaagaaagagaaaaaattaatactttgaaaagaggtgtgattattttgtaaattttagacagaaaaccaaacttttttatacctagtgatgtagtggttatcatcaacctttaattatgagaaaagtttaaactatcaaacactttaaatattcgttatataagtagaaacttacgagttaattcagttcttgttttttccctccgtgaatccaagttttaaattttaatatatgtcacgtctatatcttctttcattatccaatattgaattttgaagttgatcttttgaatgattcaatatttgatttttcaccaagtatgtatttatatgaaaataaaagtatattcacatatatgagaaaatggaattcatttgatttaattggtggctgatatctggatattagtttactttctatatgaataatgaatatggtgatattgcaaagccagatattgtatggattacaaaaatgataataaaacaagaacaattatctaaatacattgtacatacgatacgtagtagtgtacgttatataaaactatacaagttcatcgactttggtcgagctaacataatctgaatcgtgtttggatttttaacgcatttgactgagagtttccatttgaaaaccgtaaaccggattttagactttcgtaaattcaacattagaattttataactagctagttttaagttctaactgagattaatatgagattaaaatgataatatgatttttaactgagattaaaatgataatatgatttttaattcgccatactgagattaataattagttgtaataataaacaaagagcaaagacaaacaagtcaagactcaagcggcttacacttcacatggccaaccacaaacaatgtaaagaagttcgaagaacacgatttccacgcccttgattgtattacttttgatatttaaaatttagagagtaattaaaactttaaagttatgtagtctttcacggttttacaaaacaaaaatgttaaagagattcaccaaaaaaaaaaaatgttaaagaattgcaaattggtcattatcgatcgagtattggttttaatatttcactaacactgtacacatatcgtcataataacatacactaacatgattggaacgagttagttgtatgtatgatgattaaacaatattctatacattaattattcacctaacgacatcgctttcgtacaagtttgtttaacgactaagcacgttgaatctttaatgaaggtaatcacaacaaatatacattaataatccgcataatgctagcataagaaaaagaaatcttcgcactaccatatatacactaacaagatttacaaataaaactaaatgtcatttggttgcaaaatatgccgtaaataatcaaaggaaattggttattttattattttggcaatatgtagtttgaacaataaaacaattcagctcaaagtaatcaaccgtgaacatattttagctttgacaaaaaaaaaagaacatattttagcaactaaccatttataaattataacgataaacttattcatgttttgcatgtgatagtatcgattttatatacttataaatttaattttatcacacacacaacatgaataaactacataattataaattgaatcttaaagatgtttttgatgtttcgttgacacaaaatatgggtcaataacaatagtacaacacattcttctttaaaaccaaaaaaaaactccttatctcaagattccaacgtcttcgtcatcacatgcattgtgtccaacgctttaatcaaccattgaagtttctcattcatatatcatcctcatacttaagtctttagctagtatatatataataagtcttctcctctatctcacatctcaaagatggccatatctactcttatcttgattgaaaatatataattcttggaatgaaacttctccacttctgtatttagtttcatgttatcttcaacagtgtatggtgaaagaaggatatgtttgaatgatcacaaactacaacatcaatcacttcatacttactcttgtctagtttgaaaagtcattaattcttagtatgaaacttctccacttcttcatttagtttcgtattatcttcaacattgtaatattgtatggtgtaaagaaggattgaatggtcagaaactacaacatcacttaaatctggattcaaaagttaaattaaaaagtatgagctattatcgtaatatgttttttctcataaggactgaaatataattttactaaaccgaggttgattctagacgtgtttagtggggagaaggttttttttttatctgaactatacaaaaagtacgtttttcagcctggacaaatgcttagtgctgatttatcatttatacctaaactcattacaaatgactcagttgacacgtgtgtattgtcgttttgctattttgttcatttttttgaaaaaaataaaaaagtggaatctcgaacctgtgatcatgggaacgtttaattcagcttttaccactgatccatataaacattattgacacaattactggtgtaactctttatatacaaataaaatccatgggattggatttagtaaaacgacacgtctacaagttttagggatttcgtattttgctttcatttcttcttcttcttcttcatacgagagccgaaaacgaataagaagattaattgaggagaaatcgaagatgtctatagcgttagtggagaagattcaagccaaattttgaagaagtctagtagattctgtattgtaagctactaaaatctgcgatggtgaggtaagattctacaaaaccgagtatttttattaagtttttgtttggttgtctacacaaaagctgcgtatttgttttgttttcttcggttgaatctctttgacctcaggcatttcaatcgtcgccggaaaattcatcggagatattaaaattgaatcaagcttcgaattggtcaaccgatctattaatttgactagagaggaacgagctgtatgatatatctgcttccgaattgagtctccatggctagtggaagcagcagcatcgcaatcggtggtttgtttgagaacgcggaggtgactacgagtggtagaccagtgcttcgtcgcaatgaggtcgaatgtttcctcctctcctccatcgatatagattccgaagatgatccgccgcgattcacagctttgaggtctggaaatctaatccttaccactcatcgtctcatatggattccttctcaatcaaacgaatctgttccttcttcgattccgctctccgccgttactcacatctattcccataagaaatcaatcaagtctatgttccattcgcctagaatccgatttcaagcggatcccggttcgattgttgtaacgattgtgtttagagggaaaggggattttgatggctttttgtcgaaattgtgggaatgttggagaggtagggcatgggaagaagaggagaagagcgagagtgagacttcaaagtcaggatctggaacagttgcgcaaggtttgtatggaaacgatggaacggtgaggatggtgggattggctgggattttgaggaaggagcaagaacagtgggagagcacagataagagcttgcaagatgcttttcaggatttgaatgctcttatggtactactctttttcttcctttttaccgatgtagatcatgtattgttataccaagttacaaaatttatggatagaagataagtctggaacatgattttcttaacgttttggtggttagtttgctctttgtgatgcgtgatcttgaagagtttatttgcaactgttataggattactcttaatcagtagaaggaaaggcttgttatttgattatgggttttgtgatcaagacaaactgtgtctaagttcttgtccacttattgggtttacagagtaaggctaaagagatggtgagtctggcagagaaaatgcggcagaagcttttgtctgctcctagtagtcagaacggttcaactgatgatgaagaaatggggtccaaagaagaaatgcaacagtggatgttgagcgttggtattatctcaccagttacaaaggaatctgctggtgcattgtaccaccaagaattgtcccgccaggttctcttctactttgcaacagagatatttgtgttcattagcttatgttgtcagtgataacttcgaaagagatgttttggatttagtggcagctgatatgatattgatatggacttataaagggcatttgttaggaatatgtttacgtttgttcgatgtttctaaaaacctatgactgtcctagtagagaatcttcaactgtttagcttgtaaaattgttagaatctggggaattcttgttcttcaagtccttagaactacatgattttgaggttgacatccttatttgcataacctgcagttggcagattttgtcagaatcccattagaaaaagctgggggaatgatcagccttactgatatgtattaccacttcaaccgagctcgtgggacaggttggaacttcacaaactagaattatttgattccgagtactttattctattttctttgcttcagcctgtaaattcgaaatctttcatttcacagagttgatttccccagacgatttgtggcaagcttgtaccctctgggagaaatttgatgtgtatgtactttttgatactttctcctataagttcgaatattacgcatgtgcatccaatatgtagaaatagtgatctgtcatgtatttttgtttgggtagtccagtaatgctgcggaagtttgatagcggtgtgatggtcatccaaaacaagtctcacagcgacgaagaggtattcttaagattatttattccactgtaactgcattgagtactctctctctctctctcgatgtgcttcttacttttgtttccaattacctgatcaaatatctttctggccatttaggttatgagtagaatcagaatgcttgtgacaaaaactgaaactcttagagttggagttactgctagtgatgcagctttgacgctaaagattgctcctgccatggctaaggaacatctactatctgcagagaccaaaggtgccttttttcccaactccaataaaagcttgcccgacgaaacatgtatctattagatttatatgatgctcacgttcccatttgttgaaacaggtttgctatgtagagacatgagcccagatgggcttcgattctatttcaacctgtttcccgagattgatccaaccaatctccatatgtaagttaaatacactcataatttattttctgtggtgttgctattcgtgaaactaattaacctttgtatctgacagagtcaaggagtttgggacatacggtgaatggatcaaagcgaccagtttgttgtctgtatgacaaagcttttgctgtaaactatttgtaataagacatacaaaatatacaaacacaaatttggattttgaatcaaaattgccaataatttattcaattattgtgggcaaaggtgtgtataattgtttttgtaattgttcagctgtgtttgaaattgcatgcgacaaacaagtcttgaaagaaacgagaaatcttgtttcaatgcagtttatggatagatgataagcctggaacatgtcttgctaatgcttaactttctggtggttaatttgttaccaaacctatataaacttgagagagataaattccattcacatccttgacaatttcttaatatcttatatcttaagctaattagcaaagcaagtttactgcaaaagggtaaagaagtgatggattgggaattaatcagcttcgagggcttcaatctcataccgaatgtcttccaaatactcattgatgctagtcacagcatcttgcactcctctaatggcctccttcaaagcgttatcaaactctgcatctgcttctgcttcctctgttcctgcagcttcagtaatctcatgaagatgcacgcactcgtgttgcataggcttcttgaatttgcagttctcatgtgtcagcattcgttctgacggtcttcctgccttcttcagtacctgtattgtaacagtctgcgaaaaaagtgaactaaagtaagattcttacttttgttcaaccgttgagatatctagattagagtaaatgggtatgaaaccagatgcaatttctgcttctcttgagtttgaatgtcgctgagaagtttagcaagatcagctcttccaacttctggatttagaaacagagattccatttcgcgcacctgtcatcaaagggctcaatctttaacaacacaaggttgaacaacactgtgaaggtgtaatcaaatactctcagataagatccatacttgtttcgaacattcactgaactccgttgtaatctcgctgcacagcttctgataaagtgcttcagcaccagactccacatactctgagaatccactgataattgaattcgaaaacatagtcagctcagattaatagaggaagatctcagtaacaaaaacatggaaatctacgaatataaaaaacatctccctctctatccttcacactatttgcctcaatttcaacattcaccaacaaagtctaactctcaggcaatggatcaattggaacttaacaaaaccgcaacaaataaactaactctttgagagatttccaatgaatcaatcgaaccttttgagattggcgtaagcctgagctcggcgctgctgaatctccaacagactccgaagcaggaccagggtttgagaggcgacgccggagcccaccgtcgaactagtagacccgacaccggaaccgccgcattcgttctcaatatcgccggagagggaatctctgagggaaaccttcttctggaaatcttcggcactcatcgtccgatctttctctccgactcttttcgtcttctcaaacacgacagagagagagagacgaagaagcaaagagaaagttgcgaactaaccggtttagtcgattttactaaattgaaccgtaatttgattttaatcgctttgatatcaagtccggttgaggcggttcttcggttttacccggtttgattggtttggaatgacatttttgctgcttgttaaattgtaaactagaccacaggcatttggatcccagtctcgacaaatctggtctgattctcaaaatagtgcctataaattattatggttggaaaaaaaaaactgacttttaaatcatcacttcaatcattaactgagaaatctcacatttttgcaaatgagcttaaatccaaattgtacaatagattgcatgttttggagttgtcatgaacaaaatgtagaggtttttatttaccattgaacaaactgagaaagcaatacaattctaatacttagtttgacacctactcttcagtaacatacctgttcttccttgctcccaacgcaactctctgaaacaaattcccaaaatttgacaaagaaaaaaacaaattggttaagtaatttgcagaaatagtttacatgctttgatttacttctacgcagagctattaatcgtcttaactgagaatattttggtgtaggctttgattccagttaggaaacggatgtaagtcggcttcatagatccgctagccggtattgcccttatgtttgggacaaggtactcagccacctgcaaacgaatgtgtgatcatgaatcatggggctagagattagagatcgtgtcaaattgttgtgctaaaaagaattaagagttaatgggttcttaccacttcggctggctctgccaaaacattaatgaagaacttggcctgcaatagagaacgtattagagagaatctcttgaaatggaatctaaatatttcctcagtgttaagtcatcgaacttgttttgtagttgctccggacatgagcagatcagttgtgaccattccaggctgcaacaataatccagagaaaacacattagaattatgatcatgtttagatcctgaattcattcaaattgttcaaataactataatccatccattctattcatctctatgcgcatgtctgtatcagtgtatttaggaagacactaaaaacaaccaaaaatgaaatgaagcaatatattgtattcataccgatagattatgcaccacgacatttttgacatcttgcatctgcaactctgcctatgaaagacaggaattactagagaagtcatataaggagaagggaaaacgaagaagagttcaacagatataactctggcattacctgtaatgactttgtcaggtgaacgacactccgtttagttgcaccatatgcagcaaatctgtcaaacgttaatcaaaaaaatgctattagacagtacagagaagagagcctaaaggagatttactaaagcatgttcccaagaaactttaatgaatctagcaaacctgggtgttggtctcccatctgaaccagctccatcaatattgaagatatgaccacctcgagattgggtcaacatcatattcattgcctaataatcatgaacacatgtcagtaaatccaactgataataacaaaagacacgctgaattcatctccttataacatctttgactacctctcggcaacataacatgagacctagagtgttggttttcacaacttcactgcataaagatttcaaaaagtaaatgactgaaaccaatcacatagaaactaacgaagagaaggatcaagcttaacacaagacttacataagatcctcatctgaggcctctgccaaaggtttaaagctatatgcattagatcccgcattatttatctgtatcatctcaagatggtattataagactatttctatggttacaaaattgaaaagaaaacatagtaaaatactctgaacaacattaacacagatgtcaccaacaaatgaacgttcttcatagttttgagagtgtacccaaatgtcaatgtatttaagattcttctgactataagctacaagttccctcacatccttcccttccgtaacatcacacttagttccctactaagagaaaatggtttcatgatatcaatgcacataaagcaaaaaccttggaagaccacacgaatggaaaagaacagtaaaagaaggcggtacccacacatgctccccaaattcttccttaagactctgaacagcagtctcaactcgttcagctgcaagacaggaacagccataacagcaaaattctactgaagattggttctattacttgcttgcatgtttccttacagacacacaaactctagaaaaggagttcaagacaacaatggggacaggttctaacctgatctagagcaaatcacaacattgtcgcctgctttcagaaactctctagctaatgcatatcctatacctgaacaatcaataaatcaaaaaccactctttagagacacaatgagataaaaaaatatgttttttcccttctgaagattaaaaactcgagtcaattgacaaagacagagtgaatgaaacctttggttgagccagtgatcaatatgttatacggaggcgtcataggttctcttttccctgagatacgagcttccaccgccgcagacgacggagtaaccgtgaggttttggcgcgtaacaacgacagttgcgagaccaaagcgttctgccagtaaccgacgccggcaaataggagagagaaacggaagcttagtgacatttgagacggaggaagaccgaagcctaagcaacggagaagaagagacgttgaaaccactccaagtagccattacagaagctcaaagagagagagagagagagttgcgtaagcgagcaagctcagagagagttaaatgccacgtggcggcatataagatgataataaccccaattattgttcaaaatacatcatagcccctaaagtttctagattttatgtttataaccctacactattgttctgccccaaaaacgacactatagttacatagtgactactgaagtataatttctctatctgctttggttggtatttgagatcgtccaaagcacagttacacaaaccaaatctgtctgcgaaaaaacctacagagattcaattacttgcccttggatcgcctgcgccgtcctccaaggagtttaagcatgttatcagtaacatcaggtggagaatctgcatcctcattgtgttggccagtactattatcagaggtatgagtcaaccaagctaaggcctcaacagcagcatctttctcagcgagcgttttattcctctgaggcttcccaacgaactgcattcctttaaactccacaagtgctctgaattcgtttgtcttgagatgttttgtcttgtactttggaggtgagtgtccagctctcatcaaaagtgtctgaaggagactcttcgggtttgtcccgtctttggagtgtttgttctctcctatttgcggttggcttggcctctttgtgtcacggccaaagacaaatctgccttcgcattggtctccagccacaagttcttgaactgcaagcatgaggtacttgccttctttgtggatgtccatgcttggatcttcaagctgcaaatcgtaaagatactaaaggtgttaaagtgctgcactacgaacactttttccttttaaaattgaaaaaaactcgcctttttttgaagaagcttatcgagttcttccttcagctttacataggactcagccaaatttggatccatgaagaaatcaatgtacccgtcaagcatttttagatgtcccacctggaaacaacacaacattcaatccattcgattccggagtattccataatctgactagtgtaagggttaaaaagaggaaaatgagagaaatcacctgtactcccgtgctcaatgaaccaccaaaaaggatcaaactggaatcagggacaccagtggagtcccgtatgagtaccgcattgacctttactttctctccaaagactagccaagggtatggaattgttgggaaccgcgaattaacagaattctgaaacatagaaaccgtaaaaaccatttaaataaaaaagatggccatatcgagagactcaagtaatgatgttgggaaatacgaatgaagaggctcaccgcgtatagtgatacttggccatcatccattgtcttgaatgacatggaagtctctctgtgctgtgcaaagaaaaaggacaacaaggttatttcaccgaaatctctgacacgagaaaggagacttagccagagacatgggtcttagacttaccacaacagatgctattccagggaataggccagagcaaatgacagcacgaaccagagactggttgtgacttagcttgttgttgagagctaaatcatcatgaactaagccagcttctttcaaaatatagttgaactgcttcctcagagaatgtatcgcctgaagcgtctgagctgacaggaaattcctccaacaaaactcataagccgatccttctctttcagcatctttccacccttcaaaggcacgaacgagtgccatatggtcactgtagtctttggctgagaatctcaacttggctgataaagctaactaaaataaaacaaggaaatcatctctcagtttgagagattaaaccacaacatacttcataaaaagttatatatccatctatctattggcttaaaaccgcctataaaaacccactcttcaataaaattcaaaagaccaaaaagtaagttttaaaaacatttatttgccaattaatcaaccaatcaccgtacatcatgataaaaataaatgttcgtccatgagtccttatacttacgtcttttttgtcttgaggtagaaggaaaggatc

SEQ ID NO: 695 - DNA, 29292 bp, Arabidopsis thaliana
agcagcattaggaaataaatatctcttcttcagagcttctcattaaagtccgtataactaactaaacactcttagtagaatttacttttgacattttccaacgtaaaaaagatttatgacccaaaaaaaaaaaaaagagtttgaccttgtaatcacttaacttgtgtcgtcgttcaagtacaacgcatgtgtgaggaaaaaaagaataatgtgtttttataataataatgaaaagccaaaacagaccgatcaggtcaaaagaaagccgtaaagaaaatccaacttaaaataaaaataaaatctcttttaccaaacagatatacagagagacttcaatcagaggaaataaataaatttcattatttctctttctgaattaataaaaaggtttcttgttgaattgaatttgtagctgtgtttaacgtagtagcacttgggttttagatagacaacgtaaccaaaactgtttcatgttctgtctgtattctctcttttgcttttttgggtttcctccttctttctcatctttgctgcggtgcatttttttctcgggaaaatcctttctgggctttccgggaaagttttcttgtcagattcggaaaggtaccaaaaaaaataaattaataaaaacttaccaaacagattttgtgtttatctctctctctatagattcttttgatcacaaatccttttcgtttttgatcatattttgattgagaacaaaacaatcttcaaagtctcaacctttaagtttgattgatctttttttggtaagtaaatcttctgtcgtagattcgatattttctgatcttctcttttcgaattcttcaatcttcaacgatcccaatcttcttcttctggaaatctattttgcttcttcttcaaattttctggggaaaaaatcaaattcttgagttaattagactccgattttgttgaatcgagaaacgatgaaagcatcgggttcattagatagctggagagaatatttccgacggcgaggagattccgatatattcgggatcatcgatcatgcgatcatggtggctgctactgattgtcctaacaaattcaaatccagaagagacaaaatcgccgagcttttattctcctgtagagtgaatcgttgcgtcggatgcgaccatcttgaattgtctgttcccggagacgacgaggctaaccgtggaaccaccggaaatggtggtggtggtacggcggttgatgaagattatgaggttgctggtggtagtaaagagagcaaagctaatagtagcagaggggataataatcagattgttagcaattatacatttgatgaagctgaggctttgagtgatgagattgaagagttttctgtggtttctaaggaggttgctaggatcaaagagatcttgctcaacaaagaagatgaggtttgattctcaagttcttgaaatttcatcaatgtgaagattttttttttgtgttttctgattggttcttttttgtattctcttgcagccaaactcggtgttactcgattctttaagacatcttaagttgatgtctttgaatgtggatattcttaaggttggttatcttggtggatagtgtatgaagttgttgttgatgatccttgagattcttaaggtttgcggttattctcgcagagtactgagattggaaaggctgttaatggcctcaggaaacattcttctgataagattcgacaactcgctaagactcttatcgcgtatgagtttttgatctttcacaagtttgattgacatttgctatgcttttgcacttttgaatctcacatttgagtttttgatatgtttatgcagagaatggaaggagttggtggatcaatgggtgaataccacaaaggaaatcactggtaattgcgctttctctgtctcgcttttcgatcttttatgactggcttcgtgtcttaccgtttggtttcttgaattagatccatagtctttggttctaattttgtgtttaaaacaggtgctgaaggtacaccagagtctgcaaacccgtctgtccttgatgaagaagaggcgtttccatcgcttccatatgatgttgatatctttacacctgaaccaaacggatttgaaatctcacacttctttgattccttggactttgatggaagtgagttttaaaactatgtcttgtttgtttgagaacatgttcttagctacgtgttgattgattttcttggggatgtttgtttcagatcctcgtaactctgaagaacacaacacaagccgagagcatgaaagaaggccacaaaatatcgccaagagaaaacctgagggaacacaaatgaggatacaagatgctccttttagatctattaagccatcatcagctactgattttgatgggactagaagacctgtaaagcaaagtacagagcaaaggatgaagaacgaaacggtatctgttcacaagtctgaaaaacccatgatccaaaggaaaccggttgttacagaacagaagcggaaagctcctggacctcaacaagaagtgagtgtggagacaaagctcttgtctaatatcctattcttggacgtagaattgatggtgtttttgctcttgtcccttgcagaaacttaaaggtcttgatgcagacgcaaagtttgagtttgcaaagaggaaacttcaagaaagctaccagcatcacgagaatggttcgtttcatttcctttcttttgtttcgagttttttgttacattcttgaaaacaaaagaacttaaaaatgtttgtgatcttgccacagccaagaagcagcgaacgatacaagtacttgagatgatcccaaagcaaggtagtgctcagaaaccgcaactcaagagacctggaatgagcaacaggaattgggctaatgggagaaaatagtttctgctttgttcaaatggtgaataattctcggcaaaagatattactccatacttaccacacatatctcgcaatctctggtgcaataaaggtaaacagagtctagttccacaaagctggagacagaaacaagcagaggagaaggaacagaatccaacataactttactttgaacaaactgtttactcctctgttttgttctgtcttggattcaccaattgcagcaagatagggataccaattattgtttcttttatgtgttctttactacattcttgagactttcggtacagtcccggtttagtcgggttatgttcggttttgggacaaggagagaggtcccttttacatatatatcatataaaaatagtaaaagagagggtagaaaagctcattcgaaattgaccggctcttcacctaactttgtatagtaatgtgaaatgatttgggacacaatatagagatgatgacacttttttccaaataaataaatatttatataatgatatccaattgttatgaatgaatgtgattgtgaccgaatgttgtcatttcttattacttatgtatataaaataagatggcattggaaaggcttaaggaaggtgggtggataagaaaagaggagaaggtagtggggggtgggagataacgtggatggataggaatgttgttgcagtgtggtctttgtgcgtgttggtattttttattcaatgttgttattatctcggcgttacgcgttcacgcatttcaccacatgaaccacgtggacttctacaacttctattaatctttcactccatttctattgaaagaaaaacagttggatagagataaatctagttttatggtcacgattttatttcgtgaaaaggaaaatgcactttttagtttgattaaataagtacacccaaacacttttggacaaaaacaaacgtaatgatttttggcgtgatggtaaattcgtatggatgtgttggttatttttgtaaactttagcatgtgagagaaaaaaaaagttgagcatgtgaaaatacaaaaaatattgttgtctgtgtacaaaaactgaaatgacatttaacatttagtaagtttcaaaatttaaaacattaactcataatctcaaaactttaaactaaacaaaaaactgcaattccaaaagctctagaacttaaatcttactattgatgcagcgaaatgtctttagtttttttttttttaacaaaattatgagatctttttttgttgttggaaatatcactacaaaatgtctaattcatactattttaagaatataaaaaatctcatttataatcaatatgcaatgaataaattgacctatatccattacatactttgttagattacacttcatttttgatgtgaaacattctagcaggattaatgactcaataaaaatagaaaaatatgcacttaatttaattaatgatatttggttcccagtcgttggaattgggaagacttgaaaagtagtgaagcatgtgaaaaaatgctaatatatagatccgagagattgtgactatttcattaattgaccctaaagaagaaggcatcttttttccatgcagagaatcgacatgtttttggagagaagttgacatggacaaaaaaacaacaatagcatcagttctgctgccgacacaaagtatttaggttaccattttataatttatgtggagttttagatagatagacagctaatcgttacaaaattccttgcgtcgcaatcaacggtgagataaagaaataagagttgacaaatgaaataagggaaaatagttgagtatcggttctaaacaaaaaaaaatccatcatttagaacgttcatcaaattttcatggttttgaaaattgattatactatataatcgaataactcaacttgtttaatttgagtattgttgagtcttatttgatttacgattggacaaagtctggaaacattatcagaattatgcgcaatttaaacctttctcataaataaatgaaatttgaaagaattgagttcattgttggatagtcttaggttttgattaaaaataattcaccattgtgtttcgttaggttgaagtaatcatttataacgtaaattaaagtatcattacatgggataagaatcattatttatatacgattacgaattagaattgaaattcagaaaatggttttatataagctttttgagataaataaaatacattaacaaataatataattataaaatatcaatgcatataattgtattttattgatctcaaatactttgataaataaatacataaaggtttttccaatcggttcttagggggatcaattcctagtttattaaaaatcaacatagttcttcacaagaaatatagaacaagaaagttttgttcagaaaaaaacaaaaaaacaaaaagaaagaaaaagggtagtacaaagttttaatcggtgaagactaattattagaagaagaagaacaagaaggaaattattccaaaaaaaagaagaacaagaaggaaatgtgttgtgttttgttgatcacaccccaccaaccattgtgttgcccgtctcttgtaaggagaagaagtatttgtgttccaattccaccatctgccctccatctgcatgatcaaatttgcacctccggaaacttcacattttccggggatgattccgacaattagatgaggaaaacaagcagactccaagaaagagccaaagtagagccacgtcacagaaaccaaagagaaaaaagcttaccttccatcgatgcctacgagaagaacagtgttctctgatccaaaacctacaatgaacttggtggaagctggcaacgagaactgagcaaacgaccgttcattttcgtacaaatactttggtaagatcactcttatgaatgacgacgatgaagccggatcaaaactaagaatgtcaggtctcaaacgaaatacatggagagtccctttttcacttgacgcagcgacccatttcagattcgaagagattgcaacgttatagatctctgctctttccactcctctccgaaacttcaccaagaaaaccaaacatatcaaaatactaagtaattaacaaaccataatcacaaaaaaaaaaccacaaaattttagctagggtttataacaaaaacaaaaaaaggttagggctaattacctcttgtaagagagtaccatcaacggcgttaaagatcctgatcaaagttcctttggtgctagcggttgcgaggagacttccatcgagagtcaaagtcatgcaagctatagcagaatcatgtgctttgatgaatttgataacattccatctcaagtcatggacctgaacttgtcccggatgaaacccgggacaagccaagactgctttcgactcaacgtgagtgacgcaacacagtcctttcgggttcatgagggtttcgatcacacggtcaaccttaaggttgttgaaagtgtagacatagatgttttgtttcaggaccaccacaacgtgttctctcgctagtttcacagcgataacttctgatttaaaagtgagctcgctgaggcagcaatttcggtaatcatcccaaacgaatactttgttaggagggtactcggaattgttataaccattgccaacaaaagcgaataagttagaaaggaagagcatctcagcaactttgaagcctgattcgtgcggggcacggctgatgcttttctttatcattggtttgcagctatatacattgaaaccgtgatttgttccaacgatgaaaccactgcatacctggttccaagctactgataacaccttcaagtcactttttgcttcatcacgtggtgaatcgaaagtttcagatcttgaaagcgttaagattccacggacagtggagacaatcgaattcattcttctcttttccaaaccaaattcacagaagaaaaaccgaagagacaatactttagaatatcaaacgcttctcatgaaaagtcgttgggaaattgatgtttatcgtttggtaatttatacacaggtaacaaaatcctaaatagagtgcgaataggaaaagacttcaaaccatatatatcacatctttaatataatacgtttatgaaaattaaataaaaatcaaacctagaaaatctcattacaaaactccacgtcttcatctaactataattgtgtttatctatttaattttgtttaaaaaggatttcattaaatctaaatggatacaaagttttcggtcaaaaaaaaactagacctaattacaaattatagatatagattgaacttaacctactcatggctgacttgaaacgaatgtggaatgtgactgatccttgtaatcaaacttgtagaatctctgaagcttttagcggcaaccaatgactcatcgatgagacattgttgcgaaaaggtatatcgatcttcttaaagatttgagctgtgtcgagactccgcaaaagtgtgagtttctatctagagctcctatatagtcgcttcccaagcaatggtccatggataattcaaaatttaacaatcttcccggggtaataatgaggtgttttccttttactttttttgctactacctttttttcccctccttttgttgtaacattcaatattggattaagcaagtccttaagtttcggaactgaagatgtgttttgtcatagatctagagatttgagggagacaggtttggcattgatggatgctgcaaaatcattgtgttaactgtaacaaaagaacccaatcatgagtctttgaggcacaggtgaaaaatcatcaaaaatcatattactaatgtcacttcatagtcaatcttcatggattaataatccatcattattcatttagttagaccaaaccaacctaatgaattggagagacttgaaaagcaaaactcatagtacagcaacacagtgttatatcctcacaagtcaatctttgattctctcttgtgttcttcaactttaagcacctaattctgttaaatgcaatttatcagatttaaacagaggaccccacttgcagtggttggttaggtaaataatctctccatacaaaattcacactttactcttttagtggttaaaaaaagtcttgccaatgagtctcttcgaaacacaacataacttttatatcaattttggtgtgtccaaatatatgcaccaatgcaggatcggattctgtcaatatgaccaataaaatgacaacacgagacagatcatttggttatttttttctgttaattttgatacattattgttgaattacttgaagaaatcgatcactacctttttccttgatttgcatgctgtataatgcaaagaaaagaaaaagcaaaatattcctttaatctgtagtgtgttttgtctcttaaagaacaaatgaaagaagcaaaaaatgggatgcttttgctttctttccctcctttctttacggtgtcttgctttttattttcctttacatagttatttgaatttgaatccactttttgttatattaaaaacaacccattatgtttacttaacaatggattcaaaccaactaatcattgttttttatcttatttgagctcacctcttctttttgactctctttacccacatgaaaacaaacactaagaacaaaactttcataggaaactcaattttctctctttctcagatcatggtgtgagtcaccaaatagctcaaccatgaattcttctcacactgccttcgttgctgcttccttcttcttcctcttactcgccgcaaccgcggttttggtttcagccgatttagcatcagacgaacaagcccttctcaactttgcagcatcagtcccacatccaccaaaactcaactggaacaagaacctctctctctgctcttcatggatcggcattacttgtgatgaatccaaccccaccagccgcgttgtagctgtccgtcttccaggagttggcctctacggctcaatccctcctgccacattaggcaaactagacgctctcaaagtccttagcctcagatccaactctctctttggaactttaccttctgatattctctcactcccttctcttgaatacctttatctccaacacaacaacttctccggcgaactcaccactaattctttgccgtcgatctccaagcagcttgttgtcttggacttgtcttataactctttatctggtaacattccttccggtctccggaacttgtctcagatcactgtattgtaccttcaaaacaactcttttgatggtcccattgattctcttgatctcccgagtgtaaaagttgtaaatttgagctataacaacttaagtggacccatccctgagcatctcaagaagtcaccggaatattctttcatcggaaactcattactatgtggtccacctctgaatgcatgttccggaggagccatctctccgtcttcaaatttgcctagaccgttgacagagaatctccatcctgtccggaggagacagagtaaagcttatataatcgccattgtagtcggatgctctgtggccgttcttttccttgggattgttttcttggtttgtctggtgaagaagacgaagaaagaagaaggaggcggtgaaggagtgcgaacgcagatggggggagtgaatagcaagaaaccgcaggatttcgggagcggagttcaagatccagagaagaacaagctcttcttcttcgaaagatgcaatcataatttcgatcttgaggatctcttgaaagcttctgctgaagttcttggtaaagggagtttcggaacggcctacaaggccgtgcttgaggacacaaccgcagtggtggtgaaacgtttaagagaagtcgtggcgagcaagaaagagtttgaacagcaaatggagatagttgggaagattaaccagcattctaatttcgtaccactcctcgcttattactattcgaaagacgagaagctattggtctacaagtacatgacgaaaggaagcttgttcgggatcatgcacggtgagtcataaagagaccaaaccctaacttttttggtaatgtaaagcttgtgtgtgggtcacgaaaaattgttcctttttggattttttggacaggaaacagaggagacagaggagtcgactgggaaacgcggatgaagatcgcgacagggacttcaaaagcaatctcttaccttcactccttaaaattcgttcacggagacatcaaatcatcaaacatacttctcactgaagaccttgagccatgtctgtccgacacatctttagtcactctcttcaaccttccaactcacacaccgcgaaccattggctacaatgctcctgaagttattgagacgaggagagtcagtcaaagatcagacgtttatagctttggtgtggtgattctcgaaatgctaaccgggaagacacctttaactcagcctggtctcgaggatgagcgtgtcgtcattgatcttccgagatgggttcggtctgttgtgagagaagagtggactgcagaggttttcgatgtggagctcttgaagtttcagaacattgaagaggagatggttcagatgcttcagctagcgttggcctgtgttgcaaggaatccagaatcgaggccaaagatggaagaggtcgcgaggatgattgaagatgtgaggagattggatcagtctcagcagttacagcaaaacagaacatcctcagaggctacttccaatgtctctgaatgattcctcattccgaccaaaagtttctttgatcaattctacttctatcttattacttttgaatcccagttaaaaataatttctctttgcatcgtagtttagtgcttatgatcaaacgtaactgctttcactaatgaaaattgaaaaatcataaccactgctttaactacagaaacaaaaaaatattcgctttcactttaattataactttccaaagtaactagagtaagatatattctacacataaatttatgacaccaagacagaagaacgaacagacagatacacacaacaaaagtaaaaaagtgaacaaataaaacaatgaaaaataatttaaattctgtgttttttttaaccctcaaaacaggtaaatatttgctcgcttctcaacagttgattccacattccagaatgtccgggccagtgactcggctagtgaagggatcaatcctaacccacaacaacgagaagatagaagccaagagaacagaccagaccacaacaatggtaggagtccggttctgtcgacccatcaaacccttgaggaaagggtacaagtgaacaatcacccagaaggcaaagaacaacttaccaaagagtggtccccatgattggtatccactgttgatagcataagagactcctgcaacaactcccactaagtttacaatgagcagcgtcgttggcggaatcagaagtgttgtccatttgaacaagtagagctcagcaaagtctccgtcttcatctgaagcttttgaggtaactgtgaagtttgtgtcaataccggcaaggactttgaggataccttgaaacacagcgaataaatgagcggatactccaccaatgacccaaaactgctcgtttctccaccattcgtctatgcctacgccactccacctcatttctagtatacccgtggcgaaaatggagagaaagagagacagaaaccatatacttgcaatgttactaatctgcaaaagaggaacaatagaaccagctgatcaggatttggaaccgtaaatagatgacaaacacaacatggtttcagttaaacagaacgtaattaaggtttgttctagagatagagatagagatagagatagatagacagagagaggtgtcaaacctgaggaataataaactggttggtgaagagacaaacggctggcaatgtacaatacatgagaagaggaatggaggtgatagggtagatggtggtgttcacatacgcaaacctctcaagaaattttagcctcccattgtaaccataccatataggacaatgccgactgaagagaatctcaactgaacctaaagcccacctcagcacttggttcagacgatctgaaagattgataggagcagaacccttgaaagctggaagcttaggcatgcagtaaatggatcgccatccacgggcatgcattttgaacccagtcagaatatcttctgtcacagaaccatagatccatccaatctgaagaaagacagcggaaaatataaacaaagtgaatgccaaagtggatatgtcagaacaatgcagattcatgtaggagttcaaatgagattatacctccattccccaatctgacttatcctcataaccacaactaatgacatggatagcctctttgagaaggttttctggagttgctgaaggaggaacaccaccattttccattagggtagaagcaacaaaaacagcagactgtccaaatcgcttctccaggctcatttgcgacattaagagcgccttttcatcatcaaaaccagcacctaagtttcacaaatgccaaatagttaagacatgatgagatacctagtatggaaactatttagacaactgtcaactataaataatcccctcccctggatcaatatttcaaacagcaacatatgggtataacggaaaccaaagaagaaataaaaacagttgtaccttcaactccctcttctatgtcatcgaggttgaatacaggaacagttgagtcagtatgcctgcctgatttctttttgtccgactctttcttagctttggaattcttctttcttgatccaccacagagcttagataaaagacttggcttcttgtgttttacttttattggaggttcataaccgtataatgctgttctgttgaaaacacatccagttccgacatatacaggtccttgaatcccatctaaacctctcaagttaatctggaaaacatatcatggaaaaattacgacaaactcaagaaactgtgagtttaatgtatattcgtgtctaaaagcaatttgaaagaacaagaaaattagacgcaagtataggtaagtgtgacttacatcaaagaacacggtattacgattagcatatctatcgttcttatcgataccatcaaatctttgtgggaactgaacataacaaacttgcttcccgaggtttgggtccatcaggaagcacattgcttctcttaaggctttgctgttatttatgtaatgatcacaatcaagattcaagatgaaaggtccattggtaagaactgctgaaactctcacctattcatttgaaaagtacccagattagactaacaaattggtcagaatgaagaagtcaaaaatccaagatcagaaacttaccagtgcattcatagcaccagcctttttgtggtgctggaatcctggtcgcttttctcgagaaacatataccaaacgcgggagctcattgccctctgcatcaagtccaccattttgccctaagaagacctgcattcagcaaatggtacttcaataatgaacttctagagagaaagagagagcattctcgattccatagttaaaaccaatttcttacctggatcattcctggatggtcccttgtattatttccaggccacggtgtgccatcttgcataacccacccttcttcaggacattttagggctttggaaacaagtgcattgattcggattttaaattcctcatattccctctgaaagaaaataaaaggtcaatatagcatacactaaaatcaaagtgagggtgactagatgactaaaactacaaacttaccttcatagctctacgatctttgacaaatgatgtctgaactttatccttcaagtaatctattttcgcagcaaagtaccattctggtgcacgaggctctatgctatatttcttgcaaaatggtacccatttacgagcaaactctgatgtttctgcaagtgattcaaatgataacatagcagcaccatcatcagaaacataacaggacaccttgtcaactgggtagtcaacagccagaatagagagcactgtgttggctgtcacaaggggtggctccttcaaggggtcaacagtactcacgaaaatgtcaacagcagctaactgtgatggctcaccttcacgatcatatctgtcccaaaaattgaccatgatcaaattaaaatgggaaacagtataggcaaacaatcctttgagtaattgcttcagaagaatggggaaatagaacttaccttaaagcaagcctgtcgaggtaggtttcacggttcacaggaaaccacttgggaaactgatccaaaatccaggataaggcaaaccagatctcacatatcacagagaccagccatagagcaaaggcatttggcactgggtttgttatacggtaatgcaagaagagacaaaggataacaagccgcagcataataaccattctgtaaggattgatccgtgatgaaggaattgaaactttccttgacagaggctgcctcgcttcgtcattcctgtacaataaataaagaattggaaaatgagtatcaggacattgcttaataggaaaaacgctcggtacaccacgacagaacaaacaagattacaaaacaagaactcacagcagagcctcatctgctaggatatctgtgctggcatcaatatctactccacctctttcagaagcagcctgcgtgctgacaggaccagtattcttctcttgcttcattttccagccatcaactctctccttccaagctacattcccgagtccaacaggatccacaatccttctatttgctgcagcgtgaatgacaacaacagattttattgtttagagttttgacataaaagagaagcctaggtacaaatatatgtgttggcgagagagttagaaataaaggatatttacgtgattgattgacatctgatgaatagggaaggcgctttcccccagcgatagtagaagatacagagaggcgttcaggtgaggcagcagaaaactctcctgaagtctgtaaataagcaaatgacaaaatcagattccaaaactaaattgcgtgaggatgcgaatgcttaagagggaagaatgaacagcaatgccttacatcttgtctgctcgtgagacgaggaagatgattgtgagagacctctttatcatactggggttcccccatttcctctcccttcccacgagtaagatgccaaccaagcatccgctctgaaattttctccttctgagggtagttgaactcaacagtaccttcatcagctaagccatcctcgtctttatcaccaggaatagcaggactacctagaatcagaaattagcaaattgctataaataccaatctgatccaaaattcaaaacatactgataaactatcgatgaacaatgaagacagtatacttcagaaggatcaaaagagaacctttgagcctcttgtatctggttttgcactgaggacaagattgattcccatctttcctctcatactcgtagcaaggccgacaaactgggaatgaacaaatatcacaagccacaaaacgatctccatcaacagtcttgccaacattgtcactacagatctggcaagtctgcggaacaatgttcttcatcggctttccctacaaatcaagtcgaatcaatgaagccaaaattagaaacctcaacagaaaatttgaaatcagatctctccaatacacaattcaacacccaaatcaatcaatttcagtacatataattcctgatttcgataaaggtaagtataatgatgaagcaagagtcaaaaaagcataccgcggtttctccttcggattccatttgtcacttagttgcttccaacaccgaaacgtcggaatagttcaaatctgatcggaattatcaaaaacagaaactacgattagatctgaggagatccgagtaaaggaagtcaaatctgagaatggatcatgagtgtaagaagagttaaaagctttaccatgagatctgaagatggagtgtggtgatgtgactctctgaatctctctcaatctggatccaagctttcttctctacagagagatagtttataaggaagacgaagaggagaatcttgggatggctaagaagatgcaaagagcaagctatttgtctcctctactcgtcactcttccagatttttaaaatattaatatatttgtcacaaatcataatccaaccaagcaacaaccaccaccaccaccgacaacttccacagtcgatttttttctagttacagttttacagtggctgtaaaaaaagtgaaaaaacggccgataaacctttaaaatatccttagaaatatattatcatcgaattagtgactaaatcaaaatagtaattgatatttgatagtgatataactaaaatagaagtgtgaagaacacaacaaatcacaagtagtggggtaaaggatattcatcgtcactaactttcttacagataaaacttaaaaagtatttgccgacaaaaataaaacttcaaaatattaattaatcaacggattagtccaatgaataaatcaaaatatattgatagtgatgctttacttactagtatatcaaaataggctaaaaccagcgggctgaaaaaataaaggtccaactctagtatcatcaagcccaacagaatcgagaaaatgggtttgttggactttgcagacaaaattggtatatgttcggtttacgttatttacgagagaaaattgaatcgaaccgaacccaataattaataggtcaaactttgataactggtggtgcatgtggagatgtgtggccactagtgcagcaaagaacagactgtcagatagacaaaagaagaaaatggcaaacatttgaatcccaaagagcgccactttctcttcgctatccgacaaatcttccctcctctttgtcgtccctttaaacctttccaccttctgcttcgtaactctcgtaccctagcaatcctctacttaaaccttcctttgtttctccttcacttttcctgtaaatctgctcttttgttccctcgatcatatcaattttcaaggtcagtgaaatctcatgtttatttggtcctatgtgaatcagatttcagggtttgatatttgtttgttccgttgatgtgttttgtagatcttatgatctgagttacttgctctgtttttctgagatttatggagggtctttgtctatgtttcttcaccgttgcaaatgagttataatttctgtttacatgtagtgaaaaaagttcagttctgtgacataagaaagtcttaaaatttacgcaaccctagtttttttattttctaagatttcaattaaagaacattagcttgtctcttcatgatagttttccactgattattatcacaacttttttttttgttagatatttttaatcgaaattattgtagagataaatataaatacgttttttttttttttggtcaaaaaatataaatacgtttagttatagctaaatcttaggagtataaaaaaaaaaaaagtaaataaaaatcttaccagtttttatatctcgtatatcttctgtatttttagggtttttctgttacatcattctatgtttacgtttctttgatttttttttgcttgatcatttttaagttgattcgctttttgttgtttaagtgtaatggattttacaacagttgaggtcccagatgagtggccacataattcgaattcctttgtggacatctcaacaggtataaccgtataattcattcatgtcttattttggttgtgtgcgtttccgttcaaacgtagaaatcttattagacatatcaattgtcaagtttcagatcacaatggatcttcacctcctgtaactccaaagtctgatacagtagcttccaactttgaccaaggaagttctgatgtttctggcaatcatgattctaactcttcttattccgatttagattcggacacggaggccttttactcatcttttaaccatcacctcgtatcaccagggtcaatggatagccatgacttatccccggagaaacaaatgagttatgaagaattgatgaagaaatatgtccagtgtgaagaagagcttaggactacgagtttgaaacttcaagaatttgagcaagagattgagaaactaaaggagaccgagaaaaaagaatcggttgttctgtttggcgagtatctacgtggtgagcgagaaatcgcacaaggagaaattgcgattagggacatagctattgagactgagagaaagcgagttctcgaggtgcaaagacaggtggttgatttggaaactgagctttcagacttaagtttcaaatttgagcatctagtgaatgagcatgaggtgagtagggactgtttagatgtgtcattttctgaaatctctaagctaagggaaatgttgtgtgattgtcagcaaaatttctctattgagaaaacaaaactggtagatcagataaagcattctgaggcagagaaaatggagatgcagaggaaagaggttgagttgcaagctgaaatcagtgcattgaagacagacttggccacacgtggtgagcatattgaagcattaaacaaagatttcgacaagcacaagctgaggtacgacatgttaatggcagagaaagacggagtatgtgctgaagtagacaatctaaaagcagagatgagatcaagagacatccaaattcagcaaatggaggagcaacttaaccagctggtctataagcagacagagcttgtgtctgaatcaggaaatgccaagaacactgttgaggaactgaaagctgtggttaaagaactggagattgaagtagagctgcagagtaaggccaagaaaactgtggaggaactgagagctacggtctgggaaatggagaagcatgcagagttgcagaggaatgcgatatcacaaggagaggaagagaaacgagaggcgattagacagctttgtttctctctggatcattacaaaagcggatataaacagcttttgtggtatctttcgggcaataaccagcaacatcaaacaaccatggtcgtgtgagtttcgattgaatactcttatcatttctttagtcgttacagtcttatgtctttctttgtctcgtcatgtttttttatgttattctgagttatgttctctctcaaactcttggacattaatcttaagatttctttagtaagaagcgcaatttatatgaaattctagcttctttttttttttgtgcacctatatgaaattctagcttggaaatgcttttatatatgtggctttaattttgtgtgattttataaaagtatttttgaacttagggtatctacaggtgtttctgtctggagtttttatttgtgcttatgtaatagtgacgtaaagcctaagtaattaaaagtgagagagaaaaagtcaaaagccaaacacaaacctaatcctccaatatctcaacttggttgactctctcaatacaaggattggagttaatgtgaaatactaaggactcaattattatggtccttgatttatgatttttgttcagaaaaatttagtgaacacaaaaacaaattcttctcgcccaaaccagtgaagaaatatgaaatctaaaatttaaaactaaatctgaaccagagaagtaatattcccaaaatcaaagttgaacgagtctgatttctatactgcgtctatgtatatgctcccagttccatttctatttgtgttgaaacttttaagtattggtcaaacaatttttgtttttttttgggttttaacaatttataataagatctgactatctcaggattggtcatgttcaacaagacttagtttcatctaatccacataaagtaaataaaaaaaaatctcaagttatagtttgatattataggtctattacgtaaactttcctccatatgtaacgatatatgatcgaccgcgtaaagatgcacgcgcatgcaaatattttaatttgattgttttagtttatgctttcatggtagtattaaagttgtaaatgtgattgcatgtgtgagtgtgtgaaaggactttgcaagaccgctggctacgaactttattagttagatacaacaaatttatcaattatcaatcttaaaagatagctaaagaaaacgttactatgggccctttttctttctttaattctttcatatggaatctattattaattaaagacatgtattaaagaatttcaggtgtaaaagaatagttttttgctttgaggtgtctatctttatttataatcggaaattttcaagtaaaaagaaatagactctccaaagcataggtagaataattgaatattcttatcaattaaatcgtctatagtagccaattatgattgcaatcgttgtgcgaatataaccagcatggtatatatcacaagtttttagttagtgaattttttagttatttcaagagcttgttctgtagaataaaccaaaaactaaaagaaaatccattctattcaataccataacttcatgtgttcacgaaacatcatgggaacacagtaaatagaaaaacaaaatcaatttataactatatatgaatgttgtcaaatgggagttgacctccaatattatcttttatacatttgaaactttaattttgacttttttttagtaagatagtttttgttcatgtcctgaatgttaggtaacagctagcgatttgaaatagaaataaacatttacaaaccatgtagtggtccaaaccattgactcaattaaagagtcaacgcataatcgaatttgtaatctgtgaagaagaagactcgaatggtattgaacttgatttgatttgattcgttttgtgaatcgtatcccgttagtcattggattgtgcagagaaaacaaatattgaagcaacctctaattaagtctacaaagaaataggacaccacaacaaaggttgacttttacagaatcacaaagccaaaacgataatctagaaagtagagaaactagacagcacaaaacgataaaagaccgagtctgtcgaccattaccttagttttttttcatatcgttaaaaaataatgtgatatacatgtacgttaatacttaatatatactatttgacttgagatagccctacaaaacttttattcatttatttctcacaagttccctaaaactttatgaaccaatttgaagattaatattttgttacgttgctatcaatttcaaattctttgtaggtgctatatttgaaaactggtttcatacctaaaaaggttatgaaccaaagactcaacttgtctggttataaataaaagtgattgaaaacactcacacggctagtgaattctcattagaaaaatgaaaagttcgttaaattcgaccagtgatataaatatatatacgaaaaacatatgatcattatgctttttgtcaggtcctagaaataaatatgtggaacccaattcatttcaacattcacggtaatttaatttcccttggcaacatttagtcatttaccggaatattcaaacttcgaatgttaggaaatatttaagaaggtaatggtaaaaagtaagaaaaaaaggactgggatcaataaatgagaaaaatggaagtagtagtggggctaaaatttctctatccaaaataaatgaaacaggcgccgacattaacaacaccattccatttataactctttatccaaatttttatttagctgaacccaatttactctttctcttatcttcctctacttaattcttctaacaaagctctgttgcagatgctttctttagaaaaaaattgggccaatattgtttattgaaaagatcaacaacagactgggttttgtttaagaaagaatagtgattagagaacgagtcgttgatgttctaattgacttgcaagaatgaaaaaagataccaaaaaattcctcaaagagatattaaaaagaaaaaactttttagacacggaaaaagagagacttttctcagaggaaaaaaacaagaaaagagagaaaccatagtaaaaaaaaaaaaaaaactgtctgtccaacgatttgtttttgtttttttgtctctgttctctcaattcttcttcttcttcttctacttcgcccccacgacaagaaattctcctctctatttctatctcattctttctctctctctctataaaatcttcaacttctgggtttattcttccacaatccctcgagttataataactctctgcaaagagttttactttgattcttctgtggaggatcttacacaattttcatggcttcttgaatcatgtaatcttttccttctcgccatttttcatctctacccggatccgtaaccagctctcagaccagacccgggttataccatttctcctccttaaaagtcacaccgcgttgaccttcttcctctggtctcctctcccattttcttttaaagaacttcacaaagtttcaatcttttactttggttcctctctctctctctgtttattagggttctgggttctgttgatgatgattctctaactaatgaggtagagttataacccaaaaataacaaaagtagagttaagtctttgaaatttggtaccaacaatggcgagccagacgggtcagaaaattcggttggtgaggtgtcccaagtgcttgaagattctacaggaagacgaagatgttcctgtttatcagtgcggtggttgttccgccattcttcaaggtaactttctttccatttcgattttgcctctgattataatgtgaactctgtccctgaatctggctttgttctactcctggttgtccatctgtttggatgtctgagctcaaaccagttgtgttttgtggcatgatctctttcattattaaatttggttgttgcttctttgattcagcgaaaaggcggaacattgctccaagcagtacaccaagtgcaggagagacagagagggctcaagccaatgagccgcaaagcgtacctgaaaccaacaatgtgtccagcagctcggggcaggacacggttctgccgtcatctccaggtcgttccgtggaccaagagtatgagaaaggtaggaatgcatccatggagtctacggagaaggagcttgatgacttagagttatctaatggagatgggacaaatgaaattcaagagcaggaatgttcacttggtgattctgagaagaatgaaagagaagacaactccagattggagtctcatatgatgaacaccgtagcagaagctgcaggatctggatctagctctggaagcttgagcgttgatcatgtggtggctgcaagagcgagtaatccatccggtaactctgagatttcaccggatgcttcccccgtagaagagaagcaaagccaacttgacattcttgcaaacaagactccttctgcttatgatgtggtggctgcaagagcgagtaattcatctggcaatgctgagatctcacctgatgcttcccctgttgaagagaagcaaagccaacttgattatcctgcaaacaagacttcttctgcttatgatgggagtgagtcttcctctgacgaaagggaaggccaacttctcgatgatgacgaacaatggaatgctcttcagaaaataagatcaggcaaatttgagatgcatagataccctgggtataaggagcaaggcgctagttcctcctcccctttctctgagaataggcgcaatgggattaccacatacaacgagcggcatcagaacaggtctctacagctagagggaccaggagggcgccttggcagacaagggaggagacatgtgacagaacaacttcggcctgacatgcctttctatccgagagaatcatacacacgtggaagcccttcccatccgtcacatgatgagtttgatcgctatccccgtgcacactcacttcaaatgccttcatacgctggaggcatgaaccacgattttgttgactatatgtatcacaacaacccaagggcaagaggtcagggccaaggaagtaggatctcaggtgaaatgggaagaaaccatggcggttggtattcaggtcagcttcataattcttacagttcatattctgcaagtccacagagaccaatggaacaacctgagtatcatccgagatggaggcgtgagatagtctcagacgtggaggatcatcagcgtaatagacatgctggccaccaccatgagttacagacccgtcgtctaagagagagacaacgtgtggccaagcgtcatgtccgtccaacagctggtggggcaccttttgttagctgttacagttgctcagaaaacctgcagcttcctgtagactttctcattttcaagaggaaacatcatcttctcagatgcggcacttgcaccactgttctcagattctcacttcagtccagaaatcatttagttcctgcagtaacacatgacataaatgctaataggaatagcaattcaacatcagagtctcccatagacaaagctccctccaaacctgaaaagctgagatcctctgttcaggatgaggagctacctgtggctagaggctctccgcttcaccgactaatgggatattctactgtaagccaagtctttaaagtttcacagcgtcctccttctatatagatctctgcttcagatgaagcaacgagaactatgaacttctgagaatctgagatggaaagttttgccattgtttgccattctttatttcacttctgtgtataggtaaaagatttgtctctgcacttttgtttaaagtagaaaccatgacacttgtgaaaaattatacaaaaaaatagaagaagatatagttcatctgttgtatatagtcatgatatgtttgtaacaagattgaattcatcatcgttcttggcttgataatctactataacattaccacttgtaaataaataaaaagtttgaataggtttagtgaagtatatttgcataaacttagttgaagctgtccttgtatccattcgtcctcttgttggacgcgatagagatccgctgatcctgcagcatgttcaggtttggggctaatagtcttgtgtatcgatcgaagtacagaagttgcttcaacagaagtgcaaactctctcgggaacttaagaccatatgattcgctaacacgcacctataagaaagtgaacttattttcaactgctgaaagctcaaatcctggggtttatcttaactcaatgcaacttctatatcctcttaacaactttcaaaccaaaaaaaaatccttaagaaattacgtctaactgcttaccaggtcgaggaaaagagcattcatctgtctctcatccataactacgttagcagcaacagcagtagtgtctgaatttgttccacgagctgtagccactactatctctgtatctagttcctgcaagaagagattcacttttctctataagattagccaaagttgttgtagttgttttgcactacagttcggaaagcaaatcaagctggttcctctgaacagatgtagctggttacagagagccatcatagtcagtaaagagtaaaatttcttgcctggatagatgagaacatcttttccaagtcttttgcaaaagctttgccatcaacatctctgtttgtggcgcccatttgaatcaaagctgaggccatggattcatattcttcagttgcaatagacgctaaaaatacttccatagcagcccatgttttgggggatatccgaccaacaatgcctgaaaaaaatgtggatacttacttgaatacacaaaaaattaccaataaaaaggaagagtatttatggaaaaagactgcatttttctgtattaatagatgagtcagaggtaagtaggcaagaaatgttgcactaattaggcttgagagagtatgatttaccaaaatcaagaaacccaatccggccatcacgcaacagccataagtttcctgcatgtacatcagcatggaagctttcacaagcaagtaagcttccaaacctgcaagttacatcacatgaagattcattttactaacagctacatttaggagggagaacaatcttaatcataatattgaatttcaaagatcttaccacacattaagcgcggtaataaggctgttttcgggactggaaacaagtgatcttatagagtccagatcagtcagaggaactccatatagcctctccattgtaagtacccgccggctgctgcagtacttatatactcttggagcagtagcttgccctgtcaaccccatggtttcaagatatctcttaaatgactcaatgttttgagcctccttattgaaatctacttcttcaagcattgactcacgaatatctttgacaattccaacctatccataggataatattgtttagagagtatcttaagagcgactgcaaatcaaatacagaggagattaccagtgaagtacggctaaactcaggactaaggaactcaaatatacgggaaacaacgtagataaagttcaaatctgccactaagaaatcttctatcccaggcttcaagactttaatcacaacatcctcttgggagcctcgaagccttgcaccatggacctggtcatgatgattcccttaagcagaagaagagtacatgaacaaaatgaattttgatcattgaagtacaagtagaagaacacacttgtgctattgaggctgatgcaattggcgtagggtcaacatattcgtatacactttcaatgggtctcccaagctcctcttgcaagattttacgaatttcttcaaatggcacaggaggagctttgtcaaagcagttctgaaattctttgacatattctggtgggaacaaagttggcgcagatgctataaactacaaattcaaagatacattacaagtattgttaaatggatagaataggaaatatatagagaagcaacaaaatatgataactaagcttactttagacatacacagttcacatggttctagatatttacatgatatcatcagaggatacaatatgctctacatttagcaacatgatttacctggcccagcttaatgtaagtagctcccatgcgttcaaagagtttcctcaaatatagaggagacagtagaccaagctgcaattcacttggtaatccaccagacgcgcttgtagactgcagcgagtgagagagtagttagcaatcaaagatagtttgacatcataagcaaaaagataatttcagccaccttagataaatcatttagccactctcctccaacccctacaaaggcttgaacaccttggacaaggcgtgtcacacctcgtggacctgtgtttatcgatgtctgaactatatcctcaaccaatttgggcaatttctctatctggcctgcatcaaaagccatgtaaacaagtaaatggatcaataaactgtcatccaatatgtagatttttacaaaataaatccaataagcaacaaagaataccctaacgagatacaattcagaatcatagatgtatacaatgagattgagtttacaagaagaaggaaatttctgtactttgaagacgagaagtgaaaaggtcctgagtttgcgaatactgggctgtaagaacaaaacccttgaaattcctggctccgatcatcttcttagacgttcctgacacagttctcgcgacgggaaactgaaaaatgaagctatcgagattgagcagcgagtaaaggacctttgcaaattttggtagctaagccataaagagcagatcaaggaaacgactttactgaaggaaagagaagagaaaacaagtaaacctgagaatggtgaaataacggtaaccgcgtgccacggaaagctgagaccgccatcgttcgccggcgattgaagcagcagagacaagacactccggtcaagctttattactcacaaaacgcacagaaaagcgacaccgttttgtatattttgaaaattgaaaatatcctgaggcggagtgaaggggaatatgccacgtggaaacgtgtaagtggttgttttcctcctcacaagtcacaacatattcgtgaaaaactctcggtacgattcgatttccggttaacctcttttaaatcccattaaaccgaaccgtttttgcgacgctggaggagaagttgagataacgcggttttacataaatacccttataaaaattgagaaataacaaaaccattcaaaccctaaccactttcacggaacctcttcatcttcgtctctctgtcttttttcttctctcaacgccgttgattcgccatcgtcgctaccggtgagattttccttcgattgtctttcttttattccatcaattcgctctctttccatctgggtttgtgcttgtagcttaaaaaaattgattatagagtcagaattgtttatcacttaagataatgagttctgagttataatgattcctgaactgatatgtagaaacttcaacttttatttgtttctacgattcatccttgtttgctttagggttcttctattctttgtaggataagatttgtttctttggcttgtttatgtttgcttcttatcctctttattcatcctgagcttgttatactggggaaacttgttgtattatactaaggtttctgtttctcttctggataatgaataaggatatttgctcaattacacaacttggaattttgtttttatggattaatggtgtctacaaagtcatcttctttagttctgtatctatctagcaaacgagtaaacttggtgtcacttgatgtgattcagtgacttgctcgattctgacaagatgcaggaaattctgaatgtatttgtaccagcttagttatagctatgtataatgtatatcgaaatacatgtcttatgatatctgtagtctttcacagttactaatatatccttgttttattgctgcagattgtcttgaggtttacgacttttggactaatctcctctgtggagagcaatgactaaaactcgtgggactgatgtaagttttgatttccactgttaactttttatcatctaatattttgttaatctgccattgtaagtcttgattctatagtttttatgaaacttggactatgagtccttagtttattatttgtcatttctccaaaagggcttttttctgattgtgattggttttggttattgttgtagatgacaaagaaaaagggtaaacatgtttctgaaatggatttcaagactcatcagcatactgaatttttcgataagttgatagagctcacgcctgctagattctacttacctgatgagacagaaaggaaatggtatccaggtcttagcaaggctcaaaaagctagagccaagaaaaaaacaaatgacaacctaaagaaggcgaagagagataagttggacccagagaagtctgctttgacgactctcgatttactgaaggagaagatagagaaggaaagattggcttcacagaagcag

SEQ ID NO: 696 - DNA, 72691 bp, Arabidopsis thaliana
aagcttaagaagaaacacgcggatttacgggagcagaagctagagcaggaaaaatcaggtactgagcttcctgatgatgacagtaagaaggaaacagataacaacagactaaatgatgatgacagtaaggaggaaacagataataacagacaaaaggatgatcgatctgttacgtacgaagagctaagggaacgcctccaccgcaaaattgatgagctcaaaggtggtcgtggaggttcagatagaccaagaagcaatgaaagaaggaagaagaatctgccaaataagagaaagagggatacagtttctgaggagaagactgtggaggagattaagtcagcagataaaggtaagggtaagttggatgtggaggaggctgctaaggaccttacatttggttatgtcaagattgatgacgatgaagaacacggaaaagagaaaaagaaacgaaggctttcaaaggcaagagaacttgaaagggctatgaagttagaggctgcaaagaaggatccagaaaaaggtgatgtaattgcaaagaagcactcatggaaggcagctacaagcagagcagctggtatcaaggttcatgatgacccaaagctattgaagcaaagcatccacaaagacaaaaagaggcaagagaagaacgcagagaagtggaaagagagaattgaagggcaacaaaagttcaaggtggagaagcagcaaaagagatcagggaatattgccgataggattgaacagaataagatgcgcaaaatcgccaagagagagaaaaagctcctgcgtcctggctttgaaggccgcaaagaagggtttatcaatgaaggtggaaactagaattcaagtcttccacacgccttttgtgttccaacatttcaacgatgtgatcctcacaaaggctgtgaagagggtttttgcacatctgaaatcgaaaaacatattttgggaattttcatctagtcaagtccctagcaatatttgttatcttcttgttcgttttactttgcagtttgtagacttttcagatgttccatttgctactcaatgtgttgttccttacagtgaatgctcttatcaggcaggttttagataaacttgtcacagaaattagcatatattgaatgcgagattacaaatactaggtaattcaagctagataatcaatgcaagttgtgttcatttagatttactttgatctgaagtcatatgtgagaaatcaaactaatccgagtagatttgaattattaacttttgttggatccgatttggcctggttcatactacagaaaatatctttcagaaaagttctagatctaaacaaacgtgtctgatttagaacagtaagctttactatgctaaacaaaaagcttggataaagccgaaaagagagtcaaagtaggtcggtgaaagagtctcgagacacgtggcacaagaaccagcttggggaatctcgaaaactctcttactcatcgccattcccacacgtatgatgaatgacgtgtgccaatggatcacattacccaaaccttatataaacccaccgagagacccaacaaaactctaccagacaaaacaatggaagctatctctcaaacctgcacaaagatcatcaccaacccatctcagaggatatataaaacctcatctccagtcacggcaattccacaaacaaagctgagccttaaagtcaagaaggagaggtgggttgctgctgctagatgcgtggcttcaggatcggattatgctgcggcaatggagccaattacgccggaggaagaggaggaattgactcagagaagagggatatgtggtggagaagtaaacagaggagtatgggagctcttggagtgccttgagaaagaagctattatggggaatgatgatgggagagatcctagagattacaatagaagagcaaagatttttgacaagagttctaagatcttcaagaacttaaatgaacagagagatcaggctcctgttgattaccttgagaaggaagctatcatgggggctgatgatgggaaggaccctaaagattataacagaagagcaaagatttttgacaagagttctaagatcttcaagaacatcaaagaacagagagagcagtctccagaatgaattacgaaaatgtagtttgtttgtttttttggtatgataaatgtagtctgtttgtaatgatctcattagtggtttgaatcgtttgattccttgtaccgttgtacctctactctttttgcaaggatcctctcattgtaacacgatcctaataatgtgatatttcttctaagtattattcaatcaaccagagactaattattgaacgcacaatgatgcagaatgtaatctgcggcttaatgacaattgacaagtttcaatctaaatccataatattatatgatgatatcaattagtcaattacactttacgacagcagttgtatagtattctaatgtagacaatgaataattttcagacaacaaaaaccggtaattattttcggacaaacaaaaaacaaaacaacagtaaagagatagattccgttgacttcttttcataatccagttctgcacactttactttctgatccatgggccctagaatctgagcctgacgtctgttgcggttgatacgtcaccgtttcttacttcgtttatcttctctccaaacgacgccatttctccttcccttcttcttcttcctctttagtctttttcatttgatcgctggaaatgaaaacttttcctctcatcactcatctctcttcttaaagattccttctttgcttcacgaaactaaaccgaaccctgatttccctttcttacatgctcaattatcttcaattttcgtttaattcttaggggttttagtcattttcgatcgttcaattccatgtccggcaaaggtctatctccggcgccgttcaacgcgcagccgatgattgtccaagatgctgacccgttacgttttcgggtcggcgaacaggatcctaaaacccgtgaattcgctgcctttatcggcgaccaccggtatttcgcggcagcagcagcagcagccgccgcagctaatccacatcctcatctcgagttccgtcagaatttctactcggagaaacccattatcggaaaccctaacgacagtggtggatccgacggcgaggatgacgttgacgtggaagaagaagacgaggatgatgacttagacggaaacgaaggtgacatcggcatgaacaaagacgctggtgaagattctgtatctgcaggagctggtatgagaatcacacaaagtttatgtttttttgggaattctagttttgaaaagtttctacttttggagtattgaggcagtggactaaaatggtaatgcagtgatagtggttggacaagacaacgcagcttactattcccagcattttaagacagtggaagcgagttttgtttctaggaatgaggaatcatcaatcgctgcggataatgggtgtgatttcagtggcagaagagacctttcttcttcttcgagcaattcgatcgagtcattgagaaccattttgtctgatcctacaacgtatgttctttttgttttggcttggtttttacggggttttttggtggtcttaaggtcggtattgagcttatatgattctgttctaaactcttgaaattcgtttagttcttgaattatccattaatgagcatagatgtagcactttctgaatcttggtatagtgatatatatggttccgtttaatctatagcctatattgtgttaaatgtgattctctttgcacaattgtagaggctctttgatggctgatgctatgattttaccttgcggacacacttttggagctggagggatagaacaagttaaacagatggtacaaagttttgctagcacaagctcttctttttctcttgcttttggctcatttcttttgcttatggaatctattttccgtcgtgttcttagaaagcttgttgcacatgttcacaaccagtctcagaagactcgataaccccaaatctcagtcagtgaattacttgtgttcttgatttttgtatttggtattgtctgagagaactccttgtcattattttctctcgatgttttcgcagctttacgagttgcggtacaagcattctgccgagaagagaattcacagtcaaaccatccatctaagagaaaacgagaaggatttgatcaagtaaattcaatactactatacatatgacctctcacatttgtttatgtttcaaacaagaggttccttttccatatacacaggagagacgcgcatttggtgtcacgaatcattcaggtcgttcaagaaacaaaagtaaccatttcccatttgctgtggcagatcgagttataataaaggtcagtcctttcttcttttcccctgcattgttttctgtatcgtaggtatgttcttataatggaagattgtgagagttgctaaccgttggagtaaaacgtgaaatcagggaaataagaggacaccacctcgttttgttggccgggaagctgttgtgactactcaatgcttaaatggctggtaaagtctcatttctttctttgattcactaagtttagattctttctcactgcaaactttaaagacatcaccttaataaccttgagcaaatatctataccaacttttgtataaattttctgtaacttcagagctcatttgctacataaaactatattgcaggtatgtggtgaaaacactggacaacgcagagagtgtgaagcttcagtatcgttcattggctaaagctccagaagatccatcagctaaagcaacaccaaacaagatggtctctaactggctctaaacaaaccaaccttgtttacaacatgatgacaccagtttctgctcctaggttcgctatgtaagaacccaaaaaaacttgtctacagatccagatcactgttacatattgtaaaatgtagtagttactccatgtaagaggtttgaggaaatcagtcttagtgaaatatccaaactttgaatagccagaacatattaggatcataatacaatacactgttgtctcaagattacttccttattcaagaagagatgtttataaactatcagatcttaactaatttagcataccaaggttcttactgtaaaacaaatggctgaaaaatgaatctataaaaggaaacaggaaaagtaaaagctcctagtgttacaaatggatattacaaagaaaaactctgctatgaaagtttacactaaagtaactgagaaaaagttttcaactaaaaagcttaaatcagatcctggtcagaagttttaaggaattcagctacaggttatgttctcctctagaaaactgcaggtcgagtatatagaggctgcagctgctttaatgactaaatccttatctgagatcagcgcgtttgcagctctgcaacacaatttggacagcaggtaactaaaaaacttggattggggaaacatattcaactggtaatgagacgaataggtagtgaaatggacatacctagagtccaatggcatccctaactgtaagaaattctgaccagaactcaagctcaagtgttgcagaccttcatcacaatgtgattgcatatatctcacttggtttaaccagctttcctgaatatttgcagagtccacaaactccatatcagatgcaaattaaaaaaaaaggtaagatgcgtggtaaagatatcttaactatatttaccaattgtgactcttcttctgatagcttgtgttcgagttgcttaaacagagtcatccatctgctcttatggatatcgactgttgaagccttcgaagccccaccaaggagtagagttgggtcattttcttgatcagctggaaactctttccttattaagtgaggtaactctatcgtgacaactgcacgaaccctcttcctgctacgtcgaagagctgaaaagaacaataaggacatttaatgaacaatcaagtactaaagttttcgtagcattaatgaccatataagagttttggttaccagaaacacggcctttgatgtcctgatgaagcaattccaaccattgagaagctactgtagccgctgcaaatcaaagatgaaaatccatctaagccacatatgatagtataaaaccatgcacattgtgtattgaattaaagaacataccattaacagtgagaacactagcactgttaagatctgatgcgtcctcactcgacaaggaactgtcattttctgagaacttacctgccacctgaaacctcgacctaactgtattgttttcttcactgaactcatcatcagcgcatttctcggcgtagtagcgcatagagtacatatctttaggcaaggcatactggaatacttggtaaaattcagatctgcaggcatctcccaagtttttcctaggactcccatctgcactattactatgcctcaatgtagaatgatagtttccagcatctctttcagacttgacaatgttttcgataatggaaagtacttgctttttgtttctcacatggttaataattccagggttcaattcgttaagcagtccgctaggagcagcaagcctagcaaacctgtcaacttcttccttcctttctatctttctcttcttcgccactgcagcgtcattattaatcttggttttgcgtccacgtttctttggagccggtatccctccatgagaagatgatatgagacagctacttgatgtcgttgaaatcccaccattcggattagagagatacccgttctgtttcatctctgtccaaaccttcattggatctcttttggctacagaaccattggaactcccacactctgaataaacatccattgaactagttttctggcttatcctagaggagcaaaccgaagttaaatcatcattcaagcagctggaaacagcatccgcattatcacatctcttaagcaaagctcgcttatcacaatcaacatcagtgttgagaacaagcttactggaagaagacttaacctcttgacccaccaacagttcagtcttaatattcttcccttctgtaacaaaactctctgaaactttaccaacttgagacatgccattggctttttcaacgtctttagaaccatgaacagtgttacctgtacttcaaaatacatttcaagggctattagaggtaaaagtgattcagagtttaggttacatattctatgccttgttctaaacttcaaactcaattcaaactgagtgaaattggttcgagtagtaacagtaaaattacctgaatttagagttggtgtaacaggttcaattttactcaactcctgtctttcatccaattcattgccgccgatctaaaatcccagaaattgaaaaagtaaagcaatgtataattagatcgagaaattgaaagaaaaaatatatcacataaattcaacgaaccccagagaagaagaagaagtaaagaagttacctttaagtcggatctgggaatcggagaacaccctccagaaacagcgtcgtgttcttccatggcggctcaattaaaaacctcgaaagcaaacctagaaatttacccacgaagatttgacacaaaacaaaagccgcgaaatttcgagaaattggagataaaccccagaaaatggtgattacagattctctgaatcctcgagggaaaatactcaaaaaggagaccgagggttcgggtgatgaagtctagggtttaaagatctgatggtcaattagtaaagattggaatgttcgattttgagaccctagaattggagaagagggaagaagaagaagaagaaagaggtgagaagagcgcgcgatgtctgcgttgttttaataatttctgacaaacaacaaatatgtttgttttttttggggttttttttgttttctggatggatcttttgaggtttttcaaattcaaacaagacttaaacgcgatttggagggaatagtatatttgggcctttataatcgaatcttttgtatcaaattcgtaaaggcctttttcacttcttttttaataaaccaactacttaaaccgtatattacgagaaggctcctcttgccatttgaactttcaatttaagtaacagatttataagtattaattgcatgaatattgtgaaatcttttgttattcaattgtgtattttggaaaataatattcattgtaaatttgtaatctacaattaatacattaagacacttgttattctacctccatttaattttgttacttcaaaaaaaaacatatttgattttcttttgctaaagtaaggttttgataataataataacatatttgatatttttttactaaattaagtttatattttttaataatattttaccaaaatttggtcaaactaacatttatttacatgataaaacaaaggcttcattatcaatttcccacaagccaacaattcctaagctgagattcactagtctctctaaaactcgacaccttagctaaacagaaatgcgtacaccgcatacccaaacccgacccggatcctgaccctgaccctacacgggtcgtcttaagcagataacaaaccggcccacactcaactcctctcccttgcaccaccaacccccacgcacgtgtgccgtctccaccgtcaaaaccacagccacaactctcctccgccgctcctaactgctccacgaacactatcccttccggcatctccgcctctcctctctcccacctccccttcaccgccgcccattcctctgctttcatcacaactaccgttccctcctccttatctccggtgtacaaatggactaacaacggcgcttcacttaaattcttaacgatctccgtcaccgattccttcatccacctgtctagcttctcacgctccgcttccacctcccaacgatctcctctgcttctccctccgcttcttcttccacctctctgtttctctatctcagtcacagcctcccctatcgacgccgagattgttccgatgctagatcgtcgattaccgcctagattaatcggaaacgacgatgaaatcaatctcgcattatgatcggatccacacggatactccaatatgccgcgttgcactagataacttccaccgtaaccgatctttgcatacgccattaattttaccccggtgatgagattttcacgtccaataaaatcttaaatcacaaaaaccggagaataaaacgtcgctagattcgctttaatgtctctacgaacaagaagttatgaaacaacggcgaggattaaggcggagataatatatatctagcggtcggatgagaaggaagaactgtaacgtaagaagatgacttaatataacgctaggtttcttaaacatgctgacgtcactttatgctgaaactgtttgacgagttatattctgatgtaactcaatccatgctaagaccacctgttgcaccgtaattaagtatatgtttttacttttaattggttgttagcggagtatactagaggagagaacatggttgcacaataagaatcacgtagtggattattacttagcttgacagtggaacgaggtcaatgattaaaagacctttaacgatataacggcgttttttataatctagaacagacgctttgccgtcgagagttgcttgatttaagccgtaggattataagacaatgcttcagaggaccggatcggacggtcatcatgagatatagaaatcaataggcacgtgataatatggtttgggtacgtggggatctcggtgtaacacgcgacactcgtcttcttaattaagtggattccgtgcttaccacgtgtttgccacgtcagcttattgtccacgtggaatcatctgttcctactcatcttattgtcagttttccatattatacgtcaatgactcaaaaagttatgaaatttggttttccatgcaccaaaaatagataaaacctaccctgtttaaataatactacaatttaattcaatgataatcaaacaatcccattaacgtaataaacccacattttattgaattttgttggatttatgatatttagtttataggatcgctagctccttacattttagaggcataaagccaaataatttagatttattattaatttttccatttaatttacattgtttgtaataaattttgcctactttcagtttctgaggtaaatatttaaaagaagaaaacaaacaaaggtagctaaagaaaaagaagaaaaaaacactagaggcaataatatagaaaacaaatcagttggtagaaaataaaaccatcaaaaggcacaacatggattttaaaacagtaacgattatattatttttaagtttcgtaatttgaactgaaaatactttcaaatttcaacatgttaaaagttaaaacccaatgtgaaaaatatatatattatatataaacaaaaacctaattataaatcattaaaaaaataatcaaatttcaactagtatttatgagtcattacacaaataacacaacattttaaatccaacaatacattattttgcttgaactttctattgcattacctaccccgaggctatatcaggagtatacttgacttgtgccctttcaaatccttaacaataaacctcgtaattattgaaaatactacaaattatctggattatgtacaaaccaataaacctcctagttatttatgtaattatttacaaaccaaatacgaaagttttaaatccaacaagacatcattttgcttgaatttttcgttgccttgcccaccccaaaactatcctaccagactacccgtgtgtatttgatttctgctctttcgaatcaactaaaattgcaaatagaggttaataacttttcaatcctatgtttttaatatataaaaattaagattataattgaaaattccggaactacatctataatatcaatccgtaatagcttttttagaaaaactatttaacatatcattacaaaattatcagaaaaacgaaacataccatgacatacaattaatagtgcatttttctttcactttttgttttcagtttaatgcatttttctagtaatctttacgctctccattaggttggatacacatgtggagctaaacgaggtgtggcaaccgcgtataatggttttgccataaaaagatcattcttgctttctgaaatatcaatcttattcttaccaggcactggtaaccacgtgaatccttgaatcaaccgagccagtaacatgtacgtcatggctgacccaatgtccacacccatacaacctcttcgtcctgcactgaacgatattatattcagatcagactcgtttagatccacacatgtgttagtgctcaaatgtctctcagggtcgaacttatgcggcttgtcccacacactaggatttctcccaatccccatacgactaatcaatacgtggcttcccttggggatgaaataaccgtctaccacagtatcagtggtggacatgtgagggaggttgaacggtgccacggggtgtaaccggaatgcttctttcacacaagccttcacatagttaagatttgggagatcagactcaatgacaagacggtcttttccaactaccctatcaatctcttccacggctttttgcatgatgctcggctcgttaatcatctccgccataccccactctgccgcgttagacggattatcaaccgtcgccaacattagttccttcataatccaacataattaaccaccaataaagttagaggtcaccagataaaaaaaaattcttctaaaataaatttaaaccttttgcttgtgaaaatgcatctatatattgcaaggattccaaactgaaattaaatatttagagctttaatttcctaaaaaaccccactacaatctaccatgaactttgaggttaagaagtgtttttacagttttaccaaatactaagtactacattcatagacaaatgatgtactattgtagacatcatgaccacatgttttataagagctagatcactagtggccatgaaaagacgaatctttcgtgttataagaaagaaaaaaactctacgtatgaacatgttctataagccgattataaaaagatatatgtccatatataataatgcataccgtcacttgtgctttgatctcttcgtccgacagagtaggcttcccgtcagtgtctttagctattataaacatgtcaagaaaatcttgaggttctttcatcttcccatttcgccattgcatgagtctttcatcaacaaaagggtcgttatacttacttacatttctcattgcgttactcacaaccttctcatggccttccaagtccaagaaccttagccacgggacataatctgacaatgcaaaggcgtaaagatgggttaaaaccgtaaacaaagattccacatgttcaatctcttccaaccctggtcccgatccatcttcacttcctttaccaaaatgccttataccaaacatcatcttccgagctacatttccactgtattgccgtaccgcaagccttaaatcaataaccacaaaagcattaccacggtttttgacactacggttattgatgtaccggactaagttatcagcctcttcggttctcttttgtagcatcatttggaagctcttcttgctcgtcacgtgagatgccaccactctcctcatcttcttccactgctctccttgtggctccaccgcaacggtcaagtacccgcggctgcagtactccgtgcccatcgttagcggtctagtggcgaaaacggagtcttgcttcttcagaatctctcttgcaattctcggggatgtcacggggatcacgtgagtattcgcaagacggatacatgcaatatcggtgttgagttctttcatgagagaatgtatccaccggaacaccggtttgttcctccctagtatttccggtaggtttccgattaaaggccaagatttcggcccgggagggagagagaggtttctcgtagggctaattaacatggttttcttcttctccttacgcttcatagttaatgcaagaagaagcaaacctataataaacgcgagcattggggtggagtcaagcatttttttttttaaatctcaatttggagaaattatttgagttcgaaaaggttttttcttatctatgatgaggaataagctatttatagccatgaaacaaatgcttttgtttaagtgtaatctatggaaaataaatgtgctttaaatgttgaagaaaacaatgttaaatgaatccacgatttttcaacagctcatatgtaagacatgtttttttctttgattattccttatcccttataaatcttgtggatgttaaattggtaatgcatcattatgaaatccttgtcccttttaggtagcgccatcattagaaaaaccacgatttttcaacagctcatatgtctaatgtattacatgttgtgttttaagtacatttctatttaattaccaactttttacttttccaaattcgtctaaatctaatctctaaggataaatttgcttacgattccttaatccttatccctttaaaatcttgttgatgttaaattgttaatgctgtttatgaaatctttatccccttttaggtagcgccacgttaaaaacaatatggacatggagatttgggcttataaaaactgtaaatatttggcccacttaaaaattgattcagcttctgtaaatttaatcctagcagcttccattcggctcgacatgcgtagcaaaaggaatacccacgactatccatcaaccatgaaattaattaggaggcgaattaaaacataatcaaattacataaggactaattaagaaaagctagagattgtgattagagaatagagattataccatgacttgctgaagccaatttttggcactttgcacacattacccaatctctttcagttgtctcttcgatcctttgttcccacttggctcttagtttatgtgtcgaaagatgggcatagctttcaatagtcagtttcgatttgcagcagtaacacttacttaccagttcaaaaatgtgataatgatcgcaatagattgagatatgacttatgagtgatccccaaactcacggcttcgattagtcctcgcttcgatgccataagctgagcctctaaacccgtaatagcggagtcatgaattgatcctttcatgatttgggaggtcgagatagaagagaagacgaaaaagggtttttatacgttactgctttaaagacactctttatttctcttttttttttttttttttttttttgggtctttgtcatcatcagtttactttacgttactgatttcaagagccgttgtggagaaatgtggctgcttctaattttgtatctaatttatgtacgctttgtttcacatttgacatctgatctctttttactgtatcatagcaattctttcttctatctcttttaattattatacttctataccttcatttgttaggtagaatgagtggttgtggactgagtgcttgatccaaacacgtggcttcctggtgggtcgctaacaaacaattgagatcacaagctttggtagcaaaaaaattgaattcataaaaagaatacgtcgtcttttagatcacaagctttgaacgttagcaaaattatgttacctaccaccagtccctggcttattatatagagagagatattcacatttacaatttcgatattgtttctctaagatcgtaaaatagtacaccaagccatttataaatttcttcactctcagattcaaaataatataaattagaaagtaagtcttacactctttgcattcttttttattacaagtttatccactaaagtaagattttcagttctaacaagtttcaattattctcattgtctttttttcaatgctttgtttttttcctaagatttgtgtgttcttgtttatcaaacagtgggaacagagatggtcatggttcacgaggttccttttcctccacagatcatcacttccaagccactctctcttctgggccaaggtttttatttcttttttgctttcttaatgtctgataccttataatgcgatacataacaaaatcgcaggtaacaataattttatatggattgttcatattcttgttatagggatcacagacattgagatccactttcttcaagtgaagttcactgcgatcggagtttacttagatccttcagatgttaaaacacatcttgataactggaaaggcaaaaccggaaaagaactcgccggcgatgatgacttcttcgacgcccttgcctccggtaatcttaattagtccatgttttcaaatcaaaatttgaattagggttctctggtttagatggagactacgtggttcaataaatacattatttggtttggcttcttattttggtttactttgattcaactggttaaactccggtttacttaattaatctggttaagtacgtgtccaacgaaattgaaccggttcctctgcttactattatacatttttcagcggagatggagaaggttataagagtggtggtgataaaggagataaaaggagctcagtacggagtgcagctagagaatacggtgagagatcgtttggctgaggaggataagtacgaggaagaagaagaaactgagctcgagaaggtcgttggctttttccagtccaagtacttcaaagctaactccgttatcacttaccatttctcagccaaagatggcatttgcgaggtaagaaaatatcaactttcatatatttttagaaagaaagtatgtttagttatccataaacataagcatcaaattcttgtggaacagaggaactctgttttttgcgttatacagtataacttatactaatgagaatttgtttgaaagagtagatgttttagtttcttattgctagcgtacaaaacaatcaatgtcctaaaataattctttattgattggtggaagatcgggtttgagacggaaggtaaagaagaggagaaactgaaggtggagaatgcgaatgtggtgggaatgatgcagagatggtatttgtccggaagtcgtggagtctcaccgtcgactattgtctccatcgctgattcaatctccgcagttttaacctaagaaccatggccccttacataaaaatttgtatgtgtgtgtgttttatgtagtatttttttttttcctcttgtcaagttcctgcttttgtatcatcaaacttttactttggagtttgatatggccgaacaatatggtaattccttaatctcaatttaaatcagctttgctcgtttggattcaacattggaaggacacagaatagattttgttgagcttagtgtatgaatcttggctgattgaaccaactttgttgaattctattgaagtcacttgcaatggatcgttttgtgaaacagaagatttgggattggtcattggtttgtgatgtagtgtgactttgcttttgttgtactaagcagatacggagcagcaaactacagaggaacaatcgatgcgattttagttcaaaaagtaactagtcgttgttaaccgaagcatctgactagccgttggtttatccgaacctaaggttcgattttgctctggacttcccaagcaaaaaaaaaaaaggaaataacgtagaagagtagaaagattatataagtaatcgtggataaaacttcagtcattgtaaacagtaatttacaaacaaaacaaaaatatatataccaaaccagaaagaagaaaacctacttaggtgaagcaaacactcaacattgaaagtgacctcatgaagctctgttacgttgccacgtcatcaccccgccgggaaccatttgctggagtctgatgttcgaggagtgattgtctgcaagtggggcaagaggaatgtgacagcaaccaagtgtcgatgcacttgacgtggaagccatggttacatttgggcaaaaccctaactgtctctccttcaacaaaatctcctaaacagatcaaacactccgtggctttcatcttaagctcaggactgtatgaatcaaccggaataaccttcaacgcccgtttcttgatcccctttgctacgtttgcattggtgtcaactggatcttcgttgggagtgaaccttctcgtgcagcgtaagacacagcgcaagaccgaattgatgccaagagcacagatcaaggcgcatagaagagcggctagtatgatcaccatgtgtgtatccatgctagctatattcttgttgttgctgacagagtctcctaaggttctaggatttgcatcagtagctgaaatagtcggggtagcttgcgtcgcaagtaaaaatctagccatctgtaaacgtttcagaaacagatgcacaaatcttcttttttttttaactcaccttcaaggttcttcttcttctttttcttattgctccagtttctgttcgaatcggactacgaaagagactgagatgaaagagtcaagtttcttcatgctatgataagcacaagagtgcttttgttctctcttttactccgaggcttagtttccagtctgaaactcaaagacttgataaatccatggagaaaaatcaaagctcaaatcctttatgatctgtttctttatacaagttcttctttgggttttacacataaggaaataagttgtactataagagtaggaaataggctagtaatagagagaaagagggatgatatgatgagatggtcggtccaataaatctttggttagatttgctgttatataaattcgataatttgagagagaaaatactatggcatataatcttgttggatttgtataatttagtaacagggacaaacgtaaaggacaaggccaaaaagacaactaataatgcagaatatattggtgagtagatattaaaattgatgtataacgaattctcaattagtggtcttaattaagaatttcggtttcaagccagatgaaatccactctcgtatagaaagaaattaattattgagaaaacgagttattaataaaagaaacatttgatcatttttttgtataaacatacatatgttggggtatcagattcttaacaaatcatgaggattatagcataatgcatttgttccaccattaatctactaatttactatagtcgggtcacattaaaacgtagtttaatgttaccgaaaatgtgtaaaatattagttggatttaaattgaatggtctacatatattaagggaaaagaagtatctgggtgggatctttggtccacatattagcaacatccaattcaacactttctgatgttcaagacaaacatacacacaagttctcacgcaagatccactacctccattatcacacataattaaattataagacaaactgacccattaaccaatacgtgtgtatgctcatatacgaatgttttaacctgattagcttctttctttcttttttacaacttcacgatagctaattttttttttttttttttgtcaatcaatcgcaaaaaaaaattagctatcgtgaagttgtaaaaaattcactatttttgtaagaaatttcacttttgaaatgagatggaattactacaaatgaagaagaagatgtatctgtttgtgtttggataaatagccgatgctagttctatctatagaagttattgtcgatgagtaggctttgggctataaaatctaactctaggtttagtgctaaaattggtccaccaatgtgtgtttcatttcaagaatcctagaatcaaatcaaagtggtaaaaacggtggttagaaagcaaaactatgagtaagtctaagtttgttaggttagattttgatttggtttggttaatcttgaaaccctatgcacatggaaaaaaagatctaagcttgatatttcagtgggcaggccttgatgggccgaatcacgctccatagttacccaattaagaggcggctgtgtactagactacaaggttcttgtcatctgtccatggttcttatcttgaatgtgtcaagttacatacacaaatttcaaatatattatcaaaatttcctggtgtggtttctttgttttattttattttattgatatgtaagcatacatggcgaagaatgtgatatgatgatttacaaactgataattgactgaaacttggaaagaaagtctgttagcggaaaaaaaaagtttgttaccggaaacaacgggcgatctcatgttcttatatatccttgttcagttatacgccgagtacgtcatgttttgatgatctcctgtcacatgcatgtctctttcttcctcaccattcatatctaaccaattaacttatgactatagactatagtctatatatgatttattcaagtgtgcgcatgcaattttaagaaacgaacttcacttatatgtatttttcttaattacaaatttagagatgaaaaagacacaatatttagactatgatattgattattgagtaaatagataaaatccatatataaatagtttaacaaagctgactatatatatttttaaattactatgattaataacatcgattggattagtattaaatgcttaaccgtattcatgcacatttcagtatttctgtttctcatgactgatgatatctaatcttatgtttgaaactagaaagtaaattaaagatcactaaagaatgcatatgattaatttgttaaccgattaattttatcaaatgacatgtgaatctgtgatgcggatatgtaatacgtccacgtggcataaaagtaggggtccatgaggtatagccgttgcccgttggaatggttaagcgcctaacggaattgcatgtgaagacttaacctacacacggaattcctggaaattaagaccgatccgattatgtcaccttcttcccttttacgttttctctaaaaaaatatgtgtatcataagagaagtgggatctagctagtagtgaactccataatccctatataagtgaagtattgaacgaattaccaacttcactactcatccccttttccacttcttacttcctcctctttagcccatcagcaaatatcatgaatcttacagaatattcccatattttgtttctttcactatgcaccctcaacttctgcttgtactccataaactccgacgacaacggaggctgggagagaggccatgctaccttctatggtggagctgatgcatccggcacaatgggtacttcaaacatacctttttcttcattgcacacacataattaaatcataacaaatggatatacttttaacagtcaagtattgatgtttttttaggtggtgcttgtgggtacggtaacttacacagccaaggctatgggctacaaaccgcggctttgagcacggctttgttcaatagtgggcagaaatgtggggcctgctttgagctacagtgtgaggatgatcctgagtggtgcatccctggttccatcatcgtctcggctacaaacttctgtcctccaaactttgccttagctaatgataatggtggttggtgcaatcctcctcttaagcactttgacttggccgagcctgccttcctccagatcgctcagtaccgagctgggatcgttcctgtcgcattcagaaggtaaaaacaattctatatacggttccttagttgtcttttttagtatacgtttttttaaagactctaacgtaccattttctgtcctctaataatgatagggttccatgtgagaaaggtggagggataaggtttacgataaacgggaatccatatttcgacctcgtgctaatcacgaatgtgggtggtgctggagatataagggccgtctctttgaaaggctcaaagacagatcagtggcaatccatgtcaagaaactggggacagaattggcaaagcaacacttacctcagaggtcaaagcctttctttccaagtcactgatagtgatggtcggactgttgtgagctacgatgttgtgcctcatgattggcagttcggtcagacttttgaaggcggacaattttagatttatgatcaagtgaaactaatagacgttatatccaagaaaagtcaatgattgtgtttaagataaaactctgcttttcattgatcataaccactcttcgatatataatagtcataagaaagaaatacaatgaaacaattaattttgtttggagatcattttgtattcttcgcatatcctcgcttagtacaaaaggtatctctatttgaaaattctagtacgaagaaccaaaagccagcaattcaaacattttaatttcagtagtaacacaactatagtatttgatatatatatatacaacaacactaaatttcttttaaagaaaaagaataataattaaataaagaagtcatcacacgtgacttttagtcatgagaatgacaaatttgctaagtcttgacgtcgttgattctcttgctgggtccagacgccggaactgacccttttggaagagcgttcaacaccaacgacccaaattttccggtgatatacgacgaatatccagccgtcaagtgatcatcctcgccttcgcaccctaccaccgtcaccttcttggagacagcagagatctctccggagaagatgacgccatcgattaccgacggaattcctaccggaaatttcctagctgttgagaacgaagcaagctgagagatggagatgaataaaactagaatcaaagctccaattctagccatttttcttgtttgtttttgtttcttaaccttcttcgtcactatgtgatttggtgaagaagatccgtgaaagtatatgtctatatatgtaatgtgaaaagagatagagaggtctctggtcagtcaatggcagttgcatagataacgcggcaagtgtttggactcaaaaagagttagaagactaggtcattttagtttccggtccaattgaaatatcacttcagaacgtattgtcacaatttgtaattacattttctgatttcaaaaataggcgtgaataacactatttggagatatgataaacacacctatctgaaaagaccatttatcaactatgtgttaattcaattgacaagtagagactgaaaacagtttataatttgaaaataaaaattgacaactttagagtgaaattcggttaggagtttaattttaactttaacggctttattgatttaaacagagtgttgttgttacagacaaattatagagattgtaacaaaaaaaaaaacttttttttttttatagagattgtagtaatgaaaagtcataagtgtacataatcattggatgggccttattgattgtagtagtaatgaaaagtcatatgtatttgttttaacttttaaccatgaaaaacccattaatcgataattggatgggccattattgggctattgagtaacaaaaatcaacctttcagaaatcatccactaaattgccgttttgacgatacttctgaatgagggagaggctttctgtatgtttttttgtttgtctccttccttcttcgtctctttacttctccgatttggctatcatcggtcttccgaaacgttgaccttggagcttgagggtaccaaatggcagccagaattcgattagatgcggtaatatccacgatagtaacggtgcacccgcacgagcttccggcgttgctccactcctcttcctgcttcttcttcgtataccgatctccttctctctgtctctctttatgtttaaccattcatttcgagtgtcctttaacttttatttctattgaattagatattgagcgcgtatttcgtagttcttccactccgcgacgaaggagcaatatcgctgggattatcaaagctaccaggccttttcgttggatcattgtttctcactctcattgctgctcctctttccaccttcatcttctctttgcccaatttgtccaaatccaaggtactcctctttcttacattgtctgtttccaatttgtaaccttttgacaatcttatacacatgcttttcgaaatttgcaggctttggttataattcatagattctttagtctatcacttgttctatgtttccttctttggatggcctccccgacagagtctaattcaaaggtaagataagagacttgaatcattcataagcattctggaataagtcctgtctcatggtttaacacataccactgcttcaaaggatgcagttgaggcggcttccggccttacaaatgatggagctaatgctgctactggatgggacaaccatggctggttttacatttctgtccgggttggatttttcctttgggtatgatgtctaactctttgggttttttttggttttaatttcaagtcgtttgagtgtagctggatatatgatgcttgttcttgtatgtttccaaggttgcgttgcttaatcttgtcgctatttcttcaacgtgggctagaataatagacgttatggatagtgaggtagtttctgctgccctctacttttatttccaagaactggttattgtttcgaggcatataatattcttcagttcagtcaggtgcaagattgtttggttttgttggtgctggtgctacccttggacagctttttggatctgtatttgctgctgccactgcttggatgggtccatgtatgcatcacattgtctgatgattgtttcatttacaatataagtacctagatagatattagcttatgctttgttgttcaatgaatgccatgttgaattcactcgaaaatcaatttgatgtttatggcagatttacttctatttgctgctcttttgatggaatttgctgcacagtcttcaaaagggatcactaatgatatttcccagtcctctgaggagttgtctcctctaaggttagctaagctacaatctgtgtccatatatgttattatgaatttgatttgtaaatcaccctctgtttgctatgttctcctatcttatgtttggaataatatgtggctatgcatggaaccgtatggaaaattgaaatgatttatctttaagtttagatttgtgcgtactcaatttagattatgggatagtcttagtgtgaggttgactcagttatgctcattgttggtcaagaagttgatttttgttgttgtttctgttaggggaactgataatgatcatcaacgtgagagaaaacaggaggctacttctccaaaagttggttctccaaaagttgcttctcctaaatcgcccatctccacaaccagacctcagttttgggccatcttagatggaatgagacttatactagcatcaccttatcttttgctcgtgtctttgtttctttggctcggtgcggtcatctcctcattcttctatttccaagtaagactactctttatattttgaatggtttcattttcaagatataagaattacctaaatcatgtggatgtaatatcagaaatagttgacgatggaatataggcttctcatgtgaaccatctctacgtgttatactattcatttacctgatctggaaagaactatgatcattataagtttataaccaagactctttgttctttaacagccatttgaacgatttttcacaacataaagagtagaatatccctttgttattagtgcttgcaaattatcgcttatgatacgagctgttgctttaaaattcctttgttttctttgagtctatagaatcaatttctgctctttgcaaaaagaaagctgaacttcttacggtctcactgatgaaataaagttaaactgcagaaagtgaatataattgctacgacaatcaaatcatccattggtcgaagaagactgtttgcccagataaacagctttgttgcagttttcatactcattggacaactgactttaacggtaagtcatatgcgagacaaaattcacacattgattcaccatacctggaatatttgctatataagttagtatgctaaatcttacaggggcgtatcttgactgtagctggtgtcacggttgcaatatctgcatctccatttgttgcacttgggaatttggttgctattgccatatggccaacttgggttacggttgctgtgtctgaaaccctgagaaaggtctgtggtttacaacaatctctctcatgttaacctactgttccattaatgacacttgattttttataacatggtaggtgacaacttatgttgtaactagacctggaagggaactcttgttcaccgttgtctcgcaagacgagaaatacaaagctaaggtacagaatctttcctttcctgaacttctagtaagaaaatcagtcctgcaaaagggaaagtttacactttggtttattatttctcattctgtgtgctatggtttcaggtatgcatagatgtaattgttcaacggcttggagatgctgcagcggcgggactatttgaagtccttaccattgctcttggcggtcaaacgtcaactgcttcactctatgccctgccagtataataaaagcttcctactttcagacagttcgtcgtgtatgagtattatttctccatgaaactcctcatcaagtctccattgtttttttaacaggtgtgtttaatatggatagtcacagcgttcttcttgggccggcgacaagaacaattggcgaaactccaggtgggttcatcttcataggaacaaaatcttaactttgatacagaagatgagaggcttcaacgtcatatgtaggagttatgggaaaacaacttaaacccgaccgacatgaagatgaaggatcacaaggcagagtaatggtttagaacttagcttaaagaattcatatgtctgctgataaattaaatattgtacaaagggaaattacgctctttcttttgagagcggagtatatgtaaccgaacttggtttttctcttcttttttttcttcattcaattaacttgcaaagagccagaccaactaacccaagcgaaacaactgcagacatgatgacatggcaatgttattgctccacaatattggggacactttaatataatgaaatgggcttaatcttagatgggtttactgttgaacagttgaagccagaaaccctaattactcattactcgtccactttactttaccggcgccaatggtgagaccctgaatcaatctttccagatcttgatttagatgaatgttttttttttttttttaatttcgtttaagcagagtgtttattgtgtgaattaacatgataaattgtacctgcaacgagattatgcatattttacatttctttttatttgtaccttgggattcaagcgaatgcattgggtgacgtaactcacgttagttttggttttgattttcttaattgcatttgccaaataccaatacactagactaagctccagtgctctaacattgtgcttgctcattgagaatcattcatggctaagtcttccacagttgaaatgagactttttcacacgcaaccaagaaaggaaagaggacatgaacttgtctctaaacagggtcatccacttgcctctgctctgctgtatgaaacctactgtatatgatgtagttataagatcaatgcttctccatttcctcgatcctgcatacttcttcaaaccatcttcaatccgcctataactctcgttctcatcttctgtttcacctttcatattcttagctttcattgcttcaccgagacaacgagcgaggataactccgtcctccatcgccgagcaaccaccttgtccaatatcaggagtcattgggtgaagtgcatcccctgcaacacatacgttgtcttttgcaatgtttgcccaaagaagttcccagggaggtcgatacatgagtggattcatcaccaaactatcaagatcagtggtctccaggatactcttgatgttgtcaggcaagtctttgatcttggtcagcacaaactgtttgatcttctgatgatttttcttatctaacaaagtcaaggagatgaatcaatgatatgaacaagatcctgtgtagagtaaagtttcatttacctaaatcagtagaggtgtgggttaggaaccagtagacagtgttttggtcacatgagatgaaaccggaacgaacaccgttgccataaaactgaaagaaccttctccctaattcgtggcctgtctggaaatgagcgatcccgcggattgctacacgggaagttttaaccggattcttgaagcctagccacttaccaaccactgacttcactccatcacaccctaccaaaacctttaaaagaccacaaattcggttacaagaccagcatatttttacagaggagtcaggactggttagttagtaccttggttttaagtatagtcccgtcggagagatgaaccatcttgtagtgtccggacaattcgatgtgaacaagcttagatgagaaccgtatggtcccttgaggcaattcgcccgctagagcgtctaacaagagcttcctctgtacgcatcgaacctcatattctctgacaaaaccatttcaacaaggttatatataaaggtttcttcttcttctttgtttaatagtcgagagaatgaatgataagatacatactcagattctggaaataacatttctttaggaggatctcctgcagaaatgggtctgaccacccatctgcatcaaggtcaactatatatagtaagttcatagttgctattaatagtaatagtgttaaattgttggttacccttgaaagcgatcaccgagactgcgaatatgctgagaaataccgagagcttccatggccttccaagcattaaaatataatgaaagtgcaaatcctgttgctctcagctgctcagaagattccagcactatgcttctgatcccaagcctgaaaataccactttaattaacttacatggactataacaaatacttgacacaaacacacacacctgtggagcccaagtgcagtggcaaggccggagattccagctccgacgatgatgatatcttgggtactttcagcttccatggtgggcgagtcaacgaaagaaaccactcggttcaataaatatccaaactttatatttataataataataataaagatttattatcgtgtaagaactaagagtagacacgcacttttggcgcgtggtttgaaacccattacagccaaagcatgggcccaatgctcaaaaagcccataatggtaattctgtttctataacttaattaatgaacagcacccatagtagtatagtagtactgtagtagtatatacaggcttgggatcagaagctagtaacttttacttcaaaacacaaaatttgtgaaggaacaattactccacataatgtcgaagacaatataaatgttttcactctagagaatagatataggaagatagttactgaagagttaaaaattactacttagattcagttttcaccatcatttttttttgaaaaaaaaaggtgtcaccaaaaaaaggacgagaacacctctaatagtcacagaggaaggaaataagatcagcagcctctctagtctgtttctatatttacataaatcccccaacaaattctctaaaacatgtacaccaccaaaagccaaaaccttctccactaaatcaggattctcagtagtccaacatagtatcgtcttccctgtttcaatgaacataaaggtgagaaaacaagagccaagaacaatgggtatggtagtgttgtattgttcatattcttaccaaaactcgtgtccgaaatgatcagatgaatcatagtcttcctcttcttcaatttgaacgtagctctcatagaactgcaaagtagtcaaaaatgaattgaaacaattgaatatgcaaacacaggctaggcttcttggttttgtaaagttaaaaaaaaaacaatgactctgaccttgtcatatctcccaacagtttttgaatctgcctcttcatctgcctgcaaaatggtacatcacagtgttcaacaaccttaagcctaattagtttaaatctacagctatctcaagtatgcctagcaattaaatgaagatatgaaggaaaacgaatctattgagtaaacctccatagaatcttccaatgtatcaatttatgatcgagggatatagtctaccttataaatggttttagcttcttcgtttaactttctactgtgtgccgaatcaacctccatagcacgggcgttgaatggtttttggtcctggaaagaagcaacaattatgcataaatccagcttagaaaatacgccagaggctttttgagtattttaagaacaaagtgatgttacctctgctgacatgttcttccatacattgaaacatattctgctagcatccactaagtctccattgtaattttccctaaactcctctctagagaaagaaaaatagttactggatggttaaatcactcactgacattttcctacaattgttttgcattatttcaccaagaaccaacaaaaggtccaacatttaacgtaaaaggaaagacattgaccttataaattaacatcaccagtccccttttttgacctaaggatcaaagtccactatttatctccatctagttaactcaagaaattcaacacaattgtaataagaaacagagtaaaagtctttggttactgtacaagaagaagacaaatggtgatctgggttcatcttcaaagctcccaattggtttcgagatattatcgatattgccactcgcaatgtacttgaaccttttcacttcccttcttttctcaccgcactcatgcatatcatacagagcaatcgctatcataacaccacattcttcactggaataaaaacccaaaacagagtaatcacaaatctagataaaaaccctaaagaaatctagatcgacgaatccaaaagctttgaacaaagtagcaataccattttttaaaagcgctaccatcggcagcacgacgaacagcttgaactcttttacgagttctcggccgaattgccattaatgcgcatcgacgattttttctatttctgacagtgaacaaaagttttaacctttttcgctctttactatgttgtgtgcacgagagctcaggcatcggttcgcttacgtgtcaattgcgcattttaacgataatggattttctgctaacgtgcgcttaacagataatacgcgggacataattggcgcgtaattaaaaacagaggaaatctctcccgcttcaaagaattaattatttattataaccaataaaacttagacacgtaatcacttctaaaatatgcgaatataaaacttcaaaatggaataattttcattagatttttaatgcggaaatacacacttcaacacaaagcaaagcaaacaaaaaaaaaacattgaaagggaccttcgaatttttttggagaagatcaatctttattatactcaccaactcaaataataaaaggtaaatccaataggaaaaagacacgtggagtagacttgaatcagttggtcctcccgcaaaccttgcggatttcaccgctactaccagtcaacgggctgatatcacccatttttatcatcgccgccgtgaagtcagagttaaagctcgacggattgttgctgtatccacggacgatggagtcagtagagccgccgttgaagagcacttggtcggaatggaggagccctctctgagtcatgagattcttgaagtagttgttgtcgaaagaagctgccgtggtgacgtctagtggagctaggtttccgtcgccggaaccggaggctctagggcaagttcgttgacgtgtcgtggcgaaggcggcattgatgtttgtctcgttgtagattctcgctcggaagttcgtgcaacgggattgtccgatcgtgtgtgcgcctgtaaacaaaaccaaaaataatttgaatgattagtttaatagttgacttgtttatttgttaacagtcatttatatgattacgtaactttgggaaaaatatgattacgtaattttgggaagaaaaaacagaaaagtcggtggtgcgttacaaaaatgtgttgaaaaaacaaattcacaaggaaacaaaagtaaagtcgacaaaaaacaaacaacataatcaaattatattattttgtgtcgactctgttgactcttggtccttttgaaatatttctttctatgtttcttttagttaaacaaatatggtgaacgaataagaaatattcttaaattaaagataattaatcacagattaagaaaatttctctgtcgtcccaatgttttagcaatgtaatagtaatcgatgttttgaaatttgcaatcaaccataatctataaaacatatatagttgcgtatataataaataggaattgggttaagatagaggagaaatgaaacgaaccagagagagcaaccatatctctggtggagagtccaacagcactgaaactactaatgagttggctcagactcgaagtcggtgccggaatgttactattcgctgccgcttgactcgccgttcttgcatctcttcttcctactttcacattccagttcggtcctccaagcttcaacaaatataaagacgaattcatattttagaccggtttaatcttttaaactgtcaaaatcggactaagagaagtagggagcttacggctacgacggagtctctagcagcaatggctaagatatcagcacaagacacaaccccgggacatgctttctcaaccgctgatttgatgttgtcgatcacattaaacccacgagctgaattgcggtttggagccgcgttttgttctcctgtgaagcttgacgtatcgtctagtagaatcgaaccgtcgcatccctacatatgcaagttatgactatgattagaaggaaataaccaaataacaattatgccaagtttcttgagatgcaaggaaaacaaaaaaggtaaaagaaaaaaaaacttacgttgacaaagcaatcgtggaagaagagacggaggatagatgcacccattcgagcctcgctgttaacggcagatttaacggcggtttggacggtggagaggaggttggggcaagaggttgagtagaagttagtcgtgagttgtgcttcgacgacgtaattgttatcaccttggagtaaaagtgtaactacgagaactagaatcgaaataagtttatttgaagccattgttaggttaaaacaaagacttgaatataatagacttagagttgattgttgtacttgaagaacaaaggataacagagtcgaggtttatatagagacgtgaagggatgttctaaagtgaaagataggtgacctaacgcgttgaaaaaaatgtgcattctgttatttgttttggtttatagggttgaattatcattttcgcatgtaattgaattgtttctatatccgtcggagagagaagtaaaaaccaaatttatcagcgaaaatatattttcccaaatgtcaagtaaatagtatagccatcaaattaattatctcgaagtcttgcaatagttgactttgaatatgggtgagaaaataagagattaaaacagatcagtgtttattctttggtagtgataagcgtgacactgttacagaagaaattgtttgtgctaaatataattagctcgtctaatactttaaatttatagtcaagacccggaaatagtctaacattagatggagatatataatttcacatatcgaacttttattggatatatacatgaatgaataagagagattatgtgaaggttcacacacacctggttgtaaattgataagattgtgtatatatgaagttataaactaattgtgcagggagaaaacaaatctctttaaacaatgctttcagatattggaactcgaaatttgaagactccattttttggtaatgaactagtatatcgatatagcaatagtactaagtgagtcttagcacccgagtaatcctagaaggtgagagcaaacatattatcttgtctcaatccctgaacaccaaatggtccacacacatcaatgttgttcgccaataaaatgaaacccaaaaagcagaacaagtttacgccttgaaccctagattctcagtctttagtctttacccttacgccacccctacacagattaatcacttcgtgcttttcgtaggtttttccacgttgattttgatgccctaactaatgcttgttatcttctaggttagaagtcgtactaatagataatgaaagtcgcattatacagatatattatggattagacatacatctttttcagcatatgtaccacgagaaaatatagaagagtttgttaaaaagagttgtcaagaatagtggcctaattatttaactaatactttggaccaaacatttgattttatggaaagatttattacatcactagatttcttaattttctatttcttttcctccaagcaactctttctgttcttgatttctatttgcagaaattatagcacttcatgtttacactgtaggtatttagcaaaaaaaaaaatgtttacactgtaggttttcttctctctctttttttcttctgaatgatcactctaataatattcgataccatttgatacgaacagaaagtgttcatttaatatcatactccgttatgctgcagactggattaaccatgtacggtcatcaatgctaaaatatattcataaaggatatatttatacaaaattatcaagtacagttgtaatctcgcacagccttttgttatccattttatgaactagggaattaaatgtaatgtatactaatcgagtgtgaagatctttctcgtaaaacgaattatatgtttaaatatttagattaaagactaattataaaataattatgggaagaagaagtcatatacttttacactacgcggcttttacttttacaggattactttccaaaggaggcacgccggtcgctttctagattttactatatgcgttacatacagaattaaattttagtggaattcattaaagaaaaaaaaaagttagataccttctccggtcacattttcacaccaaccagaaattaacttataaagaaaattaagcaaattaataaccaatagaagaaaaaggcttctagatacttaacttcagttactttaaattacatgaatgctcattggatgtgaagtttaatataatattaaccacactttatgcaaatgcttgtttaaactgactactttacatgtttttaatttgttattgggccatttgaacaaaacttatgctcttcggaaatcacaagatcataatcacgtttgttaacatttttagtataaactttgcttatcacattaaaccttgtacaaaacttattcacattttatttctgatttttttttgtttaagttaaactttgcttatcacattaaattatatacatttggtaatccttattgtcaatgccactatatatgtgaatttgctttatgtacaaggaacaagataattaatgatttgaaccatttttctttatatttatgaatttagggtcacttgaattggtaaacagcttcgaaattaagaaaaagatatgaacctccttgccggagtcaagaattggaaaaagttgttagtgtgtgtaaattgctagtaagaattttaatacactctttgcagcatatattgaagattattattcgaatcgttgattacgtagaaaatgccaaagaagattagtcacagtcaccccatgaaatgatgggacaaatttaaacatagaatattaccaacaaaaagaaagaaaattaatcgtaaccgtaagtaatccacgtgtgacgtatcttagtcattcaaaggcgaatgaatcaatgaaatacaatttgatttgacaatgatagtcgcctcttcaaagttttagttttgagtctgattgaggagagaccgaaatgaagtgtttacatagcagtttaggtaaaccgcctgacgtttgaatataatgttatgtttgaaaaatgctttttgtggtattgaatgacatatacaaaaatgattaagatgttggttgttgtcactgcatcgtttatttgcatcctggttttgcacttacatgtagaatattaatattcatgtatatatttacaaattacaatcataataacattagcatgtatattaacatatatagactagaataataatcacgataataacaatacgataattctgatagtgcgtttggctctaatgtagcttctacgtgtaaaggtatctcaagtcataagattcctaagctttctaattatgtaacattttccaacccggacaaggtcaaccatgtttgtcgtcttccattattttagtcaaaagattacaaaaataaaaaggaaattaagaaactaaactaggtgatatcattgggattatttgactcaatgcatgtctaatatgtttctatattatagaattggatatgaatgtttgactgtgtataaccaaagatgctgcagattctttgatacacacacgtataattatacaatatcaacgtaacacttgggtgtgacgaagataaaacacttttggattttggtggggtgggtggagtaatataacaatacgaaacttccccaaaagctgcagttactgacaacatatgagtcaaaattttcatatcgtgtagagcgccaattcatgagtatgaatgccacgaaatagttgaggatcttcaactttaatttaccggttaataatcgctttaattaaacactaaaatcatgctttaccggtataaatattttacgtatcctattttttcaaggattttgtttttcgagagatgatattggtgaaagaaagaaatcgagattttcagcactatagcagttggaagtatattaatactggtgtagtggtgttcatttactggaattatacatatacactatatatcattttatttataaaattttgcgcaatatcgatgcgaccataacatatattttgataggtttttcgtgtaacaccatttgaatttgaatacaaaactacatgtaacagacgcgtctccctcaccataggttcagtcttctagattcttaattagtgtcacataaaattttgatgcaaaaatgttaatgggtcgggtttaatttttgaatttgggcctaactaatatataggtctccttttattatgatgtcttctgggctataaaactcttctttagattaaattgaattcagattgttaatactccggaagaccattaatataattatataaacagtctaaactctaaaccacacatcgtagtagtttttcatatacttccaatatctgttcaaacattcatattggatgggaataaatgaatgactaacgtatgtgtcagaaaaacttgtaattatcaattgatagttaggatttaggacaatacataatgaatgtttttccgttacatatcaccttacgtttggacaccacctcttaacttattatgtttaatttatattccaactaaaaatattcattacaaattttagcataaacatcaaatactaaaaataaagaaaatgaaaaagcttgattaataatttttttttggtaatgtttgattaataaatatgtactttaattaataagactatggtgacatgtcccagtcctatggctcattaacagtttgtatacttttgaggaggcaagacgtggaaaccgctcttcttctctaccaaaaacttcttcttccttcgatgtctctctcatctgttacatatcacaatcttttgctttaaattgagatccttcttcaaagccgtatctctttctctagtgtaattctcctctgaaattcagccttagttcgtctctttcgttctgggtttctctgtaattgtagcccaattccaatcctgggcatgtatttcaaagtgtttccatcttcttttgtcaaagttgaagactttgctcgttttgaatccgtccgctagtagaatcttcttctttgaatcgattttgatatctctgctttatgggtttccacacttttgccagcaatgtctaagcttccaagaacatgcctttgactagattttcccggtaaagctttttgcttttacttcttttttcctggcacgagaaattaatgggttcagttgatgaggttgagatatctaagactagggtttcatgtcctcctgctctctcaacatctcataagattctcatcagtgaagagaaacctaggagatggtccgagagttcgttgcctgatgtctctaataggattaagcttttgaaatttggttccccttctgctagactcaagagaatggctgaggaaagagatgaagtttcacgctctgtcaacagctcaagctctagcagccacgatgtggtgtcttcccggaaaatcgagtgggcttgtttgatgaaaatgggtaagcaatggctacagaacccgttgaacatggttatgtttttgtggatctttgtggttgctgtctccggtgcgattctattcatggttatgactggtatgttgaaccatgctttgcccaagaaatcacagagagatgtctggtttgaagttaacaaccaaatcctcaacgcattgtttactctgatgtgtctgtatcaacacccgaaacggttttaccaccttgtgcttctctgtagatggaagcaagacgatgttacaacgcttaggaagatattctgcaagaacgggacttacaagccaaacgaatggatacacatgatggttgttgttcttttgcttcacttgaactgttttgctcagtatgcgctttgcggtcttaacttaggctatagaagatccgagagacctgccattggtgtagctatatgtatatcttttgcaatagcagctcctacggctgcgggtttgtacactattcttagtccacttgggaaagattatgatcctcaaggagatgaggagaatcaagtgcaggctgtgggagaaggaccggttagtaatcgcaagttatctcttgaaaggagatattcatttgcttctaatgatgtgagtaatcctgaatggagagagggagttcttgacatatgggaagatatttcattggcttatctctctctgttctgcactttttgtttgtttggttggaacatggagaggattgggtttgggaatatgtatgtgcacattgcgacttttgttctcttctgtttagctcctttctttatattcaacttggctgctataaacattgataacgagatggtaagggatgcacttggatatactgggattgtgctttgcttgtttggtttgctctatggtggtttttggagaatacagatgaggaaaagattcaagttgccgggctataacatctgttgcgggagacccgcgattgctgattgtacactctggttgttctgttgttggtgctctttagctcaagaagtccggaccgcgaattcttatgaaatagtggaggataaattttgcaaaagaagagaagaaaatagtaagattgatgatgaggttgtcgtatctgcattgcctcgtgaagacggtgtgtttgatccgagttgcttgcctaagaagatgaccacgacgatgatagctagctctactcttagcccgagcagacagaaagatgaaacttgcttgggagagaaaggtgatgaagctctaagtccaccttctcctccattcatacacagagaagctagttagaacttagaactaacagattttaatgaaagtttgttaatgtaaaaccagatatactatatctaattgaaagtaaagtttaaattcgttttggggtttatggaatttacgagttataaacaatgtaaaacaggtttagttttctttgaattttcacgtaggaatacaagtgttgtttgaagtgtttcagttagagaattatgtttcttctcatcatctcatgtgagcttaaccacattacgttgatttggaccttaaagtgaattaaaaaaagaacaacttagcattagttgcttatgcgatcaatggtctcatcacgaccctgatgagaatcgtgtctaccatccacgtaaaatcaacagctgataaagtattaaaactttggtcaagcgaacatgtagaaacgattttcttgttcatatttgatgcatgtgtagcaactggagttttagccaatgttttgtttgtgtagcaattgcagttttcttataattcttctaatttctgcaattcactgaatttttcttacaatacaattttttgccttgatatacatacttcataatacatcaacaaaacaaagaaatgtggcagcaattttgttggtgttttatgcaatatgcatctcaatggcaattaaattccaacaaacaaagaaaactgataattatttgctttttatttaaattttgtagtgtaaagaaaatgattgaacatgaatttttcaattccaaatttcttcaattgttgttgtcaattgtcatacctatgaatatatgtatgtccatgataattcattagccaatatatccatttgagagatgttcattagctactatttttcctagttgataaggtcttaattaattatttatttaaattgtaaatggtctttattttgtgctgctatttctactaaaaattttattaaagaagaagttgacaaaaaaataaaagaaaaataaaaaataattgatcgcactgtcaaaccaaaaaaaattgaaaaccctaaattggttgaatgggaaaatcgatggtcagattcgcagaattcgccattagactctcttccgagaatccaaccagaccacacagaccttctccttctccacggaacaaagtcttcgtcaagaagacgacgagagacaccacgtcacacctcgattactccaatctggttaagctggagaaggcgggatcgcactcgggttcgaatcccgctccggcttcgggttcggatcctattaaccgggttcccctcgctcaggtcgtcgaggattgcgtcagacgctggttccaggatacgctcaaggaagccaaatctggtgacgttggtatgcaggtcttggttggtcagatgtattgcagcggctatggaatccctaaagatgaaaacaaggttcacttttttgctctaatttttctgggtttaggttgttttcttatagttcttctagagttgatataaaggtttgattttttcgtctctgtgtctacattgtatgcctctgattaggttttgttgtgattggtctgaattagggttcttaaaatgtatgtggttagctctgatttgaagatgtgattgtgattctgattcagaatgtgtgattttgatctgtaaagggtcgtgcttggattaacaaagcttcaagaactagatcatcagcttggcaagtgagtgataagcctccaggtaataatatatgatagaacttgtgttgtttcaatcttttattgaattagtggaatcttgtgaattgtgtgttttatttgggattcttgttcttctaatgtcagggtataatgcaagcgattcagattccaatgataagaaagattgatgatcatcttttgaatgtttgtattgccattgactttgatttgttagtttctctctcctttgtttaactctacttgatttattcaaatttgaagcttttgtatcatcccaatggtcaaaatgtgcccctcaagttatttattaccaggcagtgaagtaattcaactgtgagtctgttgtagctgaaatccttgcattgccaatagatttttgccaggctttctcttgttctttgtccccagaagtagaatcaaacagtttgcaaagaatgaatctggaatctggaatctgcaatgtcacttgacaatttttctccaaggaatctacattcttgttctaaagataatctgcaactaatttttgggtttgaatggagtgaaaaaggtaaaagttaaactgagacagttttcgcatcactctaatgatggattatgttcatcgataacactgaattgtaaatattaagttcaccatctttcgaaaactgttaccattaagttctaaattctaatccgattcaaaatttacaaaaaaaaattgaagcgtacctaaacaaatagcgaatgtccgaccggaacaatatgatcatcattgttttcttaaaattgtagtgtgaaaaggttgaaaaagtgaataaatcaaacgaacggttgtagaaaatgaaggaaaagagaattactttggtcctataatcaaacgcggctaacttagtggaagccagtgagggtttctattcacaaaaatttcctttacgcaaagaatcccattcgtcatcttcttcttcgttctctttttgtcattttatatcattaaatcgtgtatttatatgttgctactcctcctttagtttctctacacaactagaccttgttcacacacatatactctgttttcctctgtttctctacacgaagaagaagtctttttatttcacaaaagtttctgtgatggctaatgtaagtaagatcttgtagtgcatggtttgctttaattaaatctaccttgttctaactgcactgttatcaagaaaatagaaaacaaaaagagcgatcgttgcaactagagtgttctttgcaaattatgcttgatgcaatgtctctgtttattggagttttgtttttgactgtttaaggatcaaaactagccgaaatgacagaaaattctcatttcaggttgtggagctaaaagtgaatttgcattgtgatgaatgcatcaggaaaatacttaaagccatcaagaaaattgaaggtaacaattctgtaaattttctccttatacatatatagccttgtaagattatgattatggtttatatttctaaataagagtatttgatgaaattacagatatagaagcatacgatgtggacacacagctcaacaaagtgacagtcacagggaatgtaacagaggaacaagtgattagggttcttcaaaaggtgaggaaagctgctgttaaatgggaccaagacaatcaaaccctctttaccaactagagtctttttgctttcctcttgatctatatgttctccttagcaatagttaggtctatatgtatgtctgctcaactgaccttatgcatcagttgcagaatacacgaggattttgtatacacgacaataaaatgcgatatagattctggaaatagagatcaatataatccacaaatttattcaacaaaaaatgcaaggaagcaacttttccgcttctatttagagtataaaattacaaaactgtcaataaaccacattttggagaatgaaaaatgaggaaagaattggaatcaagatatctccatgcttagaacctgtgctccagcttctcttgttctttgaagtactgagcatacctgcgttcatttgaaagagaaaaggttcagagagtattggaaacaattataacaattgagactcgatagtgacaaaatgaatgtcaacgtacaaaaacaattcttcatctagtcatctaaagtatcctgaataattgctatgagagtaatgataatcaaagatagggcaggtgaatataatttaaccccttgcgcaaatatctaaattcaatgaatcacataaactcatctgtttcaagtaaaagagcatcatcaagctaaaacactactagctcaacaattttttcaacaatcagaactcagaagtaacagaaacgttttgatagttaatggctatctttttatcatcatcatcatcatgaattcactatccctatcttataatgttgtcaagctagctacttctatcattctgcatattagttcctatagtattggtccagcagaaacatgagcatcgaaatcgacaccaatctatgcgaatttgtcacagaacaattgccctaaaacaatttttgctgtcatatccaataaaactatagcctaattgaatctacaaacttcgcataacaatcagattgttgaacatcataatcatcagatcgaagtccacatgattgatacatcaaatctgtttgttaattgcctagaccgagagaaagagaaaaacgtacgagtaggttccgacgacaggagcgacgaggagaatagtactgatccaattctctgagaccttgtggtgaatcttctccggaagatccttccaaagacccgtcatgatcttctgctgaaacggcgataacgcgtaaaccaccgccttcaatttcaccggctgctttcccattttcgacgaccaaatctccgatttcgataaatgcaactaggagacttttcaagccggctaatatgcatctctccgtcacaaaacgctgccgtttaagtgtaaaggcttttaatttcaatccacttaagcccaatggttagaatatgggccttttctttatgaatttgctaaaatccacgtggacggtagagatgctacgatgcagagagcggtctatggtgagggttattacacgagatcatgacgttaacacgggaaacaggttgcttcaaaagaaatcaattcattcgtacgggcctttaatccacgcgccttcttcgcatccccacgcgcagtcgtgtgtgatgatggctaatcctccaacgttaccgatctcagaccattccggtggtggttcccaatctcagcaacccgtatcaacaccggcgtttcgcacgttcctctctcgcctctcgtcgtcaatccgccaaagcctatcgcagcggcgtccatggttagaactcgtagatcgaagcgcaatttcacgtccagagtctctcaccgatgcgtattctcggatccggaggaatctcccttacttcaaggtaaactacgtgacgatcgtctccttggtgctcgcgctctcgctcctctcccatcctttctctcttctcgttctcctatgcctcttctgcgcttggatcttcctctaccttttccgtccgtcagatcaacctctggtcgtcctcggccgtacgttttcagatcgtgagacgcttggtgttttggtaattttgacaatcgtcgtcgtctttttaaccagcgttgggtctttattgacctctgctttgatgattggtttcggaatcgtatgcttacacggcgcgtttagagtcccggaggatcttttcttggatgatcaagaacctgctaacaccggcttattgtctttccttagcggagccgccacttccgccgcagttgccgccgcatcaactcctgcgtcaggtcgtgtttgaaggactctcttctctgtagacaacaaactcaattactatgattcttttattgtatttctgaatgcgactatgtaaggggaaatgtagaattgatcttcttggttttaagctgagaaattcttatgattcaaacattaaatggattcaacaatatctcgcattactcttccttagctctttttgtgacaaagattatggaatggttgattactattaagctttgagactaattgtgtttagtgtgtttagatgttgggaactaaaagtgtccgacgtaaaatggcagtgtcatcattccggctgttttaacgaatctcgtgtaaatacttttgtttttggttatggaaaatgacatgtgggataatcatcgagacaaaggagtaacgtaacaaagaagtttatcgtgaatgtttgttaaaatgcattatgaaagatttgaatattacttcaagagaaaaagtctatttcgttattggcagttagtttattgtttgaacgttacactctagtacagtgcataatatgctatgtttgttaagaaaaaaacaaaaacaataaaatgaaatcatgagattgttaaaccaatatgacccaacgtcccaattcatccgtgttctgactttaggttttctgcatctagatgttgtttgtattccaaattcatctttagagtttgagtctttgagatatgaatcttgatttacatttatatatattttttaaaatgaatggatttagacctacatatattattatgcaatagtcaattttcttataaataattaatattgttaagttattgagaaattcgtctaatacgaatagaaaattatttacccattttttagagtttggataaccaatagaagatacaacaaaatcattaatctggttacatataattaaataatatacatgtgaccttgagtttttgtttacttttgtttgttaaaagagtggccttggtattaaattgccaaactattcttactgatgatgattaatgatcatttgtgtatttggtaagacaggaaaaacttgggatttaaggaagaagcttgagacacaagcactagaacgtctagacgtgatatgaaatgacttgagttcaattcaactaaactttgttgaaattatgctaagtgttcggtgcaacaacttaattacctcaactaagtctttgctccctttcaatgtctcaacttcttctcaatttcggatggcgccaaaagaactagtaaactatttttcaagtttataacttatggcgtggaatataaaaaaacatgattacgcaatatagaaagtattcataaaactaataatgttttgatgggttaatatttaaaaaaatatcaagataactaaaacaacctttaaagggatactaaataatatcatttttactaacatccagatatttatttggcactcgaatcatttttaagaggtgtttaatctaatttctaaaccaacattatattttgaaaatggtatcatcatgatcctatgtccattaacatattttaacatatattttctgccaacatttttgaggttgatcaactcttaaaatagaagaaaactaaaccatggttttccatttgaataagtgtgaaaggaagcaagaaaacatagccaacgaactgataaagacacataaatatgttggtgaccggtaatttaatttttttcttttgaataatcagcacctaattcttccaacccctaaataatttagtaaaaaaattaaattcaatttactttaactataaaagggatatttccctcttcataattctctcaaacccttctctcatatatctcttaatctcataaacgttaatctcaaatttttcgtaatctcaaagcttaaacacacttaatgacgactgttcacacattctctatattattgttcttttgttcccttttctcggcttcattgattatcgccaaagtccaacaccatgattttgtcgtacgtcctcaataaaagttgcatgttcatattgactaatacactaattaaattcatcatcaagtagtaattgtcattacttatatttctgtgtgcaatcatttagatacaagagacgccggtgaagaggctgtgcaagacccgtaacgccatcaccgtcaacggaatgtttccggggcctacgctcgaagtcaacaacggcgacactcttgaagtcaaagtgcataaccgtgctcgttacaatatcaccatccattggtacattttacacatcttatcggtttacgttttgaaactttaccaatatgttacttttcttccaaaattaatagaaactttaaacaaatcaaaaataccacacaaaaaaagtgaataagctttatcaaactttctagtttttttttttaatgggtcacagtatatatatttatcacataattaagatatttcgtatatgataatttttttttgaaaaacaggcatggagtgaggcagataagaaccggatgggctgatggcccagaattcgtgacccaatgcccgatccgacccggaaagagctacacgtaccgtttcactatccaaggccaagaagggacattgtggtggcacgctcacagctcttggctccgagccactgtctacggcgcactcatcattcacccaacccctggttcctcttttcctttccctaaaccggaccgccaaaccgccctcatgctcggtatccaccataccataccggatttaaaattttccctatttgatgcacaaatttgttgaatctctaatctaattaacaaataaaaacttaaaattcaggggaatggtggaatgcaaatccggttgatgtaattaaccaagcgactcgaaccggagctgctcctaatatatccgacgcttataccatcaatggtcaaccgggtgatctctataattgctcgaccaaaggtaaacaaaaataaaaactatataatataattaagtacttgatgcattaaagtttctgaaatattttgtaaaatgcagagactgttgtagtaccgataaattcaggggaaacaagtctcctacgagtgatcaacgcagctttaaaccaaccgctatttttcactgtggctaaccacaagctcactgtagttggagccgacgcatcttacctcaaaccattcaccacaaaggtccttatgttaggtccaggccaaactactgacgtacttctaaccgcagaccaacccccaaaacgctattacatagcagcaagagcttaccaaagcgctcaaaacgcaccgtttgataacaccacaactacagccattctccaatacaagaagacgacgaccacttctaaaccaatcatgccggttttgcctgccttcaacgacacgaacaccgtgacgtctttctcaaggaagttcaaatctctccgtaacgtcgtcgtaccgaaaacaatcgatgataatttgttcttcaccattggtttaggtcttgataattgtcccaaaaaattccctaaaagccggtgccaaggcttgaacggaacccggtttaccgcatcgatgaacaacgtttcgtttgttctaccgtcgaatttctcgctcttacaagcacattccaacggaattcccggcgttttcacaacggattttccgtctaaaccgccggttaaattcgattataccggaaataacataagcagggctctgtttcagccggttaagggtactaaactgtataaactaaagtatggatctcgagttcaagttgttttacaggatacaaacattgttacatcggagaatcacccgattcatcttcacggttacgatttctacattgttggtgaagggttcggtaactttaatcccaagaaagatacttctaagtttaatcttgttgatcctccgcttagaaacactgtggctgttcctgttaatggatgggctgttatcagattcgtggcagataatccaggtaatgaacaaaagttgattatatctttagtaatagttacattttgatttgatattaggggaaataatgctgttatggttttgaaacaggggtttggttgatgcattgtcacttagatgttcatataaagtggggtcttgctatggcgttcttggtcgacaatggtgtcggagaattggagactcttgaagctcctcctcacgatctacctatttgctagtttcaatataaggagtcatttctggaagaagaatatttcagattttggtattgtataagaaaacgcaaattaatgaaaagagtaacggttttgagcacaatgttttataagtgatgtgatgattgtcagatgagataacagcgtgaatcaaagatagttgataacaatctttatatctcaaagaactatgtcagcgtttttagatattctatcaatttcctaaatgataagtagtaccataggaaataaaaaaattcaacttattaaagggtactcgtctaaaatatatggctctcaacttcttccatctcttgttatacttgtattatctcgatgcagggaagaagatccatctcatcaaataaacaaaaagaagcaaatcatttagcactcaaagcactcaagtttcagggaaacaagcgtaataacaaacaaataaacatgatcaagatacatttggaaatgaaagtacacacagagcaatgtaattttttgagacagttcaaaacacacaaagcaaatccagtttagacagggagatctctcactctcacacgtacacaagtcttgcagaatgcaattttctcatataaaacattaagaaaccatatgatgcatcagagatttacataccaaataaaataatcacacagtagtattcatatataaaaaagagtaggcaagaaaaaccggaaccttttcttagcttgggaaaaaacgctccttagtcgctacatcttcccattgaagcccttgcagccattcttcttctgcatttatgacaacattttgcttccaggcgctcctagaatcaagtggaagttttgttaacttcggacagcttttaatgttgatttccttcagtttcccaaaaagcaaaggatccctgtatatgctcttcagttgccccaaattcctcagagtaaggaattccagttctcgaaacggaatgacacctgctaactcacaagttttttgcaacctagattcctcagatctgcttataatgtgttctatatcgggtaagcataccacatatagagtagctagatgtggagcaaaaaccagccatgtcaagtccttgagaccagtgcagttatctaatctcactttgcggaggttaataaaggatatgtccctccgaaccctcggtccaactatctcagactcgttgctgcttgacccttctatctctatcttcggtatatgcgagtcttgaatttcgaggaagcgactactcgaaatcgttgcaagtggcactttgagtgactgataatatgactgctcatcgagagttaaaccttcggtgtagctgctgaacctcgtatccccaagaaaaatttccaaaccagaggagtttctcaaggttatagttaacagatataaatgcttcatggcttgtatctgcctcactagcttgtcagttatatctattccagaagcatacaatttcagaacttccaaattcggtaaatcatgtatctcatagatacgtttcagcatgtacgtatgctccaaattcaagtataacaggtttctcagtgcgtacaacccatctggaaggctcgttatcccagtgcatgacagattgagaaaccgtaaagagtaaagtggtgaaaagctgggcaactctatcaggtttggattcaaagaaagatctaataccataaggatcggcacatgcgacaaaaattcacgtgagatcttccttaatctgttatctcgaaggagtaaggtttcgagcttgggacagtgaagactttcgcatgcctcttcgatctgattgtatatcaaggacatcctcctcacagctttctggtcctcaatctttggaatgtctcttagttgagcattggcttccacaacaagaacattcttttgtttctggtcaccacatcctgatgatatccacagagccatttcgcgaaccacatcatgcatctttactttttctttggtttcactctccttcagtaaatatgcacgagtgagagtgccgatgattgtataacccttataatttatacctttagaaccaagtataataccctggcctacccagtactctatcaagtcatcttttcctatttcatagtcttcaggaaacaaggcactaaaaaggaagcaggacttggtcttctcacactttaagtcatcgtagctaaatttcaaaatggaaagaatatccgcttctatacctgagaaaacaccaacagcgtcatgccactcttcgatggacttcttgcgagccatggtctcgccaatgacattgagagcaagtggcaagccattgcactttcttgctattgattttgcaacttcgggaatctttggatgactttccaatgtctctttcatgttcctcgtgaacaaatcccaggcatcatcccacatcaaacatgttacctctatctccttatctacccccattttcccgcaaacttcattagaacgacttgtgaatgctattttacttccatttcttttaggaaccggaattccaatgtttgctaaatccaccttcgtccacatatcatccaacaatagcatatacttcttattctctaaagacctctttatggttgatgctatctcattttctgttttttgttcccatccctcgttgtagagatctagtctttttccaatgtcttcttgaatcctcttaacagttgggtttttagacactacaacccatattgcaatgtcaaaatcgttgcttactgtgcggaacttgttgttgatttgagagaggagggtggtcttgcctactccccccataccatatatacccaaaagcccaactcccacttccatcatactattccatgttgattcaacaattgcctcttgaccaactatctcctggtggaaaagcctttcctccacctttggtataggacctttttgagcaacttcatcaaaaacgcctttagatagaagattctcaacatcttgcaacttgttgattacacttttactatagtcgtagctatatttacatctcttagaacaatattggccacaacataaattatctatttcttcatcgctttgcgagaggatatcatgggcttcacataccctactttcgacctcagaaagccattgttggacttcatccaataggtttagacctctatcttcttgtaccttaatccttttcaacaaatcatctcgtcttgcctccaactgtcgtacagttttctttagagccgctacatgatctacgaggttgcggaagcgattttggttcctgctaaggcagcttgtaaggttattaacagcctggtcacaggatattgccacagagaagcaggctcccatctctcatagattctcaaattcctaccagagagattaatatacaaattcctttcctaatgttttagtttattaactgaggtgtgtgcacgatcattcgggttgaccaccaatcttggcatccagtcatctacgactcgatcaaatatttatgttattttaaaaatgaactgtaaccaagataacatttttttcataaggtcaacgacccttgggatgttaacagagccaagtttagtgagcactatgtgctcgttttttcttaacacaattctaacgtggtttggccaagccaagtcaacattttacttacatctcgttttccaataatggttttgtaatcgataacctaaatcattgtaatgaatgcgttcctccctatcgatcctaggccttagacaatgctgaatgattcatagccacgcgaataacctattcatactaatatggaaagaaagaagccaaacttacagagctcttctcacggtcgtcgaagaaaagagagtctacagtcagcaacaaaattagtgttgccatcatggcatcatcttgcagctttttccgcacaaataatttatcatccaaatgttgttcactaaaccaaaaacaaacaagcattacagcgaagaaaccaactcgtagatacagatttccaaattcatgccttatttagaccaataaaaactgaaatttctcttcagcgaaaaaaaaaacaaacaaactgaaatttcatatagatccagaagatagaaacttgtaggctcaatcgactagactagaagatgctcacccgatcgtgcttgagatagcgagatagtagcaacaccgacggtagaaataaaatggacgacacccatccaatgggctaatttagattaacgggctttaagggtttgataatggatgttaattaactgaggcacatgggattgtatcacgtaggcaatgggtttgataatggatgttaagtaactaaggcccatgaggttgaagtacgtaggcaattgcgtgagcttacgttagcgatgccgttagagacacgtagtggatgaagtggctttggttagcaaaggacacatgaggcacatgcaaaggctataaatgactgctgctttgctacaacttgcgattcccaaattttataaggtaatggaccctatcacctctgctcgaagctaagccacccaagtttgagcttcaccatttgacacgtctctagctaatacttaatgcttaaactttaaactaatacttcatgtttaagacatttctggctgacacatttatgaattcgctctatgtcgtacgtacaccggaaacctttaattttacaatattaaccgtgatctttttaaaaatatctatataaacgataagtatctcatcaaaacaaaattgaataatgtgcacgtttgtaaaaactagaaaaacaggcaataaacatcatcatccaattacacatctagtaagtgtgatgcagtggcaaactggcaataaaccaagaaaaatcgagaaagagcagatgagacagtgttgtgttgtcagggttaataaaaaaaaaatgaagatattttaaaatttcataatatttaaataatgaagtagttttatgatcttatccataaatcaattttaaaaaggtttaaactttacttttccgtatcaacagcgtgtttcgagaagattcgggaggacactcgtcgaacggaaaagtcgtctaagcctttatgttcgaatcaaaaactgacacgtaaccttgctctcaaacagaaaaataaaataatgttagaaaaatctagagaaggctataaatactccgtagatactttgtcttccttagatattttgatttctgctaaagctgtctgataaaaagaagaggaaaactcgaaaaagctacacacaagaagaagaagaaaagatacgagcaagaagactaaacacgaaagcgatttatcaactcgaaggaagagactttgattttcaaatttcgtcccctataggtacgttgatttctgatttcttacaaattttcaattaatttctctgattaggtctcgtcaattggtgattctagggtttatcttcgtctttaggttttcgattatttccttttaggtatagctgtgaaattgggaaattttaggtgttcctaatttgataacaaataagtaaatcgatctgattttgaaccaagtttaagttctcttgccttatgtttcagcttgtgttctgatattgaagtgttgttgtattgtagattgtgttgtttctgggaaggagatggcagtttatgatcagagtggagatagaaacagaacacaaattgatacatcgaggaaaaggaaatctagaagtagaggtgacggtactactgtggctgagagattaaagagatggaaagagtataacgagaccgtagaagaagtttctaccaagaagaggaaagtacctgcgaaagggtcgaagaagggttgtatgaaaggtaaaggaggaccagagaatagccgatgtagtttcagaggagttaggcaaaggatttggggtaaatgggttgctgagatcagagagcctaatcgaggtagcaggctttggcttggtactttccctactgctcaagaagctgcttctgcttatgatgaggctgctaaagctatgtatggtcctttggctcgtcttaatttccctcggtctgatgcgtctgaggttacgagtacctcaagtcagtctgaggtgtgtactgttgagactcctggttgtgttcatgtgaaaacagaggatccagattgtgaatctaaacccttctccggtggagtggagccgatgtattgtctggagaatggtgcggaagagatgaagagaggtgttaaagcggataagcattggctgagcgagtttgaacataactattggagtgatattctgaaagagaaagagaaacagaaggagcaagggattgtagaaacctgtcagcaacaacagcaggattcgctatctgttgcagactatggttggcccaatgatgtggatcagagtcacttggattcttcagacatgtttgatgtcgatgagcttctacgtgacctaaatggcgacgatgtgtttgcaggcttaaatcaggaccggtacccggggaacagtgttgccaacggttcatacaggcccgagagtcaacaaagtggttttgatccgctacaaagcctcaactacggaatacctccgtttcagctcgagggaaaggatggtaatggattcttcgacgacttgagttacttggatctggagaactaaacaaaacaatatgaagctttttggatttgatatttgccttaatcccacaacgactgttgattctctatccgagttttagtgatatagagaactacagaacacgttttttcttgttataaaggtgaactgtatatatcgaaacagtgatatgacaatagagaagacaactatagtttgttagtctgcttctcttaagttgttctttagatatgttttatgttttgtaacaacaggaatgaataatacacacttgtgaagctttatgggccttagtgtgtctcacaatatttgaaatcgtaagaggaaaaactatacgatctccacaaaaaaactcatcattggattgagtcttaggaagttctctagggattagagggcagctttatttaacattaagcagctcgacatcaaagaccagccaagagtcagggggaatgctaccagcaccttccgcaccatacctgtgagccagacaattttatcatctctcattaaaaaaagcttaaaataaaacatcacattatggaaaaataaaaaaagatttgcaaaggctttaccccatttctggaggaattgtaagctttcttttgccaccaacaagcattcctttagaaatttacaaaaagagatcaaaacaacacaccatttgaccatatttagtgaagaaaaaccagtaagaaactagctaggttaccattaaggccaacatccaatcccttaatgacttttccagcatctgtatgtgtaacagcaagcacataagtatccaagtaccactcacacattaataaagctcttactttcgcatcaagttataataccaacctagacgaaacttataacgtgattttccaacggtggaatcgaaaatcttcccattcccctgaagctttccagtataatggacacttacctgcactcagagacaatagactgacctccaacaaatatttgcacacaaactacaacagtttaggactaaatgctcatacccttttgccaggctcagctttcttgccgttggggtttcccatgcataactcttcaacaatgaggccatctaggtcaggcgtttgcttctcaacactaatagaaaaggctttactctccactgtagcttcctcacttatcttctcattcttcttagcagattcagatggggacatggagctttcactcctgcaataatatcaaaagaaaaaagcatagaaatttataagatgggaaagaatttgaaagaaccatttacttgtgagctaataatatcgaataccaataacaaatgtactaactgatatatcccaaatgacatgactacttttgattaccccaaaaagaacaaagtacttaaggcagaagaatggactgaagtcaagtagccaaaggaaacctcaagctgacttctattcattgttttgaaaagagtatgccggaggatcttatatatgaaggaatttagttaaaaccatttcaataagaaaagctaaattttacagtaatatttgaattgtggttataggatacaaaagtgactggagaaggatagaaaagttaatttacctgctttttggaatggctgcatccatggcagaaggatcttggagaggaggaataggtttactgaaattgacgcggcggcgaatgaggcgtataggtatttccggtttggcagtcacccaatacagctaatttgcgtcctcgcatgtagctcccattaagttgagtcacggtatcagctacgtcttttccgtgaacaacagctctaactgagctgaaaaatgatcaacaaaatacacaagtctctagtcgttaaagagtaataattttaaataaattgaaagttgggtaacatgggagaaagaagcctcaaacctctctttgacaaaatggaggcgtatgatatttccatatggagagaaaagtttaaccaaagccctcgagatttgactcttcctaagcgaagtatcatatccttcaactcttacaataaccttactgcagtaataggatattgccggagatgataaacattattattatcaacaaatcttatttttttaagaaatcagtgtttactcgtttgcgtgtgccggatacggataagcctcaacagagacattccatcctcccacgttaacttgagctgatgagttggaaagaaatggaggaggaagaagccaccaaaacctgttgagaatcgtattagtctcatcaaattttaagggaatataaatctcccagatctctccacatgaagagaaatgttctgccaacgccgtgtagagatcatcaagcggaagaccagtgtcatatcccgtaaccttaatcctcccaacgtcactgcaataataataatactatcaacgtgacatctgaaaacatgcatcaccttacacataccaaattctcaatttacctcagttttggaatgttattccgtttcgctccctaaaaagtacaggagatcaaatcagaaacacttgcactgctaactaacttgcaagtacttttcttacaaacttgtgaagaaaccatcaattgagaaacaaagataagaaaccagagtgaatcagaaaagccataagagtagagtaccatggtggatgagaacatggctaaaatttgttcgacaagagcgagactcgataacccttttaacagatttaatttaggtctgaagagggcatttatagttgtttttttctttttattttgggccttgaattagttagccccatatggttcctattaagtatcttagagcatctccaacgggagaaaaatggagctctcatgacagtctctctaaattattgtggaaaaaaataaatcataaaggtttaatactgagagaatcgtttctcttaagagagattttggagctgaagagagacgcatacgtgtcgttgtttttcagtatttcttttttttttccgttttttttctctactatcatcttttcactgggactttgaggatcattggacttacctgaaacgagctggccgacgttgatttcggtaggcttatcggctctgagattcatggattccatactttgcaaggtttgttcttctaatcttatcgttcgtcttgattcatagaactgtttttgtttgttcttaaattcgattgtctctcggttttcattgtcctattgtttttcttttattttgtctgtctgggttttggacttttactctcgattgctctttgattctcgtagctattgaactagaatttgcaaaaggttgtggaatttgaggttctaattgtgattttaatgtggtgatttggaaaagaatttagggacattttaggttgattaagggatcttggctttgatttgagatacccatctaacgtgaagaagctagtgaagtatatttcaaccccacctgtggtaaagtctaatctttgtgtttcgatagtttcctttacggtgttttgtatctgactaatatcacttttgatggctaatagagagagcttcaggggataatccatttgggtgggtatttttctggctgtaccacttgcagtttctcaaaagtgagtgaaggaactcattttggttgattatactctgagtgaaggaactcattttcgttggttctgctcttctaagtgaagagggcttacaagcttggaaaggtgatggccatgtgtttagattgttggtgcatctatgtactttccatagatcttcctttgcaatcatttagtggtgaacctgatatgttgttatttcctgcagcaagtttccaacagagtaatatcatgtctgaccggaaccatacaacggaacattccacatatcgttttacatttctattgaccttgacctttatgttttaatttgtcaagaagtctactgcatttctattctctcctatctcattcctctttatttacttgctttcacatggtaaggaattgtgaatatatggtctcagcctctcatgttagacatttcttctatgattctcattttttctattgtgaataattttttttccagacaactcttttaaaagagacttaccattggactatgaaaaatctttcaaaaaaatcagaagctctcatcttacaaattcaaaagatttatacttaaaaaatggtgagatcccattaggaggctctcaccattggagatggtcttatgagttccgtgaagctctctcgttattcttacagggcatgatttcgtataatatttttaaaaaaacaaacgattgggccttgaatttttaattagaaagttaaacaaaatctaaaaacccacatgtggtctcttgttttttttggtgtgatggtcgaatatttctaaaaacccacaagatttattaactagtcttacaaattacgattacattttttttttacgttttatctcattgacagggtataatttataccgtataaatattattttcttgtagatcagtcttttcaaaaaatgtagtgggattactgaatgcattcctctataattaattacgacaattatcatagttggtttagaaaaaaatagtaaaattgcacgtttgcatgcctatacaattcgagtgtacatgaaacttgatgtagagtaccatacccatgtcgcaaaatattattatttattgaaaaaattacaaagtcgcgatgcaacaacctttgtactatatgatgagaatataatataaaaatgggcaacaagaacaaaagaaaatagagaaaaaaaggaaaggataatcttccacctaaacaagtccaaagaagattgcaagttgcaacatccacttgcttcgtccggcgtaagctctttgataaggtctctcaccgtcctccgactttctctctccatacatacaccacatttacatacgccatttacacatatatgacaaacccatcaacatctgtgcatgcacgtgtgctcatgcatgtatgtagtttttacttcgccatgatgaccatgtctatcttaaaatttaccacaatcaatcaatcatgcgcgttacagtcgtgtgatattcaaaaattgtacatgttatttctcataactatcactttagtagattaagatcagaatgtgcatataataagtaaattttaacaataacagcaacatattttactataactaatgatttatttaaaaaaaaaagataaaactaattctgaaatttcagttttttctatgaacaatttattaacagtattcatatgtagataaaccttgtagattctataatataaaatttatcaagatggaaatgagggatctatagaatacaattaattttggtgatatatattcaagataatgaaggaggcgtctgaggaaagaaatcatgggggcataagatggtacaatgtatcatacatggtcacacacatctatatgatacaaatgcgtctatatacacaactgtttctatatacatacaaacacaaagccttcacatccccagctatctctatccatctatcttcaaatatatatttttaaaaacacacaatgttcatatcttattgttattgttataaaataaaagatgatcatactttttaaatttctcaaacaaaaccaacttgacaaccgacagcgaacaagatcaaaaagctagctctcttcttttctcatcaaacttatttctctctcgatcgcaatatatacgattccataaattctcccaaaaacaaattaagagatagaggagagatcatgaggtcaccggtgcaactccaacacggctcagacgccactaacggtttccacacgctgcagcctcacgatcagaccgatggtccgatcaagagagtgtgtctcacgcgcggtatgcatgtccctgaacacgttgcgatgcaccacacacacgacgttggtccggaccagtgttgctcctcggtggtgcagatgatccacgcgccgcctgagtccgtgtgggctcttgtgcggcgtttcgataatccgaaggtttacaagaacttcatcagacagtgccgtatcgtccaaggcgatggactacacgtcggcgatctccgggaggtcatggtggtctctggactcccggcggtctcgagcaccgagaggctcgagatcttggacgaggagcgtcacgtgataagctttagtgtcgttggtggggaccacaggctcaagaactaccgatcggtgacgacactacacgcgtcggacgacgaaggtaccgtggtggtggagtcttacatcgttgatgtgccgccgggaaacacggaggaggaaactctaagcttcgttgatactatcgtccggtgcaaccttcagtctctggctcgaagtaccaaccggcaataatctcatctttcttatataaattgcaattatgtatctaattttttttgttgttctatttcttttagatgttcgatcttctttacaaggaagaaaatttcgagtaccttttctttctttttaaatagatatatcggcttagaaagaattgtaatttaatggggatttctttgggagatttatgttggaaatttcgaagtactgttgggggattcacaaaactttggatttggagggtgttagtactggtacataaaacattttaaggtgaatctgttaaatgaattaatccatttgttgttttgtacatggtatcattctttgtgacattgtttaatttcttgtactcttttaaatgttactcttaaccgtttttttcttttgtggtttgtaaatgaatatttgatgcatcggtattgttaatgatagacttattaatttatttcttcatagtatgtaacattactataagtttgttttttgttggttgatccttgtgtccaaatgttctaaatagaaaatataatacaaagccgatattctgatctaagaatcaattagaatgaagccaataactgttccactgtctataatattaccagagagataaaagttcagaaataaaaaaactccaattcgtttaactttaagatttatcgtcatcatggatcatattaagggaacatcaaattacctttaagtattgagtatatatattcgaattatctgtctattacacataatattctcgggacgtaacaatttattagaaggtactatatgtagatggaactgcgtgttaactaagagggaaattataaaccaggttatggaatttaaacctgattagcatgtgcatttacataaaacatatatattagacctaaagcaaaagtagacgtgcttaaactattaccaactagtctttcattggctactagtctggtcaagtggagattatcattttttattcccgtttgttttgttaataaattataaccaaccaacctagtgggttatatttaattcaaatataagtttttggtctactgttttttttttttttttttttgttctggtgggtttattataattcgttcgattcaaaatttgtatttaagaaagtctaaaaggacatgcaattaaaatttagctggaaacgcgttgcaacttgctagttttttctgcccctagtgggatatgatacaacgaacccttatgccggtcttaaagagttaatatttctttttatccaatttccttttaataataatacaaacaaggacaataacaaattatcaaaatcttgtcaaaagagtattatatatcatcaagcacactactatattattgattaaatgttgattagtgttattaaaattatcttactatataatattggatgtaaagaaaaacaaatgtataaccaatatcaaaactcaaaagataacaatttttatttttttttggtacgaatcaaaagataagtattaaatatcatagtatttattgctacaaaattctttatatttataatctattgtatcactttattttgtgtttggtaaaacatcctctttttctttcttttcgaacaaataaattgagataaacatatttgtactattctatcactatcatcgtgtcaccaccatattcaaatccatatatacacaaatgattaaaattttaaaagtaatttttgtttataatacacaaaaatgaagatacgtaaactatcgtaccacatcttacaaaattattcgtgacattttatcctttgttgtcccaaattagtgctgagatacttcaaatgtctgattaagaacggtaataatatttataagtggcgaggcccaagaattagctcaaaacaaatgggccgaaattatacatttctttcatattagtaaagcttttctgggagaaatccgggcatcaattggttaccggttcagtatttaagcctgggttgtgaattccaacataataccgaaccgaattgatcaaaacgctgcgttttgttttcagtcattgcaaggttactgcaaggttaaagcgggaagtgagcaacgagaggcagcggcggccgtcatggattcatcggcgaacataaacaaagctctaacggagacgcgtttctccgacctcgaacctccactctccggagatatcattgaggctcttaatcagtctgatttcgagttctgcactccggttcaagccgcgacgatccctttactctgtagttacaaggatgttgccgtcgacgctgccactggttctggaaaaaccctagctttcgtcgttcccctcgtagaaatcctccgtcgatccacctcattccctccgaagcctcaccaggtaagataattgccaactaatctggaaattaggatttttgtttcgattgtgagcttatctttgaaattaaattacaggtcatgggggtgattatatcgccaacgagagagctatcaacgcagatatataatgtcgcacaaccatttgtttcgactttggcaaatgtgaactctgtgttgcttgttggaggccgagaggtgaaagctgacatgaagattattgaagaagaaggatgcaatgtcttgattggtacacctggaagactttctgatattatggaacgaatggagattctggattttcgaaatcttgaggtacttttcttcaatcaaggatttgttttaagatagatgttgttgaatctatagcttggtgtggttatgttgtctaaacaacttaaaagtttagtttttttacttaaactgaatcgttttgcgtatgtagattcttattctagatgaggcagataggcttttggagatggggttccaaaggcaggtgaattacattatctcacgcttgccaaagcagaggaggactggcctcttttcagctacacaaacagagggcgttgaagagctcgccaaggctgggcttaggaaccctgtgagagttgaagttcgagctaagtcgaagtcggaatcatcccagcaattgacaaactcgaaaaccccttctggtcttcatcttgaggtagcataagttcaatatataattatgtaataatatgtttcagagtagttagttttcctgttgtatccttcgttatcatttagcattactgtgacctgatttacgaaggatttccttctaatttgtaagtatccagtagttatacgattctcttcgtagctctattgtattcccttctcttggtagcaagtttgttgtattgaaaatacctattgatcatatgtgttgcatatgtatatacttctttttagtagaaaccgatgttctatctttacatgtcctaccgatgcgtttcttagcggtttatttctccttgtctctacagtatatggaatgcgaagcagataaaaaatcatcacaactagttgatctcctcatcaagaacagtgataaaaagcttatagtgtaagtttaaatattccacacagacttatataaaatgaagcatccttataaatagtctaagtaacgctgcagattcttcatgacctgtgcttctgttgactactggggactcgtactttcaaaaattcctgccctgaagtccatatctttaattcctatccatggggatatgaagcaggtaaattactatgatagattttaattttccttatcacctcattacctattgctatttaaaggttttgatgaaatatacttaacacatcagaatgcaagagacaaggcattagcttcgtttactaaagcatcaagtggtgcccttctgtgcacagacgttgctgcacgtggacttgatattccaggcattgattatgttgttcaggtagattccaataatgttttgtttacattattatgacatctttgttgcaatatttaagattcagaggttcgaacatgttcatgcagtatgatcccccacaagacccaaatatgttcaaccacagggccggcagaactgcaagattaggaagacaagggagggccattgtgtttttactgcccaaggtttagctttgaccactttatgttctcttgtgcaccccatagttacatcagaaagcatgaaaagctgaaaagttcacttgcatatatgtgtaggaagaagcctatgtagagtttatgcgcataagaagagtccctttggaagagagaaaatgctctgaggacgcatccgatgtcatcccgattgtaagaaaacctccatatctctctctctctgttgcacacaagaagggtcgctctgtctatctgtgtgttaatcacattgtttattactacaatgtgttcagatacgttcagctgccatgaaggaccgagcagtgatggagaagggattaaaggcatttgtttcctttgtccgtgcttataaggagcatcactgctctttcattttcaggttcattcatgaggctcagtcatttttctgtttctcaaaattctttatcgctctatcagttttgtaattgaaaagtttttttttttgttttgggtcttaacttacagatggaaagaccttgagattggaaagttagccatgggatatggcctcttgtatcttccttcaatgtctgaagttaaacaacacagactttccagtgagggtttcacaccagttgaaggtgtcaagtttgaagaaataaaattcaagtaggtttttctaccataatccctaaacatttatgatatatatccgccttctcccattcccttagtttccgagacactaaaaatctgaaacttgatacattcaactcgtctacacgtacaatgaccatttttagatttagaggaaacaagcttttgtagtgtgaagtctttgtacatccgtgtcttcaggaatcatatgctttctgagttgacaagttggcatttctctaaacctgaatgttttgaatcaacgcagggacaaatatcgggagaaacaaagacagcaaaacttacaagtaaggaaagagaaacggcaagaagagaaaaaagagaaaggcaagagaaaaagggttgatgcttctgctagtaatgatcctaagaaagcgtcgagaaagttaacggggaaacaaagacaaactattcaaactgctgaagatgaagaagtgatggatcgagattataagttgatgataaaagtaaagaaagggttaattaaagaagatgaatatgaaagacttacaggagatgatgatttattctgatgagaagaaacaaaacctgcatgctgagattggactaagcttagtgtctttctactctcatatcatatgtgattctgttaatttttttttttttttttgggtgagaattaatatcggatcatgttatgtcctttttcgttctacgagtctcacttttatatatgtttcctaataaatttagcaaataaattgtgaatatatctatagagcaaattcgatcttcataggagagtgtgcacgcttgcacatgctagtaaatgccctccataataataaattaacgactatcaccatcactaaggtatttcatgacacaacaaaaataaaaacaaaaatctctctgtatcatcgtcttcttcgtcttttgccgttgacttgtttgaattttcgcaaatccgtctctatccaacgaagaagtcatgtcagtggcaccaccagctccaagtcctccacctttcgatccgactaagccatcgacaccaatctctttcccaatcaaaactcttcaagacttgaagtctcgctcttacttcgattcctttcattatccctttaaccgttcctccgtacctctccgtcggaacattggcgcgttgtcggatcgacctaggctcttggtttgtcatgacatgaaaggaggctacgtcgatgataagtgggtacaaggatgtggaaacaacgctggttacgccatctgggattggtatttgatggacgttttcgtttacttctctcactctctagtgactcttcctcctccttgttggaccaacactgctcacagacatggcgtcaaagtaagtcaatgtgttgacttttcaaagtttagctgatttatatagttaaagtaactcaagtttcgatcattgaatgtaagtgagtaaagtcgttgcaagtcgtagaaaaaagttgaactttgattagagaggaaatgaataagtgatagggagtttggttgtcttggtctgtgaaagcagagaagtacaattatggttgttataaggaatgattcattttcttgtgtgtgttttatggaaatgttaaggtattggggactttcatcacagaatgggacgaaggaaaagctacctgcaaagagttgttggccacaaaggaatctgcgcagatgtatgcagagcgtttggctgaacttgctgctgctcttggctttgatggctggctggtgatttttctttttgctatatatggatctctttgttcagcaatattattgataatttactttgcttgtgaattgttacttgcagataaatatagagaatgtaatagatgaagttcaaattccaaatttgatggtttttgtaagccatctaacaaaagtcatgcattcatctgtacctggaggtttagttatatggtgagtgttgagaagcttttctttttgtcaaaatcattcatctgtttctagactatactgatcttttctattactttttttttgtaggtatgatagtgtcactattgatggtcatcttgcttggcaagatcagttaaccgagaataataaacctttctttgatatatgcgatggtatattcatgaactatacatggaaggtttggcctttcacttcaatcaatcacttcatcttcattcatcttatatgttttgattgtgatatgagtactgagtaggtatctctttcaggagaactaccccaaagcatcagctgaaattgccggtgatagaaaatatgatgtctacatgggaatagatgtgtttggtcggggaacttacggtggtgggcaatggactgtatgtatctttattctaacaaattcattcaaccagtagtctgcaatgttcaagctgcatataaagtttttatacgtttgttcaattcttttgtattgtaggcaaatgttgctcttgatttgctgaagagcagtaatgtatcagctgcgatatttgctcctggatgggtatacgaaaccgagcaacccccggatttttacacggcacaaaacaagtaatacttgcaaatggccaaatgtgatggtaaaattaatctttgcaatcttattcatcatatgttatctttctttagatggtggtcacttgttgagaagtcatggggtatagttcaaacatatcctcaagtcctacctttctactcagattttaatcaggtgaagtcaaactttgttcccaatgaatagatgcaaatgagcatggctattctatgttctactgagttttgaaactctccacttgtttattatatagggccttggttctcatacctctcttggaggtcggaaattatcagaagctccctggtacaacatctcatgccaaagtctacaggttcaatggtcactccttgttctagcttttattgcactagagctcatttccttttttgtcacatttttaatctggacttatctatataccaatttgataatttcttctgctgtgttctttgtgacagccattcctagaattcaatgaaggaaggaattcagagaccattcaggtcactgttgagtgagttctgaccctaaatccctaatactagcctcatatttgattttcaagaagcttaagaagaaattgttttggcatctaacaattaagcacacatatatgctagtggtcgagaagcatcttataatggaggagggaacgtcagtttcagaggaaaactaaagagaaatgcacatttcacagcaagactattcaaacctcagcttcagctctctgctgccccaatctcaatcttcttttctgtaagttaacgcataagatttgagctcctcctcatctttacaaagtttcaatctttaagttttactcatcatgtaagtctttggactggtgcaggtgaagtcagataaaagatccgagctaagcattctgctccatttttcatctccttcacaagagaaaaagtccatgcttatggtgccaaatgaatctatcaacagatttggcgacatgttcctgccatgtcttctcacatcaaaacagaccacatccggttggacagtacacgaaacaaaccttgttttagatgggcacacactgactgagatatctgccttctgctccagaccagatgatctcacagaagaaacaaacacactagagtattttgcattgcttggacatatctccatcaagagccagcaaaaagccaaggtttatcctctggcgtcatcatgggttatagaggctcatcacgtaaagtttgtaccgggtgattctggctccaagaccttaagttgtaagctagaatggagattgaagcaccctgaagaagattctgtctttccaaagtacaatgtatatgcagagaatctgagttcgagtgagtatagaccaaggaaggttatggaagaaccaagaagcgagaaagtgtttcttggaacagctcatgttgatgcttattatgtctctgaaatggtcgttggatcagatgtgaagggagtccggttcgtggttcaaacctgtggtgaagatggttcatggcaggagttggatgcttcccctaaccttgtggttgaagtagagcgtgtgagttcaaagctttgttgttgtgggttgatttgaattatggttcatttccgaacctgcgatctaataagaccattgatggtttgtttagtcagttcaaggatatgaaccatacgataatgaattaatgattataaggttgataataataacaaaccttttcatgcacagattctttgccttgtggtatatgttggtccttatctgaaagattcaaaggacgacgactagtctcagtttcactctcaacttgttcattccactaaaaccgacaagtcaacacaatgaacataaagaacaaacaaaaatacacatccaatggaggaagaagaacaatttactgctccaaatgaaacataacaaacgagcttagctttctagttttagtaaaagttctgggcaacaaagtaaaaacagagcaggacaaccaaaaaattcataccagaactatagattcgatgataacaaagacgattaacaatgattaaggtttatacatattttagcactcaccagttgaaatctgaaagcgtgaatctagtttttgcctaaggagaggaaaagtaaataataacatagctagcaacatgtctactatttcattttttttttgcgtttctaaaccaatcagaaggctctatttcgtacccactcgcagaaagagcgcgttgagcgagtgagagcgattctgtgggtaaacccctttccaattcatgcctttttgtatcgacgcatttctctccaaattctctatcgcgtgactttttttgtttttttctcaaaaccaattgctaaccggaccaaaatcatttttaatttcaaaaccaaagtaaaccaaaccgaaatcaatttcaatttgcaattctggacaaaaatttctggcagtttgcatgatttcttaacaacttaactcaaaatcacaaactatgaaccgatagaaaaatttacaaaatcacagtaatctttgatcattacaagaagtgtaggaaaggattaaacttttaaattccaaaaatctcagaatcaaggcaaagaagattcctgaagatttttacttccatgacatccaatagaggaagaagaacaaaccattgattcaattaaaacattgcaaacgactgaacgagcttagacttactagttttagtaaattccttggcaacaaagtcaaaacagacatggacaaaaaaaaaaaccaaaaaaagaactgtagattcgataagaacaagcaagatttgtaataattaaggttcataaagattagactcatctgaaagcatgaatcttcgtgttcgccttttagttctaacttacaatttccttcttttatgttctttggtgtgaggtcgaagaaaggagagaaatgactatgagtgagtggtcacgattcgaaatacttctcgatgaacttttcccaagttaaaataatggggtaaactaagaatatttcgattattaagaggttgaagttgtaaattaatttacgacatattaccaaaaatacacagctcattaagttaagctaatctcaacattttaatctctttatttgaatcaattagtttcataacctttttagtaatttcagtacttttattttgtagattaaacggtatcgttagcaagccaactacaaaaacggtgtcgtactagaatgggccgtgagaatgtgagcgactcggcgagattgaagattatacgacgtcgactatttttaacgacagaatcgtaccaattttgaaaaccctaaatctcaatcctcgacgctctctactaagaaactcaatcttactttctctgtaattcgtagcttccgaaatcttttctcaagaatctcataaccatggcgaatcctgctccgaatctagaatgtcgtatgtacgaatcgagataccctgatgtagacatggcggtgatgattcaggtgaagaccatcgctgacatgggagcttacgtatctctccttgaatacaacaacatcgaaggaatgatcctgttctccgagctctctcgccgtcggattcgtagtatcagtagcttaatcaaggtcggtcgtaccgagcctgttatggtccttcgtgtcgatagagagagaggttacattgatctcagtaaacgtagggttagtgatgaggacaaagaggcttgtgaggagaggtataataagagcaagcttgttcactctatcatgcgtcatgttgctgagactgttggtgtcgatttggaggtatattcattcatacgattctctgactcttctcgaatttgtttgaatgtaggtcaatgttcttgaactgaaacaaggtccaatttctgaggaaaaaccttcttttttgtaggagctatacgtaaacatcggttggccattgtataagaagcatggacatgcttttgaggtaatagttccaaagattttattatgtaatagttggcccattgtcgtttgtacgaactatgttgtgatggtgtgtaccttggactgtgtgtttcaggctttcaaaattgttgtcactgatcctgattcagttttcgatgctcttacccgagaagttaaagaaactggacctgatggtgtggaggtaacaacactctttgccttgagcagccttctctatcattgttttaatttgatcatgaagacttataacat

SEQ ID NO: 697 - DNA, 57892 bp, Arabidopsis thaliana
atcttctgtacaggtgaccaaagttgtcccggctgtgtctgaagaattgaaagatgcatttttgaaggacattaggaggagaatgacaccacagccaatgaagattcgtgctgatattgaattgaagtgttttcagtttgatggagttctccacatcaaggtcagtcttttcctttttcttatctgttttttttttttgttttctctgtttgttttctacttctagctaaagatgtttggctattattatgaatttacaggaagccatgaagaaggcagaggctgtaggtactgatgattgtccagtcaaaatcaagctcgttgctccaccactttatgtactcacaactcacacccattacaaggtatgtttatggttgttgggtgtgctcctatttataagcggaaaccgttttgagatacattgaggattacatagtaacattgacactttcttgttctgactgagtaggaaaaaggaatagtgactctgaataaagcaattgaagcatgcattactgcaattgaggaacacaagggtaaacttgtcgttaaagaaggtgctcgtgcggtaagtcttgtagcctttttctatgactagttgactgaatttgctacttcagtcactccttttcttcggttccgtgactttaatgtgctacaacatttttaggtgagtgagcgtgatgacaaattgcttgctgagcacatggctaagcttagaatggataatgaagaaatgagtggtgatgagggaagcgaagatgaagaagaagacactggaatgggagaagtcgatatcgatggaggtagcgggataattgaatgaacaaaagcaaaagcattgtaactgctgtttctgctttagatcctacaattttgtttccctttgagcaaaaacagtattttttgtttgaccccaaacatggttagtagtacaagcatctcttattcacgacaagtgtttcataacattggttatgataagctgctcaatagtgttgagctctgagaatgaagacgaagtacaagaatcagatgaactgtcctgggcaatctccccattagccgcaacgatggtgcgggaataacagctgaattcatcgatatagctaagactctgttttgtgctcgcttcaccagccaagacattgtgatcttcaacctccatccaaccctctgagtcttgtctgctataaacttggatcaaagcctctccatctgaatgtgtctcattcaaggcgtgtgaaacattcgtcacgagcatatacgtatccttgtcgttggttaaccctctaagagtagaagtgatcactgtaagaggatatgtccgctggtgcacgactcgattcaccggtttacccgattcagaagtcacctccacgatccgttcggtcttcactctctgctcaaccctcttgtatgttccgtttttctcgaacctcaccaagctgtcaaccttgaacatgctcttgaccatggtggtcagattacctttacttgatctaacccagccatcatattcactacttacctctgcttcaaccttaaacgacccatcaagctgttcaagctgttcttgtctcatcatatgccgactcgggctatcataaagtctagacccagcttcaacattcgaagacccgtgatctaaccagaggtgcaaattagcgtccacaagccagtatgatatcccatcgttgaccccaaacgcaaactcatgagactttccatctaaaagcaacccgagaaatggcgtcaagtccatgtcataggaaggtagattgaaggcaccgattgctacaactggttcccagaacaagggattgattccaccagtaaagatcaccggaaatggcacctcggatcccacgtatctcccatctatcttaacaaaaacttcccggtatgcaccattgccacgcccggttgttagattgttcgttctgatataagaatttggcgggtttgaataccagaactcatcgtttccatggaacgatacatatagttccagcacaatctgacgagtgttggacggaatttgaattccttttgagtaagtttctctggggttctcgatcatgaaccagaaccctctgttccctccgtcacataccggaattatcaaatccgcaggggtttgatctcttttctgggaatccacaaaccctaatctgttactaatcttcaaatttgacgcaataggattgaattcgtagaagatgagggtgacattgatatgatagatgcctgtgtaaacatcgttgactatgttctcaagcatcattgtgacatttaaatcggatctcataaagagcgaggaatacctagagacgtctttccgaacattccagaagattccggatggactcggctccgccgtactggtgcgaagtagctccactccgccgagccacaagccggagatacgatcgtactgatcgccactcgaggcggcgcgtaggtcaagtacaacataagaccacggcggcgatatgcagctggaagggggagtgtatggagtggtaaaaggaggtctgttgatggtgttggcgaatgaatggcggaagaggacatgcgagcatgacggcgttagctgatcggacggtaggggccgcctgagctcctcgtactcctgaggctcgaccggtgaccggagacaagtcgaagccgatctaaggaatcgatccggcgaggaaggacgagaaacggcggtagcagtgagaaaagcaagtgtgaagaagaacttaacggcgccgttttgattttctggcatgatagcttctgtgtttttgattatccgagctcgccgatgcgaacttcaatggagactggagagagagaagggacgtaattaaacaccaaagcgtttttatatttcggagaatcaactacgtgtcgtttgacatcctaaattggcagatagtagaaaggaaatgttgagactggagagtttgatagtaacagtgtggggaccagcgacggtaacggaattcgaaatttattttagcgtcacgtgtggttacttataatctgtgcacgtgtcaaaataagagagggctactagtgacactttcgtcactgtcacttaattttagcctttctcctgacatgcttactctctcctctcccgctacgatcactgcgagttttcccttcttaagctctcatggcggcttcataaatctatatacagacaaatttacacataaagaaacgcattaaaaaaactatttactcagattcagcttcttctccacgcaaagactcgcttctctttttttctcttcctgagtttggattttttttgcttgagctgaatcatgttttattctcaccagcttctagctcgaaaagctccgttgggtcagatatggtgagtcaaattctatcagtgaaacgttttccgattatcacgatgattttgcaacctctgtttctgtatctgtttttgaaatcggctgggaacttccttgtcgcgatcaagcacttgtcactgcttcaaatcgtcactgcgatttccattgattgatctgtatatggattattagtgaatgcatagagtaaaatctctaaactctgtttttgatttttcttcttcttaaggatggccgctacattgcacgcgaagatcaaccggaagaaactagataagctcgatatcattcaaatctggtgagaggagatgagatagtgttcgccctttttttgggttttactctgcttcgatttttttggtgttcctgccatgaaaacgaacgttgatttttccatttttgttggttactttactcttacagcgaagagattttgaatccgtcggttccgatggctcttagactctccgggattcttatgggtatgcttttgctcatcggattttttttttcctcagttcttcacattctgggttcttcaatgttttgtttattcgataggtggtgttgtgattgtttatgagaggaaagtgaagctcctattcggtaattttctgattcaaatcatttttgaattttgggatttaagtttacactctcctctttttctgatgagactctgctctttttctgggttttattttccgtcaatatttcagatgatgttaatcgctttctggtaatcaaatcttctccgatcctcttctattttttgtttccccgtcaaaatcatattcacgtacctcgatttctggattttcacatgtgtttatttttctcaggttgaaattaatggagcttggcgcacaaaatctgttccggatcccactttactacctaaaggaaaaacccatgccaggtaatgtcacatcttcttccttgaaggagcttctcatgccattgaaggattctgaaggatcaaatcgtaaacataagaacattgtcgtgaagaataatagaaatgattggcgtgttggatttttttgtttgcaggaaagaggctgttacattgcctgagaacgaagaagctgattttggagattttgaacagactcgtaatgttcctaaatttggcaattacatggattttcagcagacttttatttccatggtaatcaactcaattccctgtgaattctagattgaattgggtatttattttctttctacgtctcaatattcatcaattcgtagaattgtggcttgaactctccaacctaaaacagtgtataagatatagaaaaatcagtagccatcattcttcattgcccataaaagtggagtaaataagttggcgcataaagggcacctaagacttggtctaactcaagcatgtggtttatgagtagcctcattttagtctacaggtgaatatttcaaaggaaaatctttttggaacttgaagcatatgaactcaaaccaaaatcatttgaacatcgcttaagattttgacgtgtaacctatgggctgtggaaatggacaatgcacaaaagatgcaactgttaatgtgaattgatcatagtagtgttcatctccttgtataccaatgattactcgtgtgcatcttcagttgatctaattcattgcgtggttttatctctttgcagcggttagatgaatcccatgttaacaataaccccgagccagaagatcttggacagcagttccatcaaggtgagtatcttgagacaaaacctttgtgagtatacgacatgttaataacttacatttatccgcttgtcaatttctgtaacattctcagctgatgccgagaatatcacactctttgagtatcatggttcattccagaccaacaatgaaacatatgatcgttttgaaaggtgagctttcaatcccactatctatcttcagtctttaattcccagattttaaaccttctcgaataactgttgaaggtagaagttgtagcgtttcactatttctgtattttctttcatccacctttcagcaaaaagctggtgatgatttgttctattctattctgctttttaatggcatctcagatttgacatcgaaggagatgatgaaacacagatgaactccaatccaagagaaggcgctgaaatacctacaactctcatcccatcaccacctcgtcatcatgacattcccgaaggtagatagttatgtcactcttcccttctataatcgtgacatctggttattgtatggggatatgaatttttgagtcaaagatgaaattgttttcaatttttaaatagtgttaagtttatgaagccaataacaatgacttgggcgagtctcttgtataataatcatgtatgtgacctgggaatgtatttttgttgaagcttctgaatgatatgaacactgagcttcgtgaacagagcagaacaaatttactaatctttagccatctgcaggagtcaaccccacaagccctcagcgccaggagcaacaggagaatcgtagggacggatttgctgagcagatggaggaacaaaacataccggacaaagaggtattttcacttactaggaataccctcatctagtagaaaatacattgaattgggttttgttctgcatgcaggaacacgatagaccacaaccagcgaaaaagagagcaagaaagacagctacttcagcgatggattatgagcaaactattatcgctggtcatgtttaccagtcatggctccaggatacttctgacattctctgtaggggggaaaagagaaaggttcaaatttttgaactcattggcctttattgtattaactggtgctcatgttggccttacatctgacatctttttgtaggttcgaggaactatccggccagacatggaaagtttcaaacgtgcgaatatgccacctacacaactctttgaaaaggacagttcttacccgcctcagctttaccagctttggtcaaagaatactcaagttcttcaaacctcatcatctggtctctctctatccataactgttggttttttgttttctccttgttgaaacgaatctgacatttggaaatgtcgatacagaatctcgacatcctgatctccgtgcggaacaatctccagggtttgttcaggagagaatgcataaccaccatcaaacagaccatgtaagtcgcggaagcatattctttcctgaaagtttagtatcaataagagaaaggcacatttcatattctctctaacagaatgtggatttatgcagcatgagcgcagtgacacaagctcccaaaatcttgatagtcccgcagaaatactccggacagttcgtactgggaaaggtgcttcagtagaaagcatgatggctggatctcgagcaagccctgaaactattaaccgccaggctgctgatattaatgtcacgccattctattctggttaaaagcttctctattttatccagtcttcagatcatagcttggtattgtggaatatttagcgtaagttatttgattttcatgggaattacaggagatgatgtgagatccatgcctagtacaccatccgcacgtggagcagcttcaattaacaacatagagatcagctctaaaaggttaagaacacatctaagtttctctgatactaaaaccaatagtaacttacaaacaagttttccattggaagacgatcactaaatcttcttctgcttaccaaatcagtcgcatgcccaatagaaaaagaccaaattcctcaccaagaagaggactcgaaccagtggcggaagagagaccgtgggagcaccgtgaatatgagtttgagttttcaatgttacctgaaaaacgcttcacagccgataaaggtagaagtttttaattgtcttttgatcctatacaactttcaaaaacaccatcttacaaaccttaacgtggcttctttttcacagaaatactatttgaaactgcatctacacagactcaaaagccagtgtgcaatcaatcagacgagatgataacagatagcatcaaaaggtaagagattcaaaattatctgccaaatctatatactgagtaacaatgatgagatctataaacgaaacacagtcacctgaagacacactttgaaacacctggagctcctcaagtggaatctcttaacaagctcgctgttggaatggacagaaacgctgcagctaaactcttcttccaatcctgtggtactaacttctacttcaacttaatttcactttctttgagcataaaaaaacctgactatgattattgtttatatgtccagtgttagctactcgcggagtcatcaaggtaaaccaagcagagccttatggggacattctcattgcaagaggacccaacatgtaaggtttgatttctaaattataaaagattctggtgaaccgattatccatagttgttttgcttttcatattctagcagagagagttcgtagacttttttaagttataaagagcaagcgttctttacccaaattcctctgtttggtccttttgttatatggttattagtacctcatacatcatcacatcctagctttgtccgaaaacatctgaaactaatttttacattattctataatttaagtattttactcgcatatattgagtcttcttagaagatgtattgaacagagcataaacaaaacaatagtttaatatatactccgttgacaaagaaaatggtggcagtcacgtaataagccgcaactgcccccatttcatacaatacatgtataatcttcataattagtcgctcacacgtttcatacaatttgtcaaatttctcaaaaaattaaactaattacacaatcaaataccagcctctatatgtttctatatatacgcatatttcttacccctgaatcacacatcaagaagaagaagaagtttaagaagcagagtgtataacaagtaacatggactcaagagccttacccttctccgttctcgtcatcctcattgctacggcggtgttggccaacgcttacactcctcctcctcctcctccaaccaccgcataccctgccgtgaaaaccgtggaagcggcagtggaaggaatggtgtactgtcaatcctgcgacaaattcggatcatggtcattggccggagcagaagctatagccggagctaaaatcagcattatctgcaagaatcataggcaacaagtgagtttctacaaagtctttcgaactgattcctacggccatttctatggtgagctcaaaggtttcaagatgactccacatttcttggaccatcctcttcattcttgccgagccaagctcgtctcttctcctcgtgaagactgcaatctcttctccaacattaacaatgctctagatggagctccactccgatatgaagagaagaggctcaagtggactaactatgaggccgtgatttacgccgctggtccattggctttccgtcctgaccactgccctgcgactgcaccacccacttactgatttgggttttgaagatcatcatatactaattacataagacaatgttattgatttttctctattttgtatctttttggttttatggtttgtcaattgtttgtaagatgctgagtaatattgtaatggcctaatgggactcttgtgactcaattttgctcagtttaaatcggttaaatcattggtcacagaaacattataaccagaataattctaaatctcaaaccttacgacacaaatatgtcttcaagttacaacaagaacaaagatttctcataatttaacacaacagagaggtacaaagcaggaacatcgaccacaaacattgtctgcttctaggcatacgttatgagagtagaacaaagtggaaccaaataccttgttccttagaagtccattggcattgcaaacaatttgttgatttcatccaaggctacttttgtgcataccgttggttcaaatagttcgcgctcatctgattttgaaggcaatctctgagtcggctggctcttcccttgatgttcttgctcagcttcttcttcatcatcatcctcgagtattgagaaacctgcagcaggatttggttttgtctctactactgcttttcctttgtttttagagcggttgggtctaacaaaattgattggttcgccaaacatgttgtttatgtcctccatagcttcctttaggtttactgtagggtcaacaaggccatggtggcaggcgttttcaactgcttcaggctcatcggagattgttgaaccaacaaatctacgaacaactgtatcttctctaaatctagcccgaggaggagtgtttctgtctgcttcttcagagctttcaggtgaatggtctcttggcaggagaaagacaaaagcttttccagcctcatcattttcatccgcagtttcatcagtgttttcatcatcaatgaatatctcaaaggactcttgattaggctgggatccacactgagtagtactagtctttgcttttccacttgtccctgtttcacattcgagattctcgtccagaaaaacctcaaagctattgttgcatccttgattttctttgttctgacttctctgtcgtgatcttctctgaagtggagcagtttctataggctctttgaacatgttgttgattgtattcatggcttccttcatgtttattgtgggatccaccaaaccgtgatggcaagcattttctgcttcaggcttccctacaatggctttatcaacaaaattcaacacaggctcatgttgttgcctctcatcaaccttgtggtgctttccagacagtttttgttcttgacgctgcaagaggaaacataaattcagacatctgcagaaattgtaacccttatacaaacggagcaatcaaattatggaaacagtacctgtgtcttcttctttttgtgcctctccatgcgagtaacgaactgcaagtatgatttctgtaactcatccatgggttctgcaaggctgggaacaagaggaaatagtcactcaatttaaatcatgtcttccacatatcacatatgctagctcaaactggcattatagcattcctcatatccacaaaaccaagaatagatttgattgatatatgttgcatatgcatactcactcgaatacatttttctagagtttccaagaatacttacttttgaaccccaagacggtacattttctcagcatcctcaaatctcttcatcttctcataatggagagcatatgcctggtagaagagtgacctcttggtccctatactttttgcttccatggttcttaaaagagctcttggatcgtctacaaagtccatctacccaaacaattcatcatcacccattaagacccacatgctaacgaatcaacatctgctatcaaaatcaagtgcaaaatcaaggggtgaatgtacattaccagctgcaaccaaacacgaatataccgcgaatcgttcttatatctcttatcagattcaaatgactctgcacatttctgcaaaaaccgcggcagcttctcgttcaatatctgagacggcaaactctctttcatcttcttaacacctctgtttcagattgacccaagattcaacgacacataaatcaacacaaacatctattcaattaggtttctatgaacttaaagatacagacccgcccacaaaaatggtgacacaaagagtaagacatagacaaaattaccggatccacggaagaagatggtcttttccagagtatgatttgatgtcgacgatcaatgaagccagcaaattctcgtagccgttctcgttcttcgccatttttacttcgccgaattgaagaaagcaaaaagggacaaggctagtgggagatagagagagagagggattatatgaatttgaaaaaagagtgcaccttttgattttgaaacgttctgatacagcaagaggctccacgatccctgcgtaaagctaaccggctaatcggtcaaccggttaaccagataatcagataaccagctaatcactcagccggttagccagataatcagataaccggttcagtaaggtattgacaggaattgtaaaacgctttttggaggagccgtcaaattgatttcgccgatttgctcatctctgactctcagttgctttgctccttctcatggagaatccggcggagaaacccgacccgaatccatcaaaacccaaaatcgaatctgaagatgaaagagaagaactaggagatattaacggcgacgaagaagaagaggaagagtatgaggaagaagacgatgggaaacctcgaacgcgagaggatgcaatcgcggataggatcaaagctgagtctctgttccgtcgtatgcgagcaactccggtcgctgtgcgtgttcacgacgtgatcgtcaagggaaacgagaagactaaggatcatgtcatcgaggctgaggtggatgttgtgaggcaagccactacgttgcaggagcttctcaaagcctctaaggttgccaatttcaatctacaagcgcttgatatcttcgattcagtcaaaattacgcttgattctggtcctcctgagcttcctggtaccaccaatgttgttatcgatgttgttgagagcaaaagccctatcaccggtcaaatcggaaccttcactaaagcagaggtatcactttcgttttcttatttcagtggattaggatacttaggtcttggcaggaagaattagatacatccattgattgatgcatagagttggatttgttgctttatgaggataattctggatttggatttcatatatagacttttgtatgtcatgtgttttagtgatttccagattaagtgttcttgtgagaatttgaaatgttgaatgttgttcataagtctaatgttcttgtaggctcggtcatcaagccttgaaggctctttgaagtacaagaacatatttgggtatggagatatctgggacgggtctcttgcttatggctgtgatcactctgcagaggtcggcttggggatgtatttgccaaggttcagagggcgtcctactccatttacgtcgcgggtttacctttctacccaagattggcttaagttttcgtcttataaagaacgagctcttggtctttccctcgggcttatcgctagcaagtatcatgagctggcctataatattgcatggcgtaacctgatagacccatcgcaaatggcatcaagatcaataaggagacagctgggtcataatttggtttctgctctgaagtacactttcaaatttgaccagagaaactcatctttgaggccaacacgaggttactctttcatctcgacttctcaaataggtggtcttgcacctgatagtcgaactctccgctttttgcgccaggtttgggattcttcattcttatgtcagaatttacataaacctatatattacagtgtggaaagttgtagcacaaatatattactcagaaaacttccatggcacctagttcctcgtttatgcttttgcaccatttatccataacttccgaagtacatctgacactctttacttattgtagcagtgaatgaaaagattggttagcccttttataacatatgtggttcttttatgtttgccatacatcatgttgagggtttcttgtccttttgcaggaaatcgaccttcgatatgctgttccactcgggttttatcgtgctgctctgaactttggtatagctgggggaatcacatttccatggggaagcggatacaagagcagagcttcttgtgtacctgagaggttcttcttaggtggaaacatatcgcctgtgtgttctttgggaggaccatctgcattatggggattcaagactaggggattgggtcctaacgaaccaaggagggaagtacaggacgatgagagtggtgacacatatgaacgggattttgtgggaggagatgttgcggttactgcatttgcagacctttcttttgatttcccattgaaatggttcagagacagaggaatccacggacatgtgtttgcatgtgccgggaatatggcggaattatcagagaacaagtataggaacttcacagctccaaagttgttggagacattcagaagctcagttggtgcaggaatcgtggtaccaactagtctatttcgcatggaggttagttagttctcttgtttctcttttcttatcaaggatcataaaaaaattgcaatccttttaacagatattgattgttcttcttttgttatgtgatctcttatgccagctcaactactgccacatactgaagaaacaagaacacgatcgagcaaaatctggatttttcatgacattttcaacatcatcttaatgctacttttgatgatatcttaattttggctttgcactcacagtgtcatggcggagtcttttgttttgtttccaggagctttcattgtttaggttgttgtttggaattgaaaactgtgcaaattttagagagagagattacctgatgtgcggattgttcttgggaaggagatagatcaagaaataaaaattaactaaagttgatttgttttgaattaaattttaaattagtaataaactttttgttttccttccttttcaatgaagataaagatgacacggtagaataaatttttgtttcctttttcatgaatatgttttggatcgagtactgtcatctctataaatataagtccaattacaagtagattgttgggtggacaaagtcatgcaaaagcaaaacaaccggcgagtctttttctacccggtcactttctcaccgcgtttccattcaaattccgctagccatttttccatcacactagcgactttccgacgagacatctaccgtccgatcaccgggaaagaacgacttttcggacagacatcactaggtcgaccacttcaactcaaattcgagatctcttcagagtttctagcagcctccgacgtagaaacatgtcttcgacacgtgtctcttgttttggcggatgttgagccaaggattcgggagattctggttttgtatggcattcaactcatcggagaaagcagaggaagagctttcgagctcaaagctgaagcagaagatgttgaatatcacttgatggaagaaagtaaaggctggactacttgtatcccggccaaatcgattactccggtcaacgaatgtactatatgccttgaggaattatgccacgacgaagaatctatagagacacatgattgttgtcatgtttttcataaactctgtctttggcgctggattcggaccaaaagctcttgtcctctttgtcgtcatcctatctattcaagacccaagttttaggttttttttatagcttttttggtattcttcttttgtgtaaaaatgtccaaagatgcatattccacatttctacttgctgtatatagcttgcttgttcaacatctcttgtgtaaaatttaataattaaataaataagtgaaagcaacgaaaagacatatagacctagttataaaaaaagatgcccaaggcccataattgtggtttgtgtgtgtgtgtgtgaagtcacgtgaccattatagattatgcacgtgttgtcaatctgtctcctttacgagggcgagcgagccgccgccgtcagaagcttccgttctgctgtctgaatcggtcatggaggacgtgctagccacggcagagggagtggtaggtctctttttctcatacgacgttagctagaaattcatggattcgaaggttgtttttcgttctaatcaattttggtaaaatctatggggttttaagtaggttttagtaaagctggtgaaggtagcgcaaaagctaggtctaaaaggtgaaaacggaacttggaaggagtttttagatttttatgacaaacagctaggatcttcgagcttaagtgatccttcaaagcggcgcaaagatgatttggtggcttttcttactacactcaagaagaaagaagatttgcaggtttcaaaagacaaaacacacaactcaactttttaataatgataatctcaagttacaaacttttctaattttttattatgctctcagctgttggctaagtctctcaaactcgacaatgatgtttttgagaaattcaaaaagaaatctttggatgagacagctgagcaggtttagattgaaacacattatcttcttggttgcgtaatgcaattagtttagtaaatagtattttcataactaatgttgttggcagtgcagaggctagttcgaatgactcttacgcatgatgagtacccattagactatttgttcccatctaacgctgaggtttgtgtttatcttgtttttatgttgaatggagtaactgattaaaaaaaaaagctgaactctttgagttgcaaaaaacaggattgggttagaacagggcttggcaagaagaagatggaaccgacaaagatcgaaatgattgccattgattgtgagatggttctttgtgaagatgggagtgaagctgttgttagagttgctgcagttgaccgtgatttaaaggtctctttacagctttattttcgatgtataccttttcgttttttacagaactgtgctgataataaatcaggtgattcttgatgagtttgtgaaaccgaatcaaccggttgttgactataggactttcattactggacttactgctcaagatcttgaaaaggctactatatctgtggtagatatacaggtacattgtgtatataatgtataccgacttgtttttttttgttttgcggtttcaaattattgttctgatgacatttggtgaatcatttttgcaggaaaaattgctgatgtttatctctgaggatacaattttggttggtcaaagtttgaaccatgatctaaaaggttagtaaaaatggttcagttgcgcctagtttttttgaaataagtttcagaaccatacttacttatgattgatactagtattgaaggtggatcatgccagagtaattgatacttcacttgtgtttaagtataactatgacggtacaagaaggcctttaagacttaaaagaccttctttgaattatctgtgcaaggtaaagcctgtgaaagctcaaccctctgctcatgagatatggaatctcgtatgtacatgaccgatgtatcacattgtttatttgatttgatttccagtgtatattgggatatgaagtgcagaaagaaggtgttccacacaattgtgttcatgatgcagaagctgcaatgaaacttgtacttgctatactagataatggagcagagacctccgttccactatctaaagaggtaagttggattgcacaaacttcattagttcaatctaaacttataaaagcataacgttttgtctgcataattccatatagatgttggaagctgagaagtcaaagctctaccttcatagaatcccttgcaatgttccatatgaagagttaaatggagtcgtttccagggatatcccacatgaagttaaggtatgaatccactcaacatatacatattcttatccaaattctgtattttatgaggctctcgttgtttcttgattttcttttggcagccgtcgaaaaaacaagaccgtcactactatagcgcgattgttgtttttaaaagtccagaagaagcaaatcaagcatttgaaaacattgctggagactttggaaaggtaatttagcatcatatctttggttatttcacagatggtggtgatataacaagtttctatgtatttctcttacaggattcgagggggttgtcacaaaaacagatctttctagagccgagttcatcagaacctagattatatgttctcgttcgtaaaatggtcgaagatgatttggttggggaagtcatagcagaggagaataatgcgagttctaagaaacggaagagagaaaatcattctaaagggaccagagatagacgcaggtgtaaaccattgtccagacgaaaacagagaagcaatgtcaaacgaagaagataatatcaaggaaaatcaagaactcaaagcaaaatgataagatgataattggtccggattcttgaaaattgctttcactgtgactctagtttgtgtttggtcatcgttgatgcccttaatgaaccttggatagtattttgccaatttaaaggttaaagaactcagagactattgatttaagatactcggatgcaactgcatacttgtggatgtattatatatatcttatgataagtggttatgataaaaatttagacatgaaaaagcccaagaagaagcataaacatgtaactgttaagcatcagaagctgtagtttggatacacaagccatcattatacgtggacactaacacaaatgtagatcatacttgtcagctactaaagagttaaggaagatttgctccagtacaccaatgtacactaacacgctagaaagtagaagaaaacaaacaaagacatcctaaagagttctctaacttccatcctacagattaaaacaagtaacaggatcctccaatttcaatgagcttcagattcaagtaactcctctttgcttcaccatggtatttcctccaccaatctaattctacaattgcttacctgtacaataaaggcagatcaaacttcagtgaactcattaccatatgaagaatgttcgactactatgaacattgatcttttttctcaatttcaaacctggaagtctactcctcctaatccagttcaacattccacgaagctggagaagctaaagaagtaagagaatgctatctagacttttccttgccagaccactggaagcacagaagctcaactgaattgtatattgacaaaattggtattcttcaaaagcagagaggcacatgactttcacatatcaacaataagtcaattactaaccagcctcatccatgcttacaacaactaacagcataggtataacattgttgttgaaatctaaggtccttccacggatacattatgcggtttaaagagaaagagtaacaaccatgtaaagtctaagccaccactagtaacttgaaaacctaatgtgagttcttcttacctgaagcacttgcgcgtttccggtgctttgatttctcaatctctaactgcatctccatcaacatgttcattcgttttaactctacctcctttgtcacttccattctctgcttctccaactcaatcatcatctgttgcttcttcccttcaattctctcgtaaacttctccaaacttgagaatcgccgtagctagttccctacacgttgatccttcactcagatctacctcttccacacgaggatgcttcctagcaacgaattcccaatcaccaacctcatcatcatcctcatcatcatcttcaagagagcttccagtagagttcgatccagttggattcagatgattcttaaaaggcgctgatttgacaactccgccagccgatttcttcacaacgggaccgattagaacatcgaggcggttatagaaacgccaagtcgacggcgagagtttagctttctctgttttgtacttcttcttcaaagtatcgacccggttcttacactgtaagtcggtcttcttacggctgttatcaccgtgtctagagttaacggcgtcggcgacgtctttccagtcattctgccggagatttccgtggttcagcttgacgtaacgattgccccaggcttctaccagcgtcgccgtcgcttcctcactccaccagtcttctcttcccaacggcggtcggtgggacacacttgattttgactgcggcgtcgtcgtctccattcgtcgggagtagtgttgctaatgtgcgcaccgggaggagagtgacggcgtaggataagatcggaatagaaacaaacaaaacataaaaagaagttttttttttttggtgggaggaaaccggaatgggagagaagaggataagtgtggcctgacattgatgaccggcggtgacgtcactgaccgtattggagcgttttggtcccaacggcgattatccgttaagaccgaaccaatctctttggtctcgttagtacttatgattaaactgttaaaaaaaacctcataatttttcatttatcccaaaacaaacctcaaactaaaaagattacataaataaacctctaaaagtgacagattgggtcaatagcaaatagttggaaatattttagttttatttcattttaagccttcaagttttacttctttccaatgtttaaattttgtctttcataagctcagacttcgtcccagatttcattgcatctagcacagaaagtgtttgattaaattcctctgagaacatctctctttcactaagcgaaatcttccgactttcgatacttttttgaacctcactttcttcattccgttcagtttagagcctcgacaatcatcggaactcgtttgaaacctctctatccggtttctaatgtaagtgacaattcttcctactcacttcttcttcttcttcttcttcttcttcttcaatgttatcttcctctgtctcgcttacttttcataaaacgatttcgacccgcaggtttaaagagaaatgagaatctcaaataaaattttgaaaatagaaaagactagggtttaagcgctaagacaacttggaaagagcgggagagtgtaaattaaacttcaccaatctccattgcctgttggcttcggagaaaaaatgcctccaggggttcgccaacttaccgtcctcggaaagtttaaacctttcggtctaatcgccgaagctactgatggtaaatcaccggatgattcctatcagtatttcctcttcgatcctgagctcactggcgagcgagatgatgctgatggcaatgatgccaacttctcgcggcagagagagcacgagctcttcatccgagacaactggtaagaaatgtatacaatttgctgattactctataactctgcaccacttcatgaatttgttatcacttcaatttcgaatgtgttttcctattcttcaagtttgcctctttcttccagtaatgtccgtaagggttatgctttagtagaagctaatttcattggatattggtataacgtatctagctgaattgcggttcgtttctgtacctgacgatgaaattttgatttgatgatagcataatctggacaagcggttcgcgggtcctcaagcgttttaccttgtcttctgccgtcattaaggtgatttccattagaattttggctctttgtctctcaagttttcccgtttgaaaatctatggattcttatctgtgacaatccttgattaaacaaatctagctatgtcttaacaatgcttttctgttgtattggtggatacgttatctgttccacatgaattaacaaaaacatagacaaaaatattttccatctatttgatgcgtcagaaagactgttttaactcatagcttttttatgtcataggcatgctggagcaaccttggtcgagggacagaagcttttctttgtgtattacaaattgcttgcttaacaatctacaacacatcaggtaattgtggctagatacctctgaactataatatttctgcactatccgactttttccattataccctaatggattcttatatggtttgcttctaacgaaaggacaatctcatactggtgcacatagttggtccctttctttatgattcatttgaaattgtgtaattacaaatgaaaatttatggaatcggtttatgaagaatagatttcaggtagctttctgtgcattgatagctttttgaacgttcaagttgattgattaacttttagccgttctatttctagtttcctttcatctgctcttggaaatatattgcgtattcctttttacttgttgactagatctgattaatcagtactgtttgtctcttttctgaggtaacactagctgaggtaattactttctgatttttggcaattgttggcaacaggcgaagttgtatctgttccactaatgcgtactgtcaaatcaatatggcctctaccatgtggtctacttcttgagcaagctggtgaagtgaatccaccctcacatgttccattttctcctgttagccccatccttggttctcgtgagatgctgcgccaaagaaaagaagttgggaatagttcaccacaaaacttccattccccagtcgcgcatgaccttattagcaaaagagatatgccatgcatgtcttcccatctgattctaagagatccactagaggaacctggggtaaatgaactcatcattttgtagatattccttgtaactttatttctgcttcaagccagtctttctttatatcgggacctatattatttctttcttgttgtctcaacagcacataaatgttttttgatgatgcaatatttggttatacttttcatctggtaactcatctacttacttttcagccaacctacgttgaagagagggggaagttgaccataatgaaggactacgatgagaggacaatttggacaagtgaccgtctacctcttatgacgtcgtataacaaaggtttgtaagtttcttctctggtcaggctgatggctcatgcttttttaagtttttatgaaatactttgtcttcgttttttcaggcaagatgcaacattctgtgtgggcggccgaatttatagagtcaaaccttgaagcttctgcgtcatgttcaagcggcattgttcctgatgctgttctctcgaagcgggtttcttttcgtagaatatggcaagcgaaaggtgctaagaaagctgcatctaaggtgacaaatctatctaatgttctcgctgttggtcatgctacctttatttgaggaagattgtatactattttttttactgaagtatttactattatttttcattttcacaagtgcctcaaaatatatttcaggtctttttggcaactgataattcagtcccagtaatttgctttctgattctagaacaaaagaagctgttatcggtgggacttcaaactgttgaaatcaataacgaaattctgttcgatgttaagcctgatataagctggagtgtgtctgcgattgctgctgcacctgttgttgtgacacgttctcagtaagttcctacttacaattttttttgccctctctgtcactgtaaatgagactatttctgtcgtcatgtcatgagttatgagtatgacaacccttttttctgtttccttgcagagtgaaaataggactgcttccacatttggatatcattgttttatctccagaaaatgacctctttctctatgtaggttcttgttatgtaccataccgttttctttgttaattattatcctaatgttgtatgttaatttatctataatattatctgtagtcaggaaaacaatgtctctgtagatatgtattaccttcttggttgggagaaagtattggttccggggatggagagtctgcaaaaacagattcaggtttcaggaacctgaagatcacaggattgtctgatgctgttttaggatctatcaatctctcagttaaccattcacaggtatgactgacagatattaatccttttgaaattcaaatgattagttttgtcaattaccatagtcattctatccttatggactccaatcacgtgattgtttttagtatttgtttttttgggttagtcaaagttttcttttgttttaacttcttgtttatactatactcttgtagatctttcggtgtgccttaactggtaaaccttcatcgtcacttgcaaatgattgcatagcagccatagctgagggactacgatccgatctgtacagtttgtttctctctcttctttggggagatggtcattctgacctgcaaggttccagtattcattttgaatgggaagcattatgcaacatttttctggagatctgtcaaaagcctactgttgtgcatcgaaagcaacccaaaacagcatcagagtcctcctgggagtttcttctcatcagcaaatttcataagacctactctaggtttcacaatggtattacttcaataaatcgtttagatctggaaggcattgtcccatttgattccaagatttgtagtgaagaaacactgggcagctcatgtgaactaatggtccagagtttagattgtctccatgcagtttatgagagcttgaagatggataatctacggaaacagtaagcacattggttttacaaagctttgtttcgtgctttttgcctgttttgcttacaaaatgattagctatctttgattggtaactacaaaatgctttgtttttcctcgtttcttaattggttctctcttgctgcatgaaagtatgaaattctgtaacataagttatgttgcatatgctttgattcaaacgtggcacaaaagttgatctagccatagatggtttcctgaaaaaaatcaatcttgcaccgacaactgtagtttcatgctagactgtttgcctaacaatcatctgtatggtttcttacagaaaactaaagtttgttagattagaagaagagttaagattgaacacgtatatgactaactcgttttaactttggacatctatgtgtagggatttgcatcacttggctgttttgttgtgcaatattgccaagtttctggatgagaagtgttacttagattactacatacgtgattttcctcgtctgtcaacaactattggggcgtgcacaaccctttcttctagcagaaaacctccaaatttatttagatggcttgagaattgtttaagacgtggatgtttatcaacaaactttgatgacctcccagatttgatccgtagagatgggtgctccatagtaagctgggcaaggaaagttgtttccttctacagtgtgttatttggtgataagccagaaggacggacactttcatcaggtgtcccctgtaatatcgcgccaggatcatactcctgtaacgaggaactcactatcttagctatggcaggagagagatttgggcttcaccaactggatttgctaccttctggtgtttctctcccgctaagacatgtaagttggattgccccaaaaaaaaaaaaaaaaaaaaaaaaaaaaaaaaaagacatgtaagttggaattgttagagacttgtaaatgtgaggaatatgcaggtgtaatgataagctgttgataacatcagtgtgatgattttccatatacagttctggtgttatatcttttccatattatttattttctgtattttgtaggcactggatagctgtcgggaatctcctccagctgactggccagcaattgcttatgtgcttcttggtcgagaagatatggccctatccgtcttcagaaattttagttcatctaaggaatttgagatgcagtcaaatacgagtttgatatcgatgtccataccttacatgctacatttgcatccagtaattgttccatcctctgagtcgattggcttagaaaacactaagattgaggatacaaattctgtggatggttctgtgatagatggaatggagcatatcttcaactcctacacacagctacggtatggccgggatctaagattgaatgaggtatatctgccccaccccatttggcaattaaaattttctagtgttaatgatcacaatgttcaatgctcgaaacgatttctgtagtgtgccatataaacttttgcatctttgtagctatgctcatgttgcattgttctaaattttttcataaggtaacttgttagcttgtagtgcactctatacctcgtctcgttgactatatatatcaaaagacgtagacttacgtctgtgtcctctatttgatttggtgtctgttgcatcagagctttgccactactttgattttctgtattagaggatgattacaatgtttcatactatgtaattatccctcattctgttatgcgttgctaattggctattcaaatgctaccatctacccctataccttctataatatttaggcactggtattaactataaacccatattctttctcttgatgttttctttttctttttcattattccttgtcatgttaggttagacgtcttttgtgctctgcaagacctgtggtagttcaaacggctgctaaccctactatatcagatcaggagcagcaacaggtacaaatctagtgtatgttcatttacatgtaattctttttaatcatttaatatgttgaattccttctattattctacttcaaacatatttatacgtctaaaaaaattttaggagagcatgtttcaatttatcatcaaaaagtacactttcgcatcacacatcttgtaattattttaccaaattttaatcaattcttaattacttatttaaaaactgaatttagatgcagctgcacttttatttctcgacatggtagaagccagtggttcagtttctgctgaactttctgttttagatcttcatagactccaattctctcttaagtgtttataatgttgctttgtttttttcgctggggtaggaccatctttggcgcatagcacagaggactgctgttctacccctcgggcgtggagcattcacattatcaacgatacatactcttttaactgaggtaatttgctatctatagtaggagctagacatggttcttatcacttgtaattactacttgatgatttatatcctctctgaaattttgcaggcgtttactgtaccaaagcttgttttagctggtcgactgccttctcaacaaaatgccattgtatgtaaaattgtggttatggtttattagggggatcattacaaatttgaaacatgttatttactctaatttaaatgaaatagcgttattgcaatggattttgttattactgtgaagatggaagttacaatttgcatgaagcagctatttcaagacataaataatgaatatttttgcctacatttgttctttcccaaagaatttttttattctttcaccgttttagacactcttatagttaagattgcatatttttctgacaggttaatctagatccaaacataaggaatatccaagaattaaagacctggccagagtttcataacgctgttgctgctgggttacgactggctccgcttcaggtttgtgttgtatattgtgaggacatgttatgtatcttttaaacttttgcatctatgaaagaccaaaagagtatgtgaccaaattgtggtacacgatcccactattgtatatttatcatcatgcaacaggaaccttttcttcacagacacaatccaattaactcagttatgtttttccttacattttggtgcagggaaaggtctccagaacgtggattagatacaataaacctggagagccaaatgctgttcatgctggacttctgtttggcctgggattacagggatatttgcatgtgttaaaccttagtgacatataccaatatttcactcaggtttgtttctattggctctttcttccatttagttatttatttttcgcacttgattattgggcaatagtaactagtaagacgtgctcagtgaggcctaatacatattccattctttgattgagatatatatatatatgtggatgtctgctgtattgagcatcacgttactgtggctcttgatcgaagttattactagttttacctgtttgcccgattttttttggattatcacatgtcatctataactggggccatatatgtggcttagtgaggagatatgaatgcaacattatttatgtaaactaattttccatgtctgccttatttaataattgtggtcgttttttattaaatatcacatatagaagcggtgtaccctggtgaagtactttctattttacctgaactgcctccttccttttccttgatcttttaggaccatgagagcactacggtaggtttgatgcttggtctggccgcttcatacaggggaacaatgcaacctgatattgcaaaggtagagattcagctatttggtggtcataggctcatattttgaattggcctctttaagtattttttgttgatagtgtgtcaaccaaaaacacttttttggtttaggatatccaaagtcccaacttccatttaagactactttaggatctacatatgcttttgtgttagttttagatcttgtttatataaaatgatggatgaccaacgtcttctgaaatgtgaaattttcatttatgcactgaatgatgtcaattattcttactagcataatacttttaaaattttcagttccagcactagaagatctagatgtatttggtgcgccctgtgtgactgtctaattcttgcctaaagaaattatttttctttttgtaacaggctctctttttccatgttcctgctcgataccaagcttcatatactgagtttgagataccaacacttctacaggtacagattgctgtgatgttttacttctctacaagcagttactgattctagaagttgtatgacaagcagttgcaataaaatttacttgcatatcctaaaagtaaagctattttttcatgtcacgcaatttcaacacttttgttatttgagtttccaattgaggttagcaatccatgtcttatatatatgattccaacattgtcagttctggcattttctaaagtttcattgacttgatattttatttgtgccttatgttgacatatgtgccaatctgcaacgccttttggaaaattcatcttttattcctcacatatatcttgccctagcaaatccattgattttagttttactgcagaagtgatgatcagaaaatctggttgacagagaaagtatgactatggttaactagtgttattttttgtaacacgctatgttaaactattctacagtctgcagctttagtctccgttggcatgctatttgaaggatcagcacaccagcagacaatgcaattacttttggtaatgtctcctccatgtttatttctcttacttatgcttgaaatttgatatagcgttcttcttgtcatcaatctcattctcatcgttacagcattattatatgtgagaatcgtgttttaagcacacttgttagtgaattgcatgtccataaaggatggtttcgttggtcaaagcaattggtgtaaaggatgtttcttgaggaattctagatttcataacttgcactacatgtccatagaaccttctttccttgtttggaatttttttccccttatttcttatcatcacgacattctttgttatttatagtttataggaaataggtggatacatgatagaactgtatccatacagttttgcttttctcagcatatttaatttcttcttaaatttaaagttttctcagtggtgcatctttgatacagtttggtatatgaacttctagcaagttgataaggctcacgattctatcttttagtttagttgtggatccaatcctacatgtacaatctaggagtgagttaaaaacatcaattaagttcatacatatcttttaattggcaatttagttcgctgcaattccagtggatcgtcccttatctttcatatcccacatcgtacatgttctcagggtgaaattggccgtagaagtgcaggggacaatgtccttgaaagggagggttatgctgtatctgcaggattctcacttggtcttgtagctttgggtatgtctttttggtatttggctggcaaccaatttttttttcttcagtttaagccgactccgctttctttttggctcaaggccgtggaggtgatgcgctcggttccatggactccttggtcaatcgcttactcctgtatttaggagcaaaagaggttaattactttggatttcaacttaattgtatcccactataaaccatatcacattggatttgtaaactatgaatattgttgtactgaacaactctttgaatttcttacaggaaagatctatccttgtaccatcccttgaagatcaccgaagtgctgcacaggtttccctgcatatctgttcttcatatattcctatgtgaagcttgtattgtgcataaacatgtgccttaaacacttgctgaattgttataatgtgggtataattttttctgtctcagataacagacggaagcacttctaatgttgatataactgcacctggagcgataatagctctcacattaatgtatcttaaggtgggtcttgaggatagttaactagataactgattaaacttcagccgttacggctttttgtttttgtgttttttcctgtggaatgtggacactttatacaatggttgttgcagacagaatcagaggtcatcttctcaaagctctctattcctcaaacacattacgatttggagtgcgttaggcctgatttcattatgctccgtgtcattgctcggaacttgataatgtggagcaggtaatttttatcttgcctaattaggagtgctgttattgatgcttctaagatagtaagtctaacagatttcgtattataggatctgtcctacttgtgattggattcagtctcaagttcctgaagtagtcaaaaatggtatcagccaactccgagatgacatggataatatgtatgaggtggatgttgaagcccttgttcaggcatacgtcaatatagtggccggggcctgcatttcacttggtatataatataattttttgtgagacatcagtctctaattactcgtgataattatgacatgtattgttgtttttgatagggctgagatttgctggtacgagggatggaaatgctcgtgacttacttaactcctacgctctctatcttttgaatgaggtatatcatccatggaaatgttatatttgttactcctttttctccttcaaatgctaataattctctgggtttgcttctggtcatctctatgtgagcttatatgttttcacgtatgtagatcaagcctctttctgccacacctggaaatgcatttcccaggggaatatcaaaatttgttgatcggggaacacttgaaatgtgtctttatcttatcattatttctctgtcagtggtaatacttcttaaagtttcctgtccaacaattttcatttttcaactcagtcagtagctttatatggaaggactcacttgtgtaggtcatggcgggatctggagacttgcaagtttttcggttgttgagatttctccgcagccgaaactctgccgatggacatgctaactatggcacacaaatggcagtaagtacttttgtgcaaaatgaaggttccttgatttcatgtaattcaattgccttgaattttatttttgaagtttggatattaaaatgtaatctctgaagcagttattttcttgaaatggctggcaatcttgtaaacaataaataaaatctcaggtcactgagcacacagaaaaacataaagaagttctagctcatttattgcattaacctcatatggccaaaacaattcgtctctaatgtaccagtgaactacttgcaccatgtaaagtaatttaaaagctgctgattttgtttgagcaatgagatcgaaaaatgtgactttctatagctagcttacgattgcatatttattgttgagcagagtcctatacttttcttttttttgtgaaatatgagcatcataatttctttcctttaggtgagcttagccacaggattcttgtttcttggaggcggtatgcgaacattttcaacgaataatggctcactggcaatgttgctcattactctctatccacggttgccttctggaccaaatgacaaccgttgtcacctccaggcaagtttaaatctcttatttattctttgcatcgctcttttttgtctaatatgtcaattctatagaagcaagagttgcttttctatagaaaatgctacccaacaccaatcactttgtcgattgtgatatcaaagacatgctaagcttggaagttggtttcaaacttttgttgtgctatttatgcttttgcaagaatacatctgacaaggtgaattttccttttttttaggcattcaggcatttatatgtccttgcaacagaggctcgctggctgcagaccattgatgttgattctggtctgcctgtctatgcccctctagaagtcacagtaaaagagacaaaactttattcagaaacaaaattttgcgagataacaccgtgcattctgccagagcgtgctattgtaagaaaagttcaacatcttgccttgcatattttttatgaacaaactacagaaggtttcttgatttgcatgtcacactgctttctacaagattatgaaaaaaaaatagttttctggtagaagcacatttgtggcaactgcaagttgaaacatcagaaaactaggccatataccagcttgtctcaatgctggtttaagttttttcatgaaatacttgctcagccattctacctgtttgtttcgtccacgtcacctaaaaatgtatttgtatcctgcagctaaagagaatttgtgtatgtggtccccgatactggccccaacaaattgagctagtccccgaaggtggttgatgcatttgcttatatattccttatttgtccttggtcatttcgtctacctggttttaagataatttatttttatccaatgaaatatagagaaaaattggtggagctttggggacaagagtgatcccttcagttctggtgttatatatgtcaaaaggaaagtaggagcttgttcgtatgttgatgatccagttgggtgtcagtcactgctttcgcgagcaatgcataaggttgtatacgccatcatatactcttgactcagatagattaatattcagtcatagaaaactggttctgatacacgtttgtatgctttctgtgatacaggtttttggtttaaggactctgggagaatctaatttgattgctaatagtcatagagaactggattctgatagtgttgatcacttggtcagcactttctcatcagatccaagcctaatagcgtttgcacagttgtgctgtgacaaatcttggaataacaggtaagtactgttttatccggttgattcacatttatttgtgcttttagttccataagtcataacagagttcggtagtttgcttggcaaactcagaagggcgaattctaacatattcattgatccagatctgattctgaattcaaggagttctgtctgcaagtgttgtttgactgtataagcaaggatagaccagctcttttgcaggtgattgctacttacagccacctaaccctactattcaatgtttaacggaacaattcttgatgcagtttatttggcaatgtgtattctaatattgagtatacgttacataattgttgtaggtttatttatctttgtacacaaccattggttcgatggctgatctgcttgtcaaaagcgatagtaacatgtgtgattcactttccatctcaagcctcaaggtactgttcctgcaaagatggaactgaaacaaagaacattgattcacattttgacttttgtaatcagctttgatttcctaattttggatctaatcttatggtctcaggttgctcttgcctacaatgaggcagtatcaactggaagattggcctcctcaggtggctttgtacagtcaatcttcttagcatcgctgagaaagcgatgtgaagaggttttgaattgctcaacggagctgaagattaatttgaggaattatttgacctcagaagcatggccttatgataagaactcaaagttgcagaaagatataattattctctcatggtatctaaaatggttcaacgtaccatctccatcgatcatcaaagcagcagtggaaaagatcaaatccaagtccaaaaactcaacttcggcaatacctttgttgcgattgttgttaccaaatacgcatattagtgtgattggtgaaattgatagggtctttttcccctcgaattaaacaattgtattgtgaaaacatgattttgtattctcttcgtttgggctaataagctgataaattttgtgagcaaagctatcatggtcaatttcaaactcaaatgtgcatgacaaaagcataatataaaataagctaaattttaaaagatatttagttgatgttttttaaagaatatttatgagatcaatttttttaaaaaagtattagaatagacatggagttaaatggaagtgttaagatcatacactgtaatagtgagatggtttaaatatggtttgacacttgtaaattcaattataaaattttataatttgtcctccatatttgcaattgcattacgacataacctgtttcaaattcttcttagtcgcaacatggacaaccttttaccgagcattgagatgtgtgactggaatgccaaggtgttcagaatcatcttccattgtgctgaccgcatctccttcactcatctcgagatttaccggagtggacaagtctacaagtttgtgcacgggactcctcactatcttgtggttaacgtgacgtgagagggtgttcagattcgaattcaggagaaatagagtggatatttagtttttctatgttttattttaaaattgtagtagatgtgtatgctttgacattagatgtttatatctatttttgacaaacgagatgtaaaagaaacgaaaatatatatccagacacaagattttgggaggttattttgtttattagattgttataatttagtcgttaaaatccatgcatatagctttcaattggcagtttaggtatctgcatatagcttttgtttatgagatttttttatattataaaattattggtggtatgttgtgtatattttgtacacatcaatttttcttatcatttcaatgcaaacattttcaaatgtgtgtattatttatttatcttaagttgttttttaacatgcattcttttgtaaaatcaaatgtaattataatattttgtaggtttgtaaattaattgaaacagaaaaagcttacaaatgttagtttatttataaaaaaaaatatgtatgtctttaaattaattttatagttttaacatctttaaaacaaatacaattaacctatatattattataatatagtagaatgaaactattgcagcataatttcacagcgtgaataattagtatagactatataaaatgtaaaatatgtaagacaaattatttgtgattgaaattgcatatttctaaactggaacaggttcaattacatgaaaagtgatcgatttaatggagcatagggactgaatcgagttttatgggtcaaatcaaaaacatgtttaagaacacacaaaagtcggtgggcatcacgtggataaacggactgggctgttaaaacctatcttcaaattggcccaactctaattcatcgtaatgggtttcaattaggctcattaaaattatggttattatatggcgcaagcttaagtcgaatttctatgaaatcgcaatactcgaggatttgaaaatagcggaaaaaaaccacattcattcacatatttcacattccaactttttcttcttaacaatatttaagaagccagtgcaaatcattcggttgagagaatataattattttcaaaaggaaatagaagcaatgtgagtgggaaaaaaaatagaacattttaacctcactaatgataaacaactttaaacatcgtaatcctcttaagtcttaccacataactcttgcgaaccggttccaatttacacaaaaatggagcgatccattggaggatacgaactgaaccgaatttgatggttaaacccgaaaccggtttaagaaaacacaaaacttggacggcttcagtgaaaaattcaaatcatcggtcatcctctctgactctctcaaatcgaatctgaagcttttagttttattctacgatcaaattccgaacgaacaaaattctcttgattccgctgatttctccgtccgatgcatcttctcgattgaaaattccattctcgtttgttattccaccggaggagtgagcaatcggctctcatttgtcttgttttagctcgatgttcgtcagaaaatttctgcagaaatcctccggcggtcagaatcctcctcctcctatagctcctccgcctcgggtattctagcctcatctctttttattctactatcctcgaggaataaaagttccatttttgatgcttctagaccattctcccgcttggagtttcactcttagtatactagcttaggttgggctcagctctatttttctgtggaatttgattgatgcctataatgttccccaagttattgaatttacaaatattttctttgcgatgaatagtttgttctcattttaaatttatagctaggaatctaggattgagaacttgttggagacgagaatttcaggaaaagaaatgtacttgacaaacttcaattttcgatcattgagatgcttcagagagagatatctcgtttaggattgaacgcatgctacttaccaaattatgcatcacaaatacattggttaacaataagtgttttaattccatcttcacctaagatagctccgttctaggaatgcttttttttttttttgctttagacgttcacatttagtatgaatctttgcagggatgtttgatggcagaagatttggatcctcatattatcacccactctgggataccttcgacggcgtctcttcttgcctttgaccctattcaatgcctcttggctgtgggaacactgtaagttcttgaaaacgaacattggtttatacgaaggaaattatagttgagatgaaggggggaaactgtataagaattttggctaagtgaatcactctttagtctttctagctatcataatatctatgatgagagaaacaactctctccctggtttgtattttatttgaactttaaaaagtaatgtactttttgctaacccctttcagagatggaaggataaaagtgattggtggcgataacatcgaggcaattcttgcatctcctaagcagttacctttcaaaaacttagaggtttgtggtattctgttcacctcttgatattttgagagcctacaatcatgttcagtttcaaaatattggtctctgattatagcttctgtgtagttcctttttttatttcctgatgtgcttcctagcttagatctctttcttcttaataatggtttacaagaagttcgatcacataatatactaactttcatgttcaaatctcctttgagccatcttatttgagtagtgggcagattttttttttctctagtccattcctttctggatagatcaacttgcgttgtgaacttgggacatatatattacagtccaaccgctttgtgatcccagttatctgtaacttcacttgacattttatctttatatcttacagttcatgcagaaccaaggctttctggttagcatctcaaatgaaaacgagattcaggtgacaattcagtgtgacgtttgaaatttctgtattatcagctgatgtcttcacttctgtttgactttcttgactctcaccttattggatcggtttcatcaacaaagtttccctatttattaggtttgggacttggatcttaggcaaccagcatcaagcttaaagtgggagtcaaacattactgcgtttgcaatccttcatggcactggttacatgtaatgagcttattaggattacagtttggagcactattattccattgacagtaactatggcgtaattaagtgtgtttcttatcttgttcacaggtatgttggtgatgagtacggtatggtgtctgttctaaactacagcgctgacgaagggaaattactgcagcttccttattatgttccaactgatgctttatctggtatgtagggttccctccttcaatgtgatgaccaaatgtgtttagaagcacgactgactttagaaaaaatttgttttcagctcttaggcattattttatttcttagtggtctatctaccttcaccaaataatttgcaaagtaattcttggcagggaaccatatccacttcatacttcagattaaatgcaaacatgaagacctccagcgttgcatttaagttattcttttaaaacttatattttctcccatttccctctttgtgcagaagcagcggggctttcatctcctattgattatccggttgttggacttctttcccagccttgttcaaagggaactaggtgagacaagatttcttctgatattatgttgtttttttaacctatagatggaaagcattgcttgatgataagttcattaattcaaatttaatcttctcattgaactgaagtgctatataaggaacatgtgtctctaaaactgaccatctgtgcctgtcatagcacatgaaactagtcttttcctttttaacttttccctctgcatctactaattatttagtttcatgctccaatgtccccgaccgttgagcttaaaataaggacaccatctgaagatatcataggcggaaatagtgaaagcatttagtgatcttcatgtctaacttgagaaacattgtatcattttttctttttgcactgtgattctaatcctgtcaaaagagtgaaaatcttgattttgctatgctattacagtgtattataagcaagaataagatctttcttatgattaattttcataacgattttgaagtaataatcctgcagattgttgattgcattttcaaatggattactttttctttgggatgcatcagaagatcatgtcgtgttagttcgggggaacaaagatctacctgtggagggtaaaacagttgctgattctcttgaagcttcacatgatgagctttccaatcttgaactcgatggaaaagagataagttctttgtgttgggcatcaactgatggttcagttcttgctgttggctatgtggatggggatatattattttgggacttttctgatgggcaaaaggggaagccatctaatcacgttgttaagttacagttgtcttcggctgagaaaagacttcctgtcattgttatgcattggtgtttggatgtatcccgcaagagtagtggtggaaaactcttcatctatggtggtgatatcattggatctgacgaagtacttacggtaagaactcagcccaaataaaaacgttcatagcacagattggtgatcttgggccaattataaaccgactttctatccaaaaagaaacatatgaaaaaaaagtcgcaaattttcttctaaacatgttgcattttcatggtacaagggaaacccaaacatgaatcttaccttgtagatgaaaatgcatagcctaattcagtccttttgctgatcaccatgtgcagatgttaggtcttgattggtcttctggtatgggaggtctgaaatgtgttggccgtgctgacctgacccttagtggttcatttgctgatatggtcttgtctccaattgccagttcaaggcagagtggggtgtttttatttctgttgacaaatccaggacaactgcaagcatatgacgatacctctctggcttctctgatgtctcagaaagagaataagatttctgtttctccactgccatatccaatggttgtaccaacgatggatccacatatgacagtagcaacgttttctgcattaaatgtgaatgataaaacgtcattagctctttctgaggtagtctctcgacaaattttcctagttgtgcttcccattgtgaggcaattaatttatatcttattcctgatagatagtcttagctgcaaaagctcgaacccctcgtaccccatccggagaaagtgcacaatggcctctgacaggtggtgttccaagccacgttgatgactacaagcttgaaagactttacatggcaggatatcaagatgggtctatgcgaatatgggatgcaacctatccatgtctgtcccttatttatattttggagccaaaggtattaatgttataacttttcttcttttgagcttcatcttgaaaactcgtttaaatatttttttgagaaggtttgtttgcaataaataatttcatccttcaccaatgatcaggcaagtgttattgacataactggagtagatgcatctgtaacggcattttgcttctgctctaagacttcttgtttggctgttggtaacgaatgtggtatggtaagaagacctgtttctgttgatacctttttgatttcagcttagattctaatgtgcatctgattttctcgcttttctgaatctgtaggttcgcctatacaagttggtcggccatacaagtggaggaactttggaagttgttaccaacactgagaagaaaggtttggctattgttacaacgttgacactatggatttgttatgctttatctcatgctgttggttcattacttgtagctcaccatttgcatcaagaagatggtcctcaatggttggctgcgttttccttcctgagttccccagtgtgcaccctgcaatttgtacagtctacaagaaggcttgccgtgggatttaaatgtggcaaggtagggatttaacaaatgtttaagtgtcggcatacagctgttttctttagttgaaagtaaaattaagttttctttccaaaccatttcaaattttcatttcaaattacaggttgcagtgcttgacattggtgtgccgtcagtattatttgttacaaatagcttatctgactcaggttctccgatcaagtcactctatgtgaaatcctcttcagctccaacaggctcaaaaagtgatccaactgatcacaactccataaattctgaagatgatttactcttgtgtgcaatgaccaaagatggacagaccattcttttggatggcaatactgggaaaatacttgcctcttgcctgagacctctaaagaacccaactgcgatttgtatgcacattataggtattttatctgatactaacataaaagtgtgttttcttatgcatctagtattcataaaaataattctattttgcagagaactgctatgaaaactatgaaacgcccagtgaaaaaccagctgaaaatccatctgggaaggataaacatgagaacaaatctcatataatcaaagctagtgagagtcattcaccagacggtgaacagaatgctgtcacagaaacaaaacttattgatcagatatttgcgaattcattatttctcatgtgttctgaggatgcactgcgcttgtatactgtaaagtctctatctcaggtatatcacagtatttatcctttttatgatacctaaagtatcttgctggctctttctgataacaaggacttgctttcaatacctagggaagtcttgagagcattatggaggtaaatcttccaaggccgtgttgctggatgggaatcctaaaaaaagatggaagggaatgtgcagtactcctgttttaccgaacagggcatattgaaataaggtgactttcaaatatatgtcagataaaagttagttaccaaaatacaatcttgtaactatttagtctgaaggctactatagatggaccattgattgctcagaaagaatggtttcttaattgaacagatctttcccgaatcttgaagttgtgggagagagctctttgctgtcacttcttaggtggaacttcaagcctaacatggagaagacagtatgttcagatgatttcggccatgtcgtcctggtgagatttcttagaagagagcttttcaacatgtgatgtattaagtatgccaagttaaatcttgatgtataagttggcatgtagaataatatcataagagaatgtttttgttatctcagatgttaaggactaataaaaactaaatctacaggtaaatggttgtgaagttgccatcctttcgtttttggcccacgcaaacggcttcaggtactggcttactgtttgctgttccatagaactttcgtatgcttagctagcaaagtagcaattaagttaccaatacctaacttttcattcatctcaggctcccagagtctttacctttgcttcatgacaaagtccttgcagcagctgctgacgctacctttagccatatctctgttcataagaaaaatcatgtatgttctgctttcacatgtgaaccctttttttgtaagctccactgttttgctagaaaagtttctgtgaccacaggatggcgctcccaaattcctaagtaacattatcaaaggcttcagatcaagcactgaacagaagatggaccaagtacaagatttctcccacctggggaacatcttttctaatccaccatacttaaaaccttctgataccggtggcgacgacgaaaagattgttgagctaaacataggtttgtaatatctacactaagttactcctccccgggttcctgcctctgactaaaaattgttttctgtagatgacatcgagatagatgaacctgtgatcatcttgccgttgacagagaaagacaaaaaagaaaagaaaggtaaaagatctgtacgcctcaagttctagtatcattgtgaatgcatgagacgattcatgaggtttctttgcagataagagaacggataaggaaaagctgttcgacggtgcatccagcgatgcacaacccaaaacaagaacagtggatgaaattaagtccaaatacagaaaagctggggtgagtcatgaccaatttgatatacccaactagcttcttttttgtgcttccatctctaacatagttgggtaatttttccaggaaacctcagcaatagcttcacaagcgaaggacaaacttcatgagcggggagaaaaactcgaggtcatatattacgctgcagagatttcatcttcatttatgtttccaagctatgtatgctaactacaaaaacatctcctttctttgttttatctgccagagaatcagccaacgcacagctgagcttcaagacaatgctgagaactttgcatccatggcacatgaacttgctaagcaaatggagaagcgaaaatggtggaacatatgagagagttgcagccattgtgggctcttccgtatataaactaattatcttttgtgtttccacaggtgaaaatttctttttcatgtttatttatcaatcaaatctgtaaaatagattgaccaaagagagcaacccttctaacttgaaaagttgcttgtgagctgatttgaggctgctttgactgtctatcagaattttaaatttaaaaaaaaaaaaacacagtttgttttgtcctttacttgatcccacagctttacttgacgacacacttttgtttgttatgagttatgacacatttgactaatgcttaaaaccctaaatcccgctttattccttctccttttctttctagttacacaacacagaacagaacaccacacattcgtacttacatatctacttataattgaaagaggacctcatatagaaatagccttcgagctagaaaagcacatagaagactgattacgagagatagacgacgacgacaaggatcaaccaacacagaatccatctctctatctctctacgttatctcttcattcagagagtgcaaatagaacgacagagactttttcctcttttcttcttgggaagaggctccaatggcgagctcggttttatcagaatgtggttttagacctctccccagattctaccctaaacacacaacctcttttgcctctaaccctaaacccactttcaaattcaatccaccacttaaacctccttcttctcttctcaattcccgatatggattctactctaaaaccaggaactgggcattgaatgtggcaacacctttaacaactcttcagtctccatccgaggaagacacggagagattcgacccaggtgcgcctcctcccttcaatttggcggatataagagcagccatacctaagcattgttgggttaagaatccatggatgtctatgagttatgttgtcagagatgttgctatcgtctttggattggctgctgttgctgcttacttcaacaattggcttctctggcctctctactggttcgctcaaggaaccatgttctgggctctctttgtccttggccatgactggtatcaactaatcctcatgcttcatctgcctacttcaagtgttttgatctctctctatattgttaaccaagtattcatgttgtttaccttgcagcggacatggtagcttctcgaatgatccgaggctgaacagtgtggctggtcatcttcttcattcctcaattctggtcccttaccatggctggtgacttttgctttcaatcccttcaatataatacaaaccttttctctcttggtaatgaatcacttgaagaataatatcacattcttcatgacaatatttgaattttccttgtaggaggattagccacagaactcaccaccagaaccatggtcatgtcgagaatgacgaatcatggcatcctgtaagatgttgcactatccataatcaaacacagatgtcgaaacatggtttcattttttttattactacttagatagagagcttatgtttttgtaactgcagttgcctgaaagcatctacaagaatttggaaaagacgactcaaatgtttaggtttacactgccttttccaatgctcgcataccctttctacttggtaatccttcatccttctgcatcttactataatctcatggaagaagctcatgtttcacatctgattcactgtattcttgatgcagtggaacagaagtccagggaaacaaggttctcattatcatccggacagtgacttgtttcttccaaaagagaagaaagatgttctgacatcaactgcctgttggactgcaatggctgctttgcttgtttgtctcaactttgtcatgggtccaatccagatgctcaaactatatggcatcccttattgggtatcctctacttctgtacctctccgtttcagacaaacttgattatgtattcctttgttgcctcagatgtgaaggtgtttattggaattttcaaacacaattaatgcagatatttgtaatgtggttggacttcgtcacttacttgcaccaccatggacatgaagacaagctcccttggtatcgtggaaaggtatgcaaaatctacttcaccttttgtaatcgagttacctgagagacactgttgttgtgagaatcacaaacgcttcatgtactttccccaaacacaggaatggagttacctgagaggagggctcacaacattagatcgtgactacggatggatcaataacatccaccacgatattggaactcatgtgatacatcatcttttcccgcagatcccacattatcatctagtagaagcagtaagagttcttgatgatcttaagtaaagactattctggtgtggacttacttcaatatggtgtgctaaaccttccatatctatcttttcattttcctctttttctagacagaagcagctaaaccagtactaggaaagtactacagagaaccgaaaaactctggacctctgccacttcacttactgggaagcctcataaagagtatgaaacaagaccatttcgtaagcgatacaggagatgtcgtgtactatgaggcagatccaaaactcaatggacaaagaacatgaggacatactgcagtgaaccaggcagacaagttacataaattcatcttggcccattcattatgttctttttgttttggtgtaaagccttttcgagattaaaaaagcattaatttgtagaaacctgtggtaaaactctcgatcaaatgaaataagatatgatcagtagaatacatttcatacaaggatcttgttcttgagagcccaacgacattattacggtgacaacccaacgcttttaatttaaatctactactgatgaaaagaaagggcattattattattatcagccagttacaattcaaaacttaatgacatggattggaaacaacaggttgatgctcaaaactatagttacaagataaattaccttggtttatattgcttgccattagtagtgtacagagcgaactgcagttataaaggagcttatcttagacttatccttctggataccgtctgtaccgcaaataccgctactaacatcaattccatcaggttgaaggatagaaagagcttctgaaacatttgttggattgattcccccagctaagagccacccatttctgcttctgacggaaggcaacttgaattgagcccagttaaatccgtgtccactgcagcaaattgttatgattgaacctatcacactcttgatatttcaatcacctcgtgaaagacaaatggttttctgtactagagtgattgcttaaatttttcttctaaggagtacattacaatgcgaaagaaattgaaaagttgttcttggtacctcccacccgttgcactatccacaagaatccaatcagcaagatgacaatcctcttcaggaacttcattcaagagctttccatcctgatttgcattaaggacatatatgactctcctcttgcgtactaacctcgagaaagcagcacgcgaaccattaccatgaagctgtaagaaaccataactatcaaccgttaataaagttgagaaaatcactttggtgagagcaaaatcaaaatcgataagaatgtagagaacctgcacaagctcaaggtcagaggaatcagctgctctcagtatcgtgttgtcatcatcttcaacaaaaacaccaacaggtttggccccaccttccctggccactttggagatatcctttgcgacagaaagagaaatggatcgttttgaatgtggccaaataatcatcccaataaaatcggcaccagcctcaactgccatagctgcatctctggctgatgtgatgccacacatcttaaccaaaggtctatcctttcctctttcatcatccttaggagctacattctctgtgttggaaacactgcagctcaatttcctgttctgagcatacccgactctcgaaaaagacaccgttcgattgcttaaacctggacaaatccagtaggaaaaaagagatcaatggcaagcttcagtaatttgccggaaacaaagagaatcacacacacagaaggtctagtgaaatctgaagaaaaactaaaagtcaagaaaagttaccagatttgtaggtttttgagaaattcagagctccaaaatggacgtgtagatcagtggatattcctgaggaaaagaacaaagcttgtttcattaactgatcttacaataaagctcactattaacaaaacaacacaaactctgaatttacaagacaattatacaatcgagattcctattagtgcatgaacatgtcaagcaaacaatataatatgaaaatggatcatcactaaagcagattgatagcagcaaaatcactactagaaaacaaaatcaaactcattgagtaaatacatcgaagaagttatctgcatttctcccaatgagctaaaccacaagaacaatacctgttgacatcttaatttcactgttggaaatctcagatggtatcggattttctcccgtcgatgaaatgagaagagaagggtcagcagagacgcggcggttttacgactgaagaagatcgacaagaatggcggaaaaataaaaacgaatgtaccaacttttttgttaggtgtaattaaaccgaaccaaaccgaattattgaattttctgtttggtctttgtaaaaccgaattaaccgtttgcttttcggttttgtgaaatttccattactttttcaagtccccgatgttctttaaattttgtttcttgatcaataattcataaagatagataattgatcaaatattcaaaataaatatttaagtttgttccaataattttcattttcaaagtttttttttcaatcataaaataaaagtaatgtaaacgttgaaaattcatgatgtatactatatatgttcttatcatcttcgaaacattaattgacatgttggttagaaaagaaagaaaaaaatgatgtttggtttattcatatccgaaatcaatagtcttctacgtaaatattaattgacttgtttagaaagagcctgtattttggtgtttgatcttattaaattccagtctcataattcaacaaaaaataaataataataataataataataatttgtaaatttctcatgttgaagctacaattgataaactctaaaaatgatatctcatcactcatcagttgtcggtaaggaatgtcatgtctacaacaacaacaacaacaacaacaacatgtcatttgtcaatatctacttgaataagattcaatgaatgcgaagaaatgatcagataataatagatttctggaggatataaatatgggattaagttatgtgatcaaagattgtcgctctactggtggtagtagtagactactagcttctgttttatttaactaacgaattgcaagttgaaaatataaagatataagaagtatatattgtaaaagaaatatcaaagtgtgaacgcaacgttattcgaatacaaggcacatgatgagacatgcgaagacaacatttgccgacatctctagtaacacggcggttcatccatcaaagtgagcccccaaccttacataattgtctccctctatttataacacgtgctaaatgtgattttatctataacttaccaaactattcattttggtttttttctttaaaaactttttctatgcaatttaatttagcgtacttattcgaacagctaaaaaacagaactattttcaataagcatacgtaattttcattcgtttcgtccttgttaggcgcaaactaatctctctaactatcctttcagactcaatcaaactcttcttctctttacgcgattattcatctttatgtcccttctccttcgtccattatttataaaccaatgctccatagtttatacttatacggcctgtttcgtccttatttatgattggataacactatgatgtatggtaatcaatcaacatttaactatatatagacagattatcttcaacagaaaaaaaaacacactatatatagattatgcagaattgattttctttttaattatctttattgggatttggaatgagagaattaacattatttctagagaatgatctaatgtattgaaaaacttgttcgatgtgacatatatgtggcaaaatgtacggattacataaatgtaaaaagatttaatttcgtactcctaatgttatcacttttgctaaacatggagaggctcaattttactttcatgataactacttgtaagcgaagaaagtttaaggtatttcagagttcccatgagaaaaattacatagatataagcgatttagtatataaaagtcagtaaaaaccaagaaaaaaaaaaaggagaacaagagctccataaataatagaaacgttttggaactagttgatttagtttgtctaccaatagtaaggcccgcatgatgagtgtggaggcttttacgagcgaggcggctagaatgattggaattacagtagagtgcagaaatatgtggtgtactactgtcagaattatttgatctaagttccatatacacagacaatcgatttaaaaaatcatgttcggaaaagacttacgaatcttttaaagaaaaacagcttggaaaagcaaataataaacattttaaattgtttattcgcaagaattatataaaaaaaaaaggttttaacttatagaaggcaaactccaaaaagaatatttcaggaaagactagaaaacattatcacattggcttttagatcctgttgaatcattcaatatgtattattggcagataacatttgacctaaacaaaagaattagttttctcgattatattttattagatctccgaaatctgtctttgggtaaaagtattcttgagaagttttgaaagctttacgtcattaatgacgccatcttatatgtattgattaccagttgattattatcccacgtggtatcgatattcaattgaagcaaaacaaaaaaaattgtttagttttctttgcgtctcgattcattttatccaaagctagcgttgactaattttatgagtacgattcaaaaaaataaaaaacatgcataagctctggtatgtcgacggaacctgttattgttgacttgatcgtattcccttttaagggatttcgtttactctttctaagattcatgtgtttatacaatattatcatatgatccgatttctagaaactttcacttataacctgcaagtagttttgtataaactttctatgaaacaattctacagtcaagaaaaaaaacagttctatatgtttgatgtgcaacaataacagaataactgacctatttaagtactctactcgtcattaatcaatattaatagatgttatgaagaaaaagggataactgagtaactgacctattacaaataaccttatatgtacgagtgaataaaaatataaattaaaatatggtaacggtctcattatattgcacaccgtaactgtctgcataagtttttaagtttaaaagaaaaccattatagaaagaagaaaaaaaaagccttacaagggttatatagatgaaacgagaaatacacactggtttgctttgaaatgtttcaccagatataatgaattggaagactcgagcaggatataaaaagtttcatcaaattctaatgaaaagaaaactcacttgatctctgttaaaataattttaccattcacattttagttttactaaaattattaaagtatattttagaaaactcacttgatctctgttaaagtatattttgaaaaccaattattgtggacagtaaaaactcatttgtgaagtgaaatccatgaagtctaagtcgaataatatttagaaacaagagttaaaatctttatgtatttcattttctaatttggttgaacataagctaaactctatatatatattgtattgtttttcttaaaatcaatcatacatacagaaatagttttctcaaatcatttgctaatttatctgtttctatttttcttagcatcaccaaatagatatgtcaatttcccatctctttatatataacaaaatatgatttatttctataaaataacaatcatctcatacacattaatctcgttgtgtgtcatctattgtgcaaaactgtttaattagtatcttaaaatattaatatatttactcttagtctttgtcgacacttagtcattgaaatagttaaaactattacaaccaaagattgcctcaaactcaaagtaatgcatagtttcacatgtcgatacaaattttgttttgtccttttatcccaagaaaataaaaattaaatcaatacttattcacacgtttcattaaataacaaagacgttgctttcatcgtctctagccgatttctagattctcctccaccaccattttacccttcttttaaattccttccttcaatcaaaattagaattatttctcaaacctcttctttatatactaaaacgtctcacatgaacaagaagaataaatagaaacaaagaagatgaacaagaacaagattgatgttaagatcgagacgaagaaaggatcgatggatgagtggcctgagccaatcgtccgagtccagtccttagccgagagcaacctctcctctctccccgaccgttacatcaaaccagcgtctctacgccccaccacgaccgaagacgctcctaccgcgaccaacatcccaatcatagaccttgaaggactcttctcggaagaagggttgtctgatgacgtcatcatggctcggatatcggaggcttgccgtgggtgggggttcttccaggtggtgaaccacggggtcaaaccggagctgatggacgcggctagggagaattggagagagtttttccatatgccggttaatgccaaagagacttactcaaactcaccaagaacctacgaaggctatggaagtagactaggtgttgagaaaggagcaagtcttgattggagtgattattactttctccatcttcttcctcatcatttgaaagacttcaacaagtggccttcttttcctcccaccataaggttcctcttctttaatcattttctcttctttttaagaatttttttagtgaattttcatgagtactgagtagaaaataataaatacggtatttttctattctttaaaatgtacggacatgtggtacaatcttgggaaattatcctctttttattagttttgatatactattaagttcttggggaatgtgagaaggctgattttttgcttttcacgaggagaattatgtgagttttaacgttgggataaagtccaatatagggaaatggataaattattgattatatttatatttattcaaaaaatagagaagtgatcgatgaatacggcgaagagctagtgaagctaagtgggagaattatgagggtattatcgacaaacttgggactaaaagaggataagtttcaagaagcatttggaggtgaaaacattggggcgtgtttgagggttaattattacccaaaatgccctcgaccggagctggctcttggtctctctccacactccgatcctggcggtatgaccattctcttaccggacgatcaagtcttcggtctccaggttcgtaaagatgacacgtggatcaccgtcaagcctcatccccatgctttcatcgtcaatattggtgatcaaatacaggtagattaactttttattaatatccatgttgctaatattctataaatatattttaacaaccttaaaaataatatgtaaacaaattaacatagtattagaaagaaacgataattaagaaacatataaacaaagtaaatatcacctaaagaattactaatttactacttgttgagttttaatcttaaaactgtaatatttttttttaacaaaaaaaaaagactgtaatatttttttcgaaaaacaatgttttaaagaatatctaaattccctattatcttgtatcagagaaaatcgtctatacagaaaaggacaaatgcgaaagttgttatttgacaaccaatgaatatgatataagctatagttccacgttttagacacgttttaaaaatgcaagtatgataaacagctaccacttggtgccaaaatgcctttatgattttttcaacgaaaataatgtaattattaagtcattattccgacaatagaaattacgtccttttagatctatcctgtcaaaccaaattttatggacaactttctttagaagatagtacagcaatcgtaatttggaattaatcgttttatttattaatctgtgtctgtctctatatttgtaatacgaaacaaatagtacatcaaatccttcactgcgcacatgtgtgtgtttggccgtttgcccatgttgcatagaaggaatatttatttctacaatgtataacacgatttttaaaacaaacaccatatgtatatgcacatgaaatttctcaaaacatcataaacttagatattattaatgtttttctaaattgttgtacttttagaaaataaatattgtgttttgtctaaattttaccttagaatcacacaacttacgtgttgataagctaatacatgttgcgatgatgaaaaatgcagatactaagcaactcaacatacaagagtgtggagcatagagtgatagtgaactcggacaaggagagagtttcacttgccttcttctacaatcctaaaagcgatattccgatccaaccattacaagaacttgtatcaactcataatcctcctttataccctcccatgacctttgatcagtatagactctttatcagaactcaaggtccacaaggcaaatcccatgttgaatctcatatttctcctcgttgattgtttttcttttatttcttcccttaaagaaaaattaatgttttgttatttttatgatattacgtctgacttgtatatgtgtacaatcatttatattttgaattttcaaaggatgatttgccttcatgcatgcaaataacaatattgaattgcatagacattttttttaacaatagttttagtttacaatcattttttaacaacattcaaaaaaaaaaaaagaagtttacaatcatttttaaattgtcacatctattagtttgcaagcaattttcaaatagtatattattataaatctctgagtttaacgtctatcaatatcatttgcacacattaattgtttatttcctaatgtgtcgcgcgtcatgtttgaaaaacgtggtaaagttgatagtgatcatggtaaagctaggttacaaaagaatagaactattatagaaatgcataattgttgaactctaaacgtcacatgatattatgaaatatggaatatcgttgaacggtgcttaatcaactaaactataaagattttcgttaacataaatattttacaaattggtcttcagaattcgatcaaatgcggtattggacgtgagtcacgtgaagaaagaatcccttgtggactattgttctacgtattggatagacaacaatccactacaatttcttttctttattttatagagagaaacaaactaattccaaatctgtatagagataccgttgaaaaagttcatcttttatatagagtcttgtgattgttttcgacctaacagagtaacagattgttagaattgatgtttaatttatcgtgttagaatccccacttcgatcctgaatagatatataaaagcataaaaaaaatcaacaaaatgacgtaaacaatatgaacatgttaataactcgagctaaaccctaaacaaacgaacatcgtcgacctaaaatatatgaatatcagtaataaacatcttaaaaccttttttcttcttcttgttgcccgtggataatttataagaccaagccacgtctgatctattgtgtgcctctcattcccatatttggattaatcattagatacaatatatgtcaaacctttgcacttataccattattacatttacatttcatatattcactattaaagtactataattagcatgtgcgctttcaagtggtggtttggccttaagtgtcgagttggtcagtagtgataataacatatatattatttagaaaagttaatacagaatatatattaatacaaaaatgcaagttgcattttcattcacactatcgacggttgcctctttttaatgaattgaatcatttaaaacaatgttcttttttatttactatacaattgaatcagaaatattactatacgtttagtttgatattagaagtttataacgttaatcccctctctaatacttttggtcgttaactaaagttcagattaacttataaatgttatatgacaaattgacaataatggaaaatggcagtagaccagagactccgtggccagagatttagtgatggaatagtcaacaaatggctcaatcactctcatggatcgagttttcaaaggctgtactgaaaacttatcataatttgtaaactcttttttagtattgaatctaaagtgtggtaattgttgtacagtaaaatctctataaattaataatgttgggaccgagaaaatttattaatttagagaggtattaatttatcgataaattaataattattaatttatagaaaatttttacaaattttgtattattttttataaaatttcgatataaaagtagtttttctttataattaatcattttttctaaaattaattacaaggaaaaaataattattaagtttaaaaaataatacaaagtttttttgacgtaataaaaatattagaattaaactctacaaataattaatagaaattgaagaaaaaataatactagagtcatatttcaataaatattttaaatagaatatatatatatatatatatatatattggtaaatttacataattattaatttataatattgatgggaccatatatttatataagattttcaaaaaaagttattatcttattaatttattaatttgtatcaatttttacattggtcccaacttagaaccggaagaatttattaatttataaaagttattaatttgtcgagtattaatttatggaggttatactatactttatgaaattgaaatcacaaatataacgacttttcccgtcaattcagttttagggattagagactgcaggagatgaggttttttccccactattttggttttgtgtacataacaaaacaccactataaccacttaaattttgtcagtacaaactcttagttaaaataccatatgagagattatgaagatcaaccttacataagaatatttttttttatattagcctaaagagagattacacacataaacgatgaaagtagtagagtcgctacatatacaaacacatggcatatttgatcaaaagttgacgaagctctctaagcagctggtgtctctatgactctctccatgtctcataccctcattactattttaaaacgccctttttgagaatctaacaccaataattgttttgtattcatacattaacaaaaggatgttttgcaataacttaaaaagaaataaggaaaaatgagaaagatgactcactcattcattcactcactgtcttcctttcttagtgcagcaagaagggcatttgtattgcttgatgctctctgctttggctggtgttatcttcacacacttcccatggtaccaacgttcacacacatcacaacatatccagaactcgtcgtttgtgtagtttcctccacaacttccacagagtgtgtctccatgctcatcgtcttcatcttcatagctctcttccattagtttcggcgtgctctttgtctgcccttcaattgatctctgcaacaattcaataccaaccaaaacacaactaatttattaatatcaaacccttctctgtctttgagaagaaaatactgttttgggatggtaaagattagtaaagagttcattatgatacctttacgccgtttctggatttgcttccgagatccatgcttggtttaccgtctttgatgggtttcctacccgtcactacttcaaagagagttgggagatcgttgatcagactaaatagacgtttcctgctcattgaatggaacatacataataagttcctagacccagtagcataatctcagaagactatcaaataagctcatatacccgcacatatgtaacttatgagcttcattaccagcaaaaacatagactcttatagaacgtaaaggaaataaaacttgaaggataactggataagtaacctagtgaataccacgatatcatcagctccgatagaacagatatgtattgaatgtagtagccatttctatatccaaacgatgcacaagttcaaaaaacagaaggattagtgaaaaatggtatgcatttaaagaaacttaacctaagaaggaaagaagctcattgacaagtagagttaaagtgacagaaagaatcaggaaacaaaaacaaaatagtgatgacacaagctcatgaatcatgatacagtccattgtccaaagacatattttttctcatcattaccaccacaatctagctagcacagtaaaactatcttcgacaatttataaaagtcactgaaacaagcaagaacaaaaggcaaacgtacctctcattgcgattaagacgagcgccgaagtaagaagaaacagagagtaaccaacaatcactgtggacagcaactaaagagagccaatctttacgctgcataccatctctagcgaaattgattccaagagctggctcaggtagctccggaggcacttcctcagctggaagattcacttcccatgtcccattcgggtgtccgtacaaacacagattctccatttctaagaccacccaataaacaaaaaaaggaacaaaatttatcaaaaagggtatctttttctgaaacttatccatggaaaaaacaaacacagatccgaaaaataaccatggaaagagctcgtttacccggatcgcataaagagtagaacttgtcaacatctagtaaaagagaggcaagaacaacaacatgtaaaattagaaagcttaacatttacgagaaaataggagaaaatgaggatagcgtcgtcgtctaacctacggagagagctcgaagaaaaccggagcgacgaccgctaaaatccttgaagatctcttcgacggtgcgagggttagaagactcagcggccatagatgtagtgacggaagaagcaaaaagaaagaaaattacaagtattgttagagaagacctaagtagatagatcagtggtgttagagatggattgaggtctgcatcaatggtttccaaaatccgatgcgcacggacaagagagatagagagagaccagagtttaagactttaagagtagtagtagtaaagtaacttctgtttttggtctctattttaaaatgggcctggcccatggcccatcgagttgaattctgataaaacgacgttttctctctgtatctctctgtaaatgagtaaagaagaagctgaaagtgtggctttaatgagtatagttt
